United States Patent Application Publication US 2011/0014706 A2 - sequence listing, part 13

SEQ ID NO: 26508 - DNA, 956 bp, Arabidopsis thaliana landsberg
gcttattgttcaccatgtagacgcggtttcaggttagccttatcaagtcatggaacactcctctattctgtctcacagaactgaatgttcaaaatatagcgaactacccattttaaatgcctagagtccatcacaaacacccacgatgatgtaatcaatgtggttgaagtatccaagaaatgatagtatacatgggatcttctgaccagagaatcaaagtatggaggaaaatagtcaatgaggacttgtgacaagctaggcaacttttcagtactagatgtaaggcacctataacttgtattgtgaaggtgaactcaaaattctccttaatatgtccaaaataaacttaagtttcagcagatggcatcatcgtaatatgaaaagaatcaatactaattatagaaattcaaagtgaactccaagagaagtgatataatattcttttcaatcttttacaaatcaatgttacatgtaagtgtttggacattatttacaacggtaatttagcaggagttcctgcttcacgtggatatttttgtggggtggaacgatctttacgacaaacaaccgttgtccgctgtccgtatgggctatgtgaatccactgcatcatattgtgacacaacaaaattaattcaaaacatgtatatttgcagattttgattattgaaagccataaacgagtaataaatccgtttatccatagttgcctagcaggtttcctggtggtaccacaattttaccacacttttctaccttattttcactaatattatgaataaatgtttatgatattttgggtcatatgaaaccaaacatttcccaacttagcaagagatatatcatcttcagtagtattgttataagttataacgttcgctttcaataaagttcaaaacatatttagtccctgctatggtataatgagagacctgtaagtgtcttctgataaactta

SEQ ID NO: 26509 - DNA, 954 bp, Arabidopsis thaliana landsberg
tatatcgtaaaccaaaaatattttggagcttatctctacgaacaataacaatgaattaattattttccaaacctttatgtatttacatgtaaaataccgaacaaaatttattaataactacgacctaatgaaattaattaagtttagctaatgtactatgtgttaatatatcatggaagaaagttttgtagctgaattataattagacttatatcatccaaagagcctctcttaaccgatagctcagccagtttcttgcaagcagaaagtgtcattggattctctacgcctacgcagtacggtcgaacgacatcgacggcctcttggttcgttacctataggacaaaccagcttcaacatttaatccaaagaccaaaaatgaaaatcaaatttttgaaatcatgcatttcttgttatgcttaccttgtcccacaggccatcagatgctaagatcaagaattcgaactccggtttaatccgtaatgttctggtttccggttcagctatcacccactccttgaggtaccggtctccaattcctcgtgagactgctaatgtcccttgaattctccaaacgccgttgcagcagtcaacataaccaccctagacacattcaaaaataagtaaaccaaacacaaattaaaccaaaccgcactaaaacattattttgaacgcaaaatggtagaatgattctccaatttgcaaaaattttatcaaccgcatttttactagagtcgctttttccacgaattcaatgattttttttttttgaaatgcaattccacaattatgtgatgttactaatcaaaatccaatgcacaaggataaaactcaccaatgcttcaatccttttgagctcatttgcttgagaaggattatgatcgcaagtgagagcttccgcggttccaccacgactaataacagcccggcagtcgcatgcattcgaaaccgcaa

SEQ ID NO: 26510 - DNA, 1056 bp, Arabidopsis thaliana landsberg
cagccattctgaaagtgagtgtaccttgtctttccaatagagcaaaatgcaatccattccttctttcaaccatttcgtcttcttacccatattagattcgttaagacgtgtttcttcgtatgtggtctatataaaaaaaagatttgataaccaagagaaaacgtaatcattagtacacaaactttaagctactactaccatactagcgaagaagagaagtaaggatccaatgtgacataccaaatccatgaaaacaaactgagacccatctttgtatgtgaattgtttggtttctttgtatatattagcttcctcaacctgtaacatagaatgatcataatcaaaatggtgcaactaaaaaatcattcatcagattaagatataagagaaaaagggatggtttttacagaaattccagcacgaaatgttctctcgactgtgctaccatttacatagttcctgatcttagtcctcacaaatgccgcaccttttcctggtttaacatgaagaaactctgctccaacaaagcaagaaaaaaccctcagtagactagtaagtagctaagtagcgaagtggaagcattagaaccaaaacaatgcttaaatcgtcatgaactagtaacagtatctacaaattcagaaaccttccaagttccaagtatagataataacctaaactaagaggaattgaggaagaagaataccaagaacacgccaaggagcaccatcgacttcgatattggttcccgctttgatgtcgttagcagacatagagcagtgaatccctgcaaaaatcaaccgtgtctgaatataaatttcaaaatcaatgcctgcatcgaatttaaagaagcgaatagagatattaactgggaaatctgttggttcggggagaaatccggacggcggggggcgccagtcgattcatcgatgaaaacgaagcagttgaataagggatacacaaggaaggagtagatgaacaagatacagagaaaatcgctcttcccgccattttgttcttccgcctgcgagtaaatagagtcttgctgtgtgtggaccg

SEQ ID NO: 26511 - DNA, 2257 bp, Arabidopsis thaliana landsberg
tgatttgacgttatgcaggcatgtgatgtgagaccattgagactgttttcttcagtttttagcttatagggggtagtagagagtacttaggttgattagagattgattttgaatacaaaatatagtgtgtatagatgaggaatttgaaattaataatgtaagttttcagagatgggtggtagtgtttcttctgtgtccataaggtgtcagaatgatttatgtgtagtgttcacatcaacaaagcaaagtctgaatattctcagtggcttttgctttaattttatatattttttgctttaggctaccagtaccaccacaacacaagagtggggatctaggctttgaccacatccaacctcttttcgtgttttattttgttgttttgtttcaaattctatcacttttgctttctgattactagactgctatcaatattcaaaaacattcttagaacttaatataatggatgataactaatctgccttaaacatgctctgcattatttcttgcataacataattgtttctaatcatcgctttggctaagtcttctactctttttttggcatgtgctacttgatatggggatgcattttggctctgcttaaaatcaacagtatacttgggtaagaacaaatatcttaatcagtcagtatgtgaataatgttgaatatgtatctgtggtgtctaactttgttaatgattcaggtggatatgacaaagaagataaggcagctcgagcttacgatttagcagctctgaaatactggaatgctactgctaccaccaatttccctgtaagtaccttctttctctgtatccattagtagtttatataacttgttcaatcttttcctaatccgttctaatgatatttagattacgaattactcgaaagaagtggaggaaatgaagcacatgaccaagcaagagttcattgcctccctcaggaggtaagtccaaaagcaaaaactctttaaaatcttatcaatggttttatattatgtttctttgatggtaaccagagtttaaaaactgatataacacaggaagagtagcggtttctctagaggagcttcgatataccgaggtgttacaaggcatcatcaacaaggacgttggcaagcaaggattggccgagttgctgggaacaaagatctttaccttggaacctttggtatgtaaaatcttcaaacttggtctagctaatttaacaatcattgtctgtggttaattagttagtcctggtgttgttgttgtagcaacggaagaggaagcagctgaagcgtatgacatagcagcaatcaaattcagaggaataaacgctgtaactaactttgagatgaaccgttacgacgttgaagccatcatgaagagtgcacttcccatcggtggtgcagctaaacgtcttaagctctctttggaagctgctgcttcatcagagcagaaaccaatcctcggtcatcatcaacttcaccatttccagcaacaacaacaacaacaacagcttcagcttcagtcatctcctaatcacagtagcattaacttcgctctctgtcctaattcagcagttcagtctcaacagatcattccttgtggaatcccttttgaagcagctgctctttaccaccaccaccaccaacaacagcaacaccaacagcagcagcagcaacagaacttcttccagcattttccggcgaatgcagcttctgactcgaccgggtctaacaacaactccaacgttcagggaacaatgggacttatggcaccaaatccggctgagttcttcctctggcctaatcagtcttactaaaaccaatcatataagttgattgagtcaagtttttatcgttataagagacacaacttcttgattctggctaacacataagctgactagaagaatcttaaaaatctcacttttgtttttgattaactgttgttgtttaggcaggagtagttgggggttggaaatgtggaagaatgtattaaacctaaactcggtggagaaaaatggtagtttttgggaattaggggggatggtttcttttgtatcttgtatgtataaggctatcagcttatccgcagtgtactctgtttccatttatgaaaaaattatcttcagaaagttctgtgttgctatttgtttgatatctatctaggtgtgagctcattggtaacaaattgacaactctaccgagaggttgagactaacaaagttaagtagaagcaacagagagacacaagttgaagatatt

SEQ ID NO: 26512 - DNA, 927 bp, Arabidopsis thaliana landsberg
  unsure (1)..(927): unsure at all n locations
tttgataatagagacataaaaagaaacaactcatatgatgatgattgctgtcttttttgttatcattctttgtgctttctggttcccattcccttaaaagtttctctactggctccactacattcattacttgttcatttcttaattaggatcaaatcattttcccttcagattagaccctttgctaaaactgattagcaattttggatattcaattttgtaatcaggttttaaactatcacattgctagtttggattttttgcaagtataatnnnnnnnnnnnnnnnnnnnnnnnnntttcttttattaccagtaggggggtggggatggatccatctgtcttttaacgaatatcacctttatgacataagatattttactcttagatttaaatatttgtagctctgctatctatttgtcaaggctccaattgaatcatctacttttttatttcatttctgttactatccaattgaaattcagcccctaattaacattagtttactaaacatttgaaaatgatggtatctttttcaataaaatattgcctaattgtcttgaacaaattagagcttcttctcacatgtcttctctgtgatattgtgcaatctacagatcgtgcttgatgtcccggatatgaatttttagttccaaatcttgaatcttttgattggagaagaaatgaggaagcttagtattagagactccttgaaatctttctttgagcctcatcttcatcctgacaatggtgaatcactcaaaggaacaaaaactggtaattttctttgtgtacttgttagtttactttttgtttttattaagatcattccaaatccataggtcttttggttttagacttgttttaatatggagaaattccttcttctttttttatcaacaatgcagaaattgatgagaaagtgaag

SEQ ID NO: 26513 - DNA, 134 bp, Arabidopsis thaliana landsberg
cagaagcaggtgatctatccaacccactattaacatggggcggagcagcgatggttagcttgaactgaccctcccctgcgtttcgtcaccgtagaactagtccgtttcggggacgcgtaaggttttgcataatg

SEQ ID NO: 26514 - DNA, 4709 bp, Arabidopsis thaliana landsberg
tggcaaatgacaattccataggaaagaaacttattttattaaaatgatccttacaactgaaataggtggagagaaattacaagaagatgtaatctgttctcattcattcataacaggtttgttgtcgctggctttgggcttctgttctcttggcttatcttccattttcctgattaaacataaaaagatgatgagaattaagaagatgagaagaatgacacatcaatagatagatctgggaacaacatcgagataatctcatatttggatcagacaagacaagattttgtaccttttgtcggacgagctacccttctggctcaggaaggatctgaatagaccagagttcacatcatagatcatcttcactcaactatctcgtaagcttcgattaccggaagaaggggaagatctggacaaaatcgatgaaacggaagcagtttttttttttttttagctttttcgatctcagaattttgctttagtggctgctacaagatacgagtatagccctaagtttgcacattccaacctttttatattgtctggatacgtacttgagccactttggatcattctctgtttcggccttttctctttttatggcccaaatccaccgaacataacgatttctgaattggcacgaattttttgccctttgatgaaagaaaaatctcgatgggtttatcaaaaataagaaccaagaagttggcgtttttgggtgcagaaaaacgacacagcgtgttactaatcaatgccaaaatattttacatatgaaacaaagaaaagagagaaaagcttcttaaatcttaatccgagtcactaaggtaaagttctcatgagagtagggtaacgagggaaacgaattcaagggtaactcttccctttgatctcgtgttgatgacgaaatgctccgggtattttctcagcagcatcagcaaaccgtaccatggtttaccttttgcttcagggatagcccagtcttcttgtgataggtatcttcttactcgactgtgatgccatacgtttccatactcctttaatatctgtcacagaccaaccactaccatgcattagccatcatattgaatcacaaagaagttcatagtcagactacactagtcattcaaaatctatggagtaactgacatactttctagacttagacacatataagtagcgtagcgcgtttccattggaaaactaattaaggacctagcttcacactaattatcaccttgacattatacaagtcttgtttcaattgattactcgtactacattctgtattagaaaaaggcaaggaactttctcataaaaactaaccaccgaatgaagtttttccataggcatccactctcccggaccacacaaatcggaaagcacagtggcaacagacgatacaacatctttttcctccagctgcaaaaattgttgatcatcagcttcacgatctacctttgatcttccctctctcttcttctctgcacaaatgaagcagatacaatgtcgtggtgtcactagcattcaaattcaatccaagtctaacaaggttcaatcagcaaccaccacaatcaaagtctaaagaaacaagcctgatgtgatcaagtaagcatcataatctgaaacatatctagttgcacaatgaaaactcaaacaatcatgagcaatctggttttacctccggaagcatatactacttcatgtccatctctccttgttttctttccacttcctctcatatcgtcctcctcatcgtcgtcgtcatcatcatcttcatcatcgtactcatacaactctctactcctgacgcccttcttacccgacccagaacctggacccgactgataattatggtatggaacaacacttgtttgcccagagacgtggtgcctaggtcccaacggcccgcctaagatgctccgaaccggtaggagaaagtagaactctttgtctccgatctgcaaaaggtcttgtgaatcgagcttgacgttaggattcccagggagatgaagaacaccttcaacgaggcagccatttttgccaaggacctcgagagagaagcgtcgtctagtgaagtcatagaagatccgagcgtggttgcgcgagatgttcatcccaccgccgagggatgagagatcaacgtcgacggtggctttcttagaattccggccgagtataatggagtaagactgcatatagtactcgaaatcctcaccttgaagcttcgcaaatccaacctccacatcgcttccgccaccaacagccgtagccatgccgtgaaattctccgatttgatcgaaagaggaaccgggacttccaaattagggattgcaatcgtaataatttgtgaatcgaagcaagatttgtttggaaactggtttagcttatccaggacaaaggcttattttgtgaaattgacgattatacccatgattttaagacctgaataaaagtcctaatgacacaactatttaaaacagccgaagaaacattgagaatggcggcaagatctgtgagcttaaaggttccatctctcccgcaaatagtggagcatcttattgattgtttgaattttttgatttcgtttgctttagaatataggcttggttagttttatgtaaccttttgtttattttcgttgttggtttgattgaataagttgccaaatgatgattgaaaattttgcgcaagggttttgagtttcggatgattggagtttactctggtctgaaggaaccgtgacaaaattattttctaataattcattctgatggcagctcaatcattgttagatatatcaaatttcaattcgagttttgggtgcatggtttgattcggatggttaattgtagtttgttttgttagtagaagcttggttttggggcagcttaatgaattttaggattcaagttttcaaatcatttagcctataatgttctgaaatgtgttgtgtaatggctttgatttcctgaggatctgactatagaatgtttaaaatcctgaggaacggtgggaaatcatgtatttgtgtttctttttttttttaagattcaggttctacaaattatgcttaaagggctttgagctcctgaccgcttgtattatgagatccaagaaaatgtgaaaagtcgttttttttttcctttcccattttgatggtttgggttgcattttactgttcttttagttatcatgactatgctagattctggtctggacataagttgcttaagatgtgtggaaattatgcgtaatggatttagaattggcaatttgttatttgaaggaattcacttctatagatatcctttaatggcaccctatgactatctttttgagtttagtaatttgagttcatggtcagctccaaatatgcaagaaatcggaaaatgcattagtgtagtcctcttttctggtatattgtcaatactcaaatcttacataaactttgtttcaaggacaatgaagcatgtggtcaagattttgagcctgctggtagctgtctctgccttttagtttgctctcttgcaggctgcaattatggctcgtagccaaacatagttggttagtaatgagtctgttgtgctcatttttgcttattgctattctcagttagtcaatattaataatgtatatctttgcaccagctacctatatacgttgtagtgtcctttgctattaattgttggaatcggtttagtgcagttccctacctctcctaaagaagcagtttttctgcagcgggtactttcagtactcttttctttctttgttaactcgaattgttaattaaggttaaattaagttcttgactagtgcttttgctcctagctgttgttaatgttgattatgtactagtttgttttggtgctatcgttatattgcaggatattgcagatgcaaaaagacttcttaagcgctaacggaattgatgttggatcggatttgacacattatggtttacttcttttcaactccctaaccagtgtaatagaatacttggagtcttcgatggttcatagaaagagttcccattttcattatgtacagtcgtttaatatgttcttttgagagatgtgcattgagaaaccggtgtttgcaattggattttgttttggggttttaaacatgatgaagaacaatgttattctgataagttcactttaattgacttttttttttggaatatcgtttgttacattttttctcgtggatacaataagttgtgaatccaactctttcaagtttaaactacttgagattaacttaaatgctccaataaaattgattgaattggattttctagttttgtttgttttgaagtaaaaagttggacttgaatgctgataagtgataataaattgacttgcaaccataactgaaccaatctaacaacatgtaagtatgtaactattccaagtttattataagctagatttctgaaatggaaatgtcgttttaattttacatttttgccgagatggttaaaactggtaatcatatacattacaatttggttaaatgaccaaatctatttgataacaaagagagatataagttaatgaaaccatgattagacaaatcgacaagcaaagaaaacgttaagcaaaaaacactaatcataataagcaaaaagtccatccatgttcatcacatgtacaaagatcctccctgacctctggtgtcactctagacatttcctctgt

SEQ ID NO: 26515 - DNA, 3525 bp, Arabidopsis thaliana landsberg
caccgttgtcaccgtctgaattttcagaccggcgtgtatcatttgcagaggagatgggagtcggcagctgtctggatgatacaggccctaatgcaacagacctaataggattgggcttacgaagcccacaatcatcattttccaaaaattcagatattggagcccacaaagctttagattcgtctgaagcctgcaagtgattaatcggagcaaaaggaaactgtgtctcagagaaaacaacatcttttgagacaaaaaattccaatttttctaagtcatataatctccagccttttttctcatacggataacccacaaaaacacaacgtttacttcgggaagcaaatttatcaccacttttattctgatcatgggcatagcacagggagccgaaaactctgatatgatcataagttggaactttgttaaataagcgttcgaatggtgttgcaaagtcgagaactgagctgggagtccggtttatcaaatacgctgcggttagcacacattcaccccaaaattcaatgggtaaagacgcttgaaatctcatgcccggcaacatttaagaatggcgatgtttcctttagctcttgcatttgtgaggagtagctacacacgaggtttcatggatgataccattggtgagaaaatactcagttaagcatagaaactcaatcccgttgtcactccggatcctctttattttggtattgaattgtctctctgttaaagcacaaaactttttcaactgctctggagcttcacttttagtggttaacaaatacagccacactcctctggagtagtcatcaacaatagttaagaagtatcttgctccagaatgagatggagttctataaggaccccataaatcaacatgtattaattcaaaaaaatttgaacttttattcatactcaatggaaaactatcccttgtctgttttgaacgaagacaaatatcacaaggcttattcaaactagaagaagaaacagaagcagaaacaaacggaagctttcccaccacttgcgtctacggatgacccatccgattatgccacaactcaaatgacttgatttcctttgttgcggctgaagctgcgatctttgtactacgaaagtgaaaggtaccacccactcttttaccacacccaatcaccatcctcgaaatgcggtcctaaaccacgagaaaccgatcagccaactgaacaacacacttgttttcatccattaactgccccaaagacatcaaatcagatttcaactcttcaacatagtaaacagatttcattaccaaatgactaccaagactaatagaaccttctttgtaagaaacttgctctctaccgtctgccataatgatcaaaacagggggcatttctagcacatttgttaaggtctcaaaccttccagttaaatgatgtgaagcccctgtatccataatccaaggagagacagaagacatacccgtttgttgttcagttgaaggttgttttcccgcattgagaattgattttatcattttccactgggtatcattcagtccatgagctccagatcgatcgtcgtctgtgagaacgtgattagcttgttcagttgtcacgatttccacattcggcacataaacccgattagcaacctcttgggaggctccgcgtcccctgccaccacgagacgtactgccaccacgtcccttcccttgtagagtacgacccttgggtctatcaccccaccactctggatacccgatgacagcatagcaagtgtatgcgttgtgtccgatgcggttacacaatttacacaacgctcctttctctatgtcatcgacacggtaacgtggtttggtgtgaacagcaaacgacgtcactcaggtttttcttctcctccactgatacgaagatcttcctcttgtctcacaatattatagacctcctctagaggctgcacaggaacccgagcaacaaggcttgagcgaaccgcccgatattgttcatcaagtccacacaaaaactgatgtaccttgtcttcttcacgatctgtctgttgtgccgtagcaagatcacaagtacacaacccacacttgcaagttctgatcggacgatagcttgcgagactatcccaaatttgagtcaattttgcataatatgcctcaatagcaatacctctctgtttgcaacacgccaattcagctttgatctgctgaatccgagcaccgttgatcacagcaaaacgtttcttcaggtagtcccacaaatcctttgccacgtctctgtgagagatggtcgaacgtaacatcggatcaatggtcatcttaatccaagatacaaggagggcttgaattgtccaccaatcctccaagtcaggtgagccttcagccggtttgttaatcgatccatcgagaaagccaaacttcttccgcgatgtcaatgccgtcttcatgccgcaggcccattcatcgtagttagatcccttcaaaagaggatgagagatcaccgctccgggattgtcagccgaggtcaagtcataaggtgagatggttcttctcacctccacagttgcattagcaccagtctctgtcgccattgattcttcacgagttcaattagaaaatttcagaaaatatagattcaagctctgataccataaagagagagtcagaggctgagaatttctgtgtattaagaaatagttcgcgagcgtacatatatagctaactctaaacaagaatctgaaatctaggtacaatctaactagttacaacaatctttgcctttgttacggagttgatcgcaaccttcgaatatttgcagtatctgtggaatatgctgaatttgagtaaaccaacttgaaccaaacttcataaccgagactaaccaactctcaatatcttattagataaaaatagaaattagaaaagctaacactaattctaattcatcttaccaaatattaaaaagagagaaatattcaattaattatcaattataaaaaagaagtatatacattattctacccacacaaaaaaaggtaaacatccacctctatataacaaataaataatcttaaattatatatttctttgttacgttggctagaatacgtattatactatgtttacgtttgaaaagttattcatgattattgtttacatttactaattatactgtgcttacgtttgaaaaaattattcttggttgttgtttacatttatttacgcttcgaattttttaaaacaaaattcagaataactatcatcatgaaaagttcaaaaaaccaacaaagattatataataatagatcaactcaataaaaaaacgatgctatcgtcgaacggtggtacgtctaacaagaaagtgggaaggaagaaattcaaaaaagagttgattcattaccatttatcctgaaaagtccaagtgaatgtgctcatgagaataaatttcctcctacttgatgaaaagataatttttaagattttaatcctaaatattctcttatttatttttatttttattttttattaaacggaca

SEQ ID NO: 26516 - DNA, 1438 bp, Arabidopsis thaliana landsberg
ttgaagactgtatgtttgtgtctggtgtaataatatttgacattgatatttatttgtcacactaacgacatttattatttcccgtctttctcactttatcgatttacagctggatttctgagtttttatttctttcttaaaaaggaaaacaaatataagaaaattagaacttaaaaaattccctctatcagtcaaatggagttcttcgtccttccggtggaaaattctcggaaacgattgaacttctgataatcaaatccggttcatgcgagttatgtaacatttatcggtaatatatcttcccactctactgcagtaattcgagttcaatttaggatagaattgctttacaaataaatttgagttatcttctacttcagtcttgtattgtatcttacaagttcatgggtcaattcaagatctcccttttcatgtttccgaatcaattttcttttacttgagagaaccaaaacttagcaggattcgcgttttcttaatttaatttgtttcgattcagctccgtttgcttcttgtcgcttccaatttcccgaccaatgggtgatagatttgtcctagcatagaaaaaaataagattaattgatgtctcagatgtaagatccattacagtaaaattcagttgtaacatccaattcgtgtgtttgaattcaattctctgttttttattctatcctgcagatcattcgttaagatggtgatattgagttgtttcatggagtctacatgttgaatttgtggctacgagaacatttagtatacgtttgccaccagcagaacctagtggctaagtttaggagtcagaaagcaatgaaattgttaagatttgctggtcttgttttcatttttatcacaaccttccagtttgtgaacatacgttattatggtggtgatatattctctttatcttcttaagataagtttccagtatcaattgatgtaagcacagaacccgtaagcacgttgtccggtcctgaaagattgaattctagtagttcaagatccgttgaggtagatgaagaggaaagcaccggtttaaaagaagaccatgtgattggctttgataagaatgacacagttcaaggccatgatagtttcgtagaggatgtcaaagataaggaaactcttgatttgcttccaggaaccaagagcagctcaaacgagagttacgagaaaatagtagaagatgctgatattgcttttgaaaatattaggaaaatggagattctggagagtaagtctgatccttctgttgataatctttcctcagaggtgaaaaagtttatgaatgtttcaaattctggggtggtttctatcactgagatgatgaatttactgcatcaaagccgcacttctcatgtctcactggtatgtgtctttagtctctgattagacaatcaatgctcttgtttatactagtaca

SEQ ID NO: 26517 - DNA, 1331 bp, Arabidopsis thaliana landsberg
  unsure (1)..(1331): unsure at all n locations
aacccacttggtgactccagcatcctcctcctcttctttaccttcatatttgttacttctcacaaaatccttcaaacctatatttcttgtgatgcaagtaaactcagtgtgatgatcgttggtcttaatctcctctttgacactcttcttagcggtaaattctggaattggtttcctcacgcgagtaatgtgtttttgagcnnnnnnnnnnnnnnnnnnnnnnnnngttactctaaccggatcgatcttatagacctttcaacttcttgcagttgttgttgttgttgtcggttttatttcttgttcgactgaagcaagactttgaggatgaggacttaacgtctgttgtcttaccgacagaacaaagcttcactttcttggcgttagattggaagatcgagttaaggaagctcgtgagacgcgctccaggagagactggctgcttcgatctctttatctcctcaatcatcttcacgcctttaggcttcttatcatcatccgacttgcaaaacaatctactatcgtagtccattaccgatgttctctttgttctctgtctctcatcacctgatcttttaccttgttccgcaagttttctcaaccttctctttgttcgataggactctgcctcggaagacgaaaaagcagaggaatccgaggagttagtggtagtggtgctgcttcgggcgtaaagccagttttcttcttccatgattgctcgccttggagttgtaagcttgtcgtctctcttgtttggcgatggtgaggatgatgacgaagatacattttcgtggatggatccttttaggtcactttgtagaccgtcggattcttcgatagagcggtaaacagagtcaagaacagaggaagagacagaaggtgttcgttttctctgaggaaaagccatgagagagatctcaaaggtataaagaaaaaaagagtatttatagatataaaaaaacagctcaagtgtgcttgtctggtaacataatatcaagagctgccaagacataatgatcagagttagataaagcatatattatcacttggatataatatatagttttgaaaagctgtgatttgtgtgtcaatagtgattagcgtttgcgtaaagaagtcaaaagacactggaaaagtatgtgggaccaacacaaaagccggtcaagtgatgaaacatgctttgggtgttttgcttctaacaacattcctcattatactcatctgaccaatgtaaatgcgtgcgggtaattattatatgcattagagagtgcccgctgctatgttgacactcattagaaagtgaatttttgtttttttctatcagtaatatc

SEQ ID NO: 26518 - DNA, 447 bp, Arabidopsis thaliana landsberg
cattgttgtcgccgtaatgtggtgcttgatgttgaagtttcttgaggtcttgaactatatacatcgtcgaaatggagatcaatcccagcttcgatatcgttatcgtccatgaatgtagttctcgacaaatttcttcttgcattctcttcccaatccaattcttcttcttcttcatcttcttcttatatgcttcttctgctccaagagttgtctaataagtttcctgctgtgtagcggtttataaaatcaggtggctcgatgaagctattggtggttgcgggatgagctgtgctgatctgagagtggttgcctcttccccaccactggttcctaccatcaagaggatgctgactcccataactatcctctccctcgggttggtcatggcgcagaatgctctctctgaaaaactgacctgatgtgcttgcctccatgttgagcagatct

SEQ ID NO: 26519 - DNA, 597 bp, Arabidopsis thaliana landsberg
  unsure (1)..(597): unsure at all n locations
tgaaaccacgtcttgtcaacgatattgtaagagtctagtgtcttgattcgatccatagcacccactccaccgaaaacgtaaacgttttcctcatccgctgccatcgaatggaaactacgaggagtgggtccttcttccaccggagttagcagtttccactcgtttgttgtcgtgtcaaacgagtagaaaccgttgtattggcgtgaaaagtctcggcctccaaaggtatagagggtcgatcctactgacaccatacggacacctannnnnnnnnnnnnnnnnnnnnnnncggtggctggagaaatggaccaagtccgggtctcgaggtcaaagacgtaaaggtgtttgtcgatgggctgatttggtgtgaactcgccaccaaaggagtaaatcttgttgcctacttgtgctatgccatgtgagcatcttagccctggaccttctcctttttgctccacctatgagtaatattttttagttattttaaaagaaattatttatctgattaatgaactcccataagataaatttaataaaattttaaattttaaaagtgtcattatgtgaattccaaattcaaccctcttttcttcttca

SEQ ID NO: 26520 - DNA, 1219 bp, Arabidopsis thaliana landsberg
gtaagagtctggtccatgattgtacttttgaaattacaaagatagagatttagttgttatgagtttatcgtcttgagacttctatataagaagtaaaaagatttgcaaatagtccttgctcattaggtacaacagtagatcaataaggctgttttagaaggtaagcacgtgatctttgaaataaccaacttgtcttcacctaagaataaaaaaagattgaccttctgagttctgatttgttatcatctaccaaattatcacaagagtttgattatttctgtctaaacaatataacacagctttagagtaacgaatagtgttacagtaaggttctgttacttcaattttttctttgccgatcttaaaatgagttgcaaaagaatgctttttacttccaccaatctgtcaaattctctgcagtttttaacacaacttggacttgctatgttctgtttcacgaattacacgagtcaattcaacataacttgctctgttctggtccatgtttcacagaatctggccttaagcaattttatcatatttaagctacaaatccataacagagtttaacaaagataaaataaccagaaagttacattgaaagataaaaagtgaagaagacaaaaaaagagagggtaaatcctaaatcgaaaacaaaagaaggcattggcaatagcattccgattttaaaaaccgataaatctatgtatctaatggcttgttcttcgaagcttcaacgaacatagaagcaacctcattcaaaaacttagtcttctccaacacaaattccaactccttagcttgcaacaacttatacttctcttcaacaatcttcttactctcaacggaaaccaaactccattgttgcttcacataatactcatcaacacccaaactagcaatcatcctaacaagagacgagttatcaaaccaatcacatccattagttgaagaaacaccaacaaacgccaagtcttgctttacagaatcaagcttctccttcgtcttactcgcactctttttcgacacaccgtaggacttagcattagaatcaagagctattcctttaggtccccaaataaactttgacaattcaaaagctttcttatcatgagctttcacaaacctaggttccgcctttccttctttagcacggtacttcttccttaaactcctaaccttatccgagaattgactcttactaacctcaaagctgata

SEQ ID NO: 26521 - DNA, 1138 bp, Arabidopsis thaliana landsberg
gtaagtctgacctgtgtagatccataatatgcaaaagaaggttgacgtttgtggctatcatattcatttaaataaaattgaaaaaaaaaactggatatgataagaggaaatcaacttggtatgagaacatctcagtagatactagtaaagttaatcatcaatcctaatagtttctgagaacgttaccgattccagaagatggtaataatgctgcatgcagaaaaagtgaccagtatcattttggtatatcattactgttgatggctggcacagttttcatttggtgggttttaatacctatatttatgcgaaaaagttacatttttctccaggttcagtgcgctggaggatgaaaatgactctcagcgtgatttattaaggaggacaactattggaaatggtttttcctaatttatttcgtcacaaacgtttttggtcagcttccttaatgcaatctgaccacctcaaacaaacatgcaggccctccagaatctatacttgactggactaaagagtttgatgctgagttgtcaaaccagagttccagcaaccaagcgttttcgagaaaacactggcgtctccttcagtgccaaaatggttagtggatatgcctggtgtctgcaagcattatagttctatttcttattaccctggtaaattacaataagtcatgatgtgtgcctgtaatcgacgtcaacataaaatttcactacaatacaatctggaggatcatcttaaatttgggagtaatcttctcacttttaaaaacattttgcaggtctacggatttttgaagagctacttgaagttgattatcttgtatggaagtgattttctttttcattttttatggcataatttcctcctgattacatagtaatttcatttagtcaagcaccatcatttacggtgctaagcatgcagccaagaagctgcagcagggctatgaaggctgttggtgttgtagaggccacatgtgaagagatattcgagcttgtgatgagcatggatggcactcgatatgagtaggtgttttctccatcttctgtattctcatttaaatcatcctttttggtttttctttcccctcatttttcttatagttatatgctttgttatttggcaaaatttattggat

SEQ ID NO: 26522 - DNA, 1534 bp, Arabidopsis thaliana landsberg
caattgctataataaaatatccggacacagtttctctactttactcaaaaggtttttggagtcaagagtgagtttaccatacattgaaagcgcaaaagtcgagtggatcatacgccaattattctttcttttgccgacatacgacaattctctactgaaacaaattaatatagaactccctaactaagtagtgtgtcatggacaaaacctgcaacgtggccattagtttctcttaatctttatacttaatggaaaatgattgtatttaggctaataattaacgaaaatgatttgtcttttaggttgtcatttccaataatttcttgttatatgattttattattttcattttactatgaattaatcagatttgtcaccagccacactaataatgaagcgtgaaatgccaaattagtatttaaattttctttagaaaactgtaacatccactgttatatacaaaaattcaccctatcactaacccaagacagttagcatgttaaagtttaacgatttggatatatgcatgtgtctttcagatccagtaaaagatggtcattaaaatttcggaccaaaagaaaagttaaaaatatataagctacttaacgggagccctaattaattgcacttggttgctttttccaatcctcaaacgaaaaggggaccaggttcagtgaacctgtaaatttcaatctctatgtttttggttttttatttatatggattgtcaccatgaattttcaaacgtaagcatgcttaaaagcaataatatattatataaatactcctattattatataatatgaaaattaccaaattataagtagtcatctttagctttccatctactttcttataattgaaaacgaagttggtgaaacatatgctcattattaagagttgtatcacaccatatatatgcataaggtttgggcagagacttaaagtagagatacagagtcagagagcaatgatccttatgccttctcaggcgactcatcatcacttcatcatccatcgtatgtctctctaatctttatcatactcgcacatatgttttaaaccgcaaatatacaatcaaattattcgtacatatgtatacaatacatgagcatgttatcaaatgattcgtacatgtgcatgtatacatgatcatgtgtgtgtgcttggaatcattacgatttttattgactatacacattgtcaggatcaaaggtcgaagaagaagtgaagatatatcaactgattatatgtttggagatgattaataagaatcatagaaaatgatcagcgatatggagtaatcctataacaactggttcgagtttgatcgaatcgatatttcttttctttcgattgcttcgaataaaaagttggatcatggtttgaggcaagtaaaagatcaccagttccccctttcacaacttcaatctcttttgtcaaggattatattattacatactctatgttttaattttcaaccaaattcaggttcttattttgtcagattatatgaactaatattcaattctat

SEQ ID NO: 26523 - DNA, 869 bp, Arabidopsis thaliana landsberg
  unsure (1)..(869): unsure at all n locations
accagattgttaattaatgcgacaagtgaatcataaaaaccgcaacgtgaaattttccatttaaaatttctatcttatgaacgtttgacctcactgacaagctagtttctctatgtaatgttgtctcaagcgtgtcagttttgaacgagagtccgtctgatttggtcagaacgttttatcccttctgacttcttgaaagcaagcaatggaaaaggctttggtcgtccacatgttttgtattgtttacgcaagaataaaggtagaaacatgatatcaacgaacaaaatatgacatattttaaatcctaattcaagtataattcatgattttaagtccgtgatttcatatatttgaatgacgttaacatattgttacaaagtacatcaatggacaacaatttatagtggtgttctnnnnnnnnnnnnnnnnnnnnnnnnnnnnnnnnnnnnnnnncaactatatcactagctagtcggctatcaataattatttttgtgtaggttaagctttatattcagcatttcgggcatcttttttacaccattgctattaaaattttggttttcataaatgtaacgagaaataaacctaaggcaggtagggacatgggagttgggctgaaacaagactaaacatatgatgttgacagtcgacaatttcgtcatctctgccacgtcgtcatgctagtaggggccaacttttcatataatttaggcagagtgtagacatgtcaattgggctactccgatctctgtctaaataggactataagataggcatgtgtttgtttttattttatctcaatcaatattttttgttgcttcaaatccaagttaattcaaatgccaaagtaagaaaaccaaacacac

SEQ ID NO: 26524 - DNA, 1683 bp, Arabidopsis thaliana landsberg
  unsure (1)..(1683): unsure at all n locations
gttgatatgccttctgaatccatgaacttgttttacaaaatcttttccatttcttagagaacaagcaggcgtttcacgcctggtgtcaactagaaaacatttcttttattctgacacattaaaaagctgtcgtgagatccatgaacctaacctaagttcaggtttgtactacatacccaaaaaataaaaaagttttcagttttgcatttgtatttagatgtgaaatttttctaaaatgttttcacaatttcaataggtataacattttgagtttgtatttagatgggatttttatattcttacatattttcacatttcaaataggtataacattttcattttccataaacattttgttgagtgtaaatgaatcttaacactgaacataaacaaattatttcgttaaggatagacttttttacaaattttaaatgctaatacaaaatgtaaacataaataaattatatcattttccttcataattcaaattttaaaactaaaactattatatttttatttatagagaacgtacaatcaaatatttcaacttataaatggagacattcgacatttttaatttagtgatcaaggagcgagagttaattgtacctaacttgtttcagccatatatatatcatagctctagccacttgactagctaggtctccgtgagctagggtttattttgaacctaatttattttggcatagccatatatgctttgcttaaaaattgaagccattaaagaattgcataaaattaaacccaacactcataaagatttaatcttttcttgtgttttcctttaatcccatctcattttagtctaatgaagctataaggtcgatccaaaaaaaaactaatctctaatgctatataatctaccaattaacatcgtcatttatcatcatcaaccataatcatctcactcactagcaatggctcatatttcacaaatctcttcttttctctcaatagttttaatcttcctcgcattatgcatcactctcttcacgaaccctactctctcactcccagccctaaaacttaaccctttccaagacttttgtgtagctgatctccaagctaccccaaccaacagtggttacccttgcaagtcacaagtcacctctgaagacttcttttattccggcttgaacactcctttaaacacctcgaacccaaaaggtattgccgctaatccagccaatctcttgacctttccaggcctaaacactttgggaatatccatgtataacgttgcaattgcacctggaggatacaaccaacctcactctcaccccggtgtaaccgaggcaggggtcgtgatcgaaggctcggtcttggttgggttcttaacgactaactacacgttgtactcgaaggttattggacccggtgatatgtttgtgattcctccgggactcattcattacgaggggaacgttgggaaaacgcaatgccgtcttttgacggtggttgctgacgacttgcctagcgaggttgatgtgcctcacactctgttggctacgaaacccgcgattccaaacgaggtattgatgtcggcgtttaaggcggatagtaaaacaatcaacatgctcaggtcanagtttactgcttaaaaaatggtctctatattcttccttctaaaatgtaatctttatgagtttacttaaatgaata

SEQ ID NO: 26525 - DNA, 1136 bp, Arabidopsis thaliana landsberg
actaaaaatcgtcatctaaattgagatcttggtgttgactttcggttttaagtataccaactatgtcggcacaatggttgacttaacattagctatttcaacaaaactggtctgattggtaaaaatactaattcgatcgctatttgattggactttaaaactatggaaagttgatgacatatatcatagttatctaatggaattttggtacactcagaataagtagagaaattgtttggtattagaataaactaaaagacacttatatgatgatataattgtgtatatgaaggaaccggatgataatggctatcctcggaacatttatggtggtggcggttctttgtatatcagcggcgttcttcttcgccatcgtgctagttcaatccgacgatcaaataattcgtgatatactagtgatttatgtgggattttgggttgtatttcctgttttgatacttttaatccaacttgttcgatttataggttggcttatttgtttcatgtgttgttgttgttgtccacgtcggcgacggttccattagggagaggtcccattaagaagagaaggaacccgtgtttcgaacccacgtatgaatttggaacttgatgtaggaaagtgatactagaataaaagtctcccaaggacattgttataacgtttattaattctatgggttatttttaaactgtttaataaatgcatttgattatgtgaatcttggcaattgtgtgggttggtttgttgtaaagttaattaattgcgtgggtttgtactgtttaataaattcgtttgattaaaaattgtatgttcaaataatgtgaatcgtggcaatatcgccttgtgaatcgtgattggtgaacgatcgtggtaattttattttttgccaatagttattcttaccatgatcttagtccaaatcgctcgtataacacagtaataaataaatacaaaaaaaaaagaacaaagaaaaccaactagaatgcggtgcacactagaatgaaacattacaaaaaacgattgtgagcatctcgttaatgggagagattaatatatccggcccaaagcaataaatattttctcaaaaaaaagaaaatataatcatctcaaaaaaaaaacaagataattcttttac

SEQ ID NO: 26526 - DNA, 1462 bp, Arabidopsis thaliana landsberg
  unsure (1)..(1462): unsure at all n locations
gttgtggggttgcttacatttttggtggcgtatgatggtgaaatcacagttgttcaagaagcacagagcagatgtgccatgaagactcccgtctgcgtatttcggaagaggaggagattgctgctgaagagagcttggctgcctattgcaagcctgttgaactctacaatatcattcaacgccgtgctattaggaatgtatgtcttccttcctaccttttttagacagaatatgtttagttatgacttatgagctcagctgatatatcacatgtattggtttacttttgagttttgacaatgaaaatttacatgaaaatgtagtttgagttgacttcatttggtataagcaagtatgtgttgtcttgctatgcagtccatcctaatcatttctctctctctgtctcccctgtagcccttgtttcttcagcgatgtttgcattataagattgaggcaaaacataaaaggaggtaagctttttttttttccttcctttctctgttcagaatctccattagttttgggtaactattacactataccttagtaattcattccggacttgaatgctttctaagttttcggatagttatcaatatatattactgctttgcagaatacaaatgactgtattcctctcgggcgctatagatgctggggtacaaactcaaaaattattccctctgtatattttgttggcaagactcgtttctcctaagcctgtcgctgaggtatgcatttgaacctcagacagatttgcattgatctttattatttgtaacttacctattctttgctaacatttttcttgaaattctcaaattatagtattctgcagtatataggttcagtcgagcatgtatcctaactggtggattgggggttgatggagttagtcaagcccaagccaactttcttctccctgatatgaatagactcgcattggaggcaaaatcaggatcactcgctatcttgtttatcagctttggtgattaagactgactgtgtacaaaattatataaagacatttatatatgtacagtattcagataaactgatcacataattttcttcttgtannnnnnnnnnnnnnnnnncaatttggcattgattcaggcaagattcattcaggtacttccatttcttcattgatataacattctaatattgaaaagttatgtatctttgggcattaccaattttccatgtaatagtatggaaaatctcagtcctatttattaacaaaagaattagggattctttgactccaattataagagtttctgaaagtcttttttttcattaactcttaccatcggaagcgtttttttctgccaggaaatataggaggacattgtttatggagcaaaatagctatgcaatcactgtgatgcgtcgtggctgaaatcaccaaacatggacttgtgacagagagtagacacagtctctcttgttgaaatgc

SEQ ID NO: 26527 - DNA, 3007 bp, Arabidopsis thaliana landsberg
  unsure (1)..(3007): unsure at all n locations
gcgttgcttctccatcctgacaaaaaccagttccccggtgctgaggctgctttcaagctggtttgggatgctagcagatttctcgctgacaaggataaacggtctcagtatgatataaggcgcagaatctatttacggttggctactaaccagttgaatgcaaactctggtctacgatgtgctgctacaaacagtgccactgatacattttggacatgttgtgagcattgtggctataggtataaatatttgagaaagtnnnnnnnnnnnnnnnnnnnnnntaacatttgtcaaagatcctacatggcctacgacactggatttaatgaagcaccatctaaatcaaacactggtcaaaaagaagttcaaaatcagggtccctgtaacacatccttgaatacaaatggggagtctattggtgctcaaccaggaagtgtagcagctgaggtggataagaaaggaactttcaacaagaaattcaacaagaggaatggtggaggtgagagcaaaaaaactgaagtaaaaaactccaaaatagagactgaattcgtgaggaatgatgatgaggaaaagatgaagagtgcagctaaactacacaagccacatcctgaggttacagaacctgaaataggcgcatcaaaatctgtacctgatgagtcagtttcaaggagtgatgaagcaccctctacgagcaaggacaagaacaagatgaaaaaaggtgttgaggagagtattaatgttgatggttctgattttattaaggataaagcgtattcaaaagataataataagaggaaatctccaaggagaagccaacaaagttcttacgtagaggaggagataatcagtgataattccctaggccctccaaaaaaaaggtcaagatcaaatgtcggattgaaatctgaacaaactacaagaaaaggattagtaggtgttggatcatctaaacgtcttgattctggtggtggttcatctgccccttcatgtgcgtttaaaagaaaagcaaagaaatttgtggattctggatatcaagaaatctcatctgtcaaagacaaagagagggaagtacgtaaagaaagtggagaaggggtggttatggcagcaaagattgacaataaccacaatcctaatgaaaatcttattacagaggatttgcctgatccagagttcagtaattttgaactgacaacaagctgttttggtgtcaaccaggtgtggtccatgtacgatccgattgatggtatgcctcggttgtatgctcggatagacaaagtgttggttcctgagttcaagttgtggattacgtggattgacccgcttcaggataataaagataactctatccccattgcttgtggaatctttcaaggtgggggttcagaggaagagaacgatcacttaaaattttcttgtcagatgtttcacttaactcgcaacaatagcgttgtcatatatccaagaaagggagaaatttgggcaattttcagaggctgggatatcagttggagtgctagctcagaaaatcataaacatccttatgaatatgattttgtggaagttttgtctaattttaacgatgagaatggccttggagtgggctttctgggaaaagttgaagggtttgtttccctctttcgccaagatgcacaggatggagttctccaacttcagattccaccaagccagatgctcaggttttcacataaagtcccatcattcaaaatgactggaaaagagagagaaggtgttcctcctgggtgctttgaattagataccgctgctttaccaaaagaattgttcgaggtttatgattctaaagttgatgttgggttggatagagaattgccgaatggtaaaactggtggtccttttcctgaagcttccaaggttgaaatgcaggcaaacactaccagagagagcagtccatttaaaaagaaacgtccaaaagtccatgataatcatggttcattctccaaagaatctgatggtagacgcactaatcatgaaatgaactcagcgaaggagtccagaaagagtgtcaaagcagtagatgccttgaatctgcgaaaatctcctcgtcttttgagtgaaacaaacagtcaagcaaattcaaggtcaggccgacaaatagctgagaagaagagtgctaacaatggtgaatcctgtggaaagccaggtggattgtctttatctggtgagaagatgtctgagaagactatcacaagaatgagaaaaacacctcaggatatacacaaaccgacagggaacgtaaagaaacatggaagaaatgatgagtcattgtctcagtccaggggtgatgggttgctgactcagttaaatggtaatatgaaaagctcagaaccagagactcgcgtgccatctagttgcaaaaccgtgaaagaaaacacttttaacttcgagaaccagagatcatgggacaaattccagattgatcaaatatgggctatttacagcaatgacaaagggagtcccagaaagtatgctcagatcaagaaaatcgacacaagtcctgaattcaagttacatgtagcacctctagagctgtatcgccctccaatacacatgccacgcccagtgtgctgtggccgcttcaagttgaaaaccggtaaagccgaagtatatgtacctagcagcttctcacatcaggttaaagctgtcaagactaagaagaacagattcgaagtatacccagggaagggtgagatctgggctctgtacaagaactgcaacgcactacgattatactgagaccgaagaaccttgcgattgcagaagtagtccaaaccgacgagacagacgatacaagcaactgaccttgactgctgaaccgtttaacatctagtcctctatacagaagtagtgccagactcaaacgcaagttttatctacattccacaaactggagcgtgtcgattctcgcatcagatccctgcgttatgcaccagagtagagcgacacagtttcgagatgccaatactgggac

SEQ ID NO: 26528 - DNA, 993 bp, Arabidopsis thaliana landsberg
  unsure (1)..(993): unsure at all n locations
tccactttcccctatttatgaggttcttgttctcctaatctttcctctagtggtgttgatgattatctctaatatagtcagaaatcagaattgttttcttttcatcctcaagtcatttgccactgaacaatcaaatgaaacttggtgagtcaaaaactccaaacataaaaactaattaagaaaaactcaacacacctctcttaccaaacttgttaagctcataacattcaacattggtttgcttcatcagaacaaagtcttgtgtgagttttgctaagtttggagaaagaaagagaccaccattgatttttgttgtaacccattgccaaagcccaatttggatggaaattaatattataccataaaaaaaagatatgaaagtcgaaaaaatatcagaaataaaaataattttttgtatttttttacatgacatattggggattaatcctatttttttacttccaaaattgactgaaattagttggccaaaaaggtagttacgacgaaaacaagaaactcgaaaataaaaaaaataagaaacaaaagacgagaaaagaaaatttaaccaaaaaaatgtactgacacgtgtcataagcttagacccatcaaattattatatgaaaaataaaaacaaacaaannnnnnnnnnnnnnnnnnnnntcattaacccaatcgtttcaagccgggaagaagagaagactattcattcgtgtctctcttcattcaatgtcgaagaagaagaagacacagagtttatcaatggaagatcaccgtgacggcaaaggcaagaagagagatgattttttcgatagcattgactacgaaatttcttctatcttattgcaactttcacatcctgtcatattctcttctgattctcctgtgttacataaatggggtcgcactaaaaagaggtcttcttcttcttctcacctgcatccgccggaaccggtgataaaatcgctgccgtgtatggctgatgtcggcgattgg

SEQ ID NO: 26529 - DNA, 1032 bp, Arabidopsis thaliana landsberg
tctaaggcagatgtggtgtcaggtactaattcttattgatacaaacttaagttttagaatgagaactggaaatgtacttttataccaacaatagccaacaaaacaaggtttcgaggtcccgtaatggttggaagacttcccacttcacagggctgataagcaagtgctgcacaacgcagtccctccttactcatattttctattgttccttcaaaagactaaagaaagaatggactcttatataaaaaacagaacaagaaataatagtgtacttttgaattagtcatctacgttcataaacaaacctttcgtttctgttcattaatagctctggagttgttggccccatccatatacccttcgcatgaactcagaatagtttttgcagatcctttccaatgaacgtgagcgtgtgtaccaagctagaaataaatgatacgaagtgagaaagaactacagaagaatcaaacatagcataaaatatgcaggcagattacagtcaaacaattgcggagttctaacagaaatatactatatatatatatgtgtgtgttgtgtgtgtgcgtgtgtgcacatatatatcttctcaacaacattgtagacaaggttatgttacctgtagtgccacgcctccatatttctttttcgggttgaatggtatagtatgacggactaatgatgctgacctggcatcatcaaatttcattcccaactacaacatacgagtaactaagtgtcattaattataaacttaatcactatagcaagtagtaatgtaagatcagaaagaaactaaaccttattcccaaagttaagaatggcttgttctgttggtgatccataaacctctggttcagtgactccctataattaattacgaacataccaagaagagctcatattaaaacaatcagactacaggaatctaaccaagtcaacagtgtgatccatgaaacaattaccgtttcaaaaacaacactgccatttgtgttttgggcaatgccttctatgattagttctttaagaaacgtg

SEQ ID NO: 26530 - DNA, 645 bp, Arabidopsis thaliana landsberg
aaacagtgacataaaaaaagtttggtgactattatagatcaaagtttgtaaattgtatcattctctcagacatttatattttatggtttccaattgttattaagtaacattataccacagaacgtttttaggtattatacaatcttttctaaatcaaactgatttgatatgtctaatatcgatgatatttgcggaacatcgggtatttcggttagatttgggtatgtatgagtaaaaatcttaaacccgagcggaactcgaaaatattggatattgtttggttattttcagtatttttgcttttttactaaaatattagagtcggcccgagctcgaaccaaacccaaacccgaatttttagaatatctgaatgattctcgaccccatactcggacagacccgaaacccgaaaataaagaactgatcatgttcggatacccgaatgccgagacctgcctagctagctattctttgtacataaacattatttttttggatcaattacacattcaaagaggaaaaaaaaaagtctaaataaagcaaggaaaacaagtcagttctaaaattgaaattgagatttcgtctaccaagcgacatgatagaatttggaaactgatcatgatctcaaccgtgaaaaatctagaa

SEQ ID NO: 26531 - DNA, 821 bp, Arabidopsis thaliana landsberg
gtcatatgattttgagaatcggcttggactagttcgaatacaaatgaaaaaaagttatgtatgcaacatctggaaaagtcatgaatgaacttaatcgacttacttctatacctaacttctgaaggatcagaatatcaaggggaacagatcactagttttgacagcttgggaaccctacgcagcaagagaatgtatatctagaggtacacaagaaactaaccctactgcagcaccatgagaacgcaaaatttagctaaggtagcagataacatataggatgatactacttaaaagggtagtgtggtatgttgaactactattttccttaattgagcataatacttcttacaaatatagagattggtgggtattggtgcaaacaaaaactcccttctcacaaatggtctagacatgagagacaactcaagtacacatgttagtcttcaaatggtgatactcagcatctcagctggactgtcagaaccttatctctatcaactgtagcagttttccactgcattaacaagggaagatgaattttcagatttaaaattcatattataaacaacgaacagcatacaattacaaagagaagcagatataaaccttaaatttatgcattgcctagtttatgcaacagcaaactagtctttttgattctaaggatttgagacaaaattgtcttgcattcaatcaataaaaaaaatcttaatttccccatagtaaaacaacactttctcttctttgaagacattgtgcaaatgcatttttgtacatttagagactgtgaacacagatgaagctatcctataactgctctc

SEQ ID NO: 26532 - DNA, 3489 bp, Arabidopsis thaliana landsberg
ttcaggactatatttttttaagtcaaattgaacattcctctggtagttttaatccaagtaaatgattatgactaattcataagtttcgtcctttacaagatatcatcaagttttctccatggaaaatgcaggcaacttccaatcattttcggagtagtttcagttggtgattgtggaatacatttcggtggcatggttcatggtgtgttttgtcaagtcaacgtagtaaaagaacttcattcccttaagtaaggttagtttctctgaacttttccgaccaaactgttttgaccacctgctttgtaatttcttagttattggaatgtttgattatacgagtgtattgctttggcgaattgagccctgtggatcaaattatttgaggatgataacactgaagaaataaatagcctgctgtgaagttgttcttgattttgtctttgtctcttgcttgttttgtttttccagaaggctttgtgtgtggaaagacagacgacatgaccggcataggagagatgttccttgcagcttttttacaagctctcttccagacgctggtgtctgaacctttcaggagcttcttcaagaggcgagaactgaatgagaatttcctcgagaggctcagcactgcgttgttgacaataactgctgttctgatagatgcagaggagaagcagattacaaatccggtggtggaaaaatgggttaacgagctgagagatgttgtttaccatgctgaagatgctcttgatgatattgctacagaatctctgcgtctcaacataggagctgaatcttcttcctccaacaggctgagacagcttcgtggcagaatgtccctgggagattttcttgatgggaacagtgaacatttggagacccggcttgagaaggtcacaattaggctcgagcgttttaccctacaaagaaatatcctgggtttgaaagagcttactgcaatgatacccaaacaaaggttgccaacaacatctcttgtggatgaatctgaagtgtttggtagagacgatgataaagatgagataatgagattcttgattccagagaatgggaaagacaacggtattaccgttgtagctattgttggaattggaggggttggaaaaaccacactttcacaactcctttacaatgatcaacatgttcggagttattttggaacaaaagtctgggctcatgtctcagaggagtttgacgtttttaagatcaccaaaaaggtttatgaatctgttacttcccggccttgtgaattcactgacctggatgtacttcaagtcaaattgaaggagagattaacaggaacaggcttaccgtttctgcttgttctagatgatctgtggaatgaaaattttgcggattgggatcttctacgccaaccttttatacatgctgctcaagggagccagattcttgtgacaacacgaagccaacgtgttgcatccataatgtgtgccgtccatgtacacaaccttcagccattatctgatggagattgctggtcgttgtttatgaaaactgtatttggtaatcaagaaccgtgcctaaatcgagaaattggagatcttgctgaaaggatagtgcacaaatgccgcggtctgcctttggctgtgaaaacacttggtggcgttctacggtttgaaggaaaagtcatagaatgggagagagttctaagcagccggatttgggatcttccagctgataagagcaatctacttccagttttacgtgtaagctattactaccttccagctcacttgaaacgatgttttgcctattgctcgatatttcccaaagggcatgcatttgagaaggacaaggtagttcttttgtggatggcagaaggtttcttgcaacagacgagaagcagtaagaatctagaagagctcgggaatgagtacttttctgaattagaatcaaggtcacttcttcaaaagaccaaaacaagatatataatgcatgattttatcaatgagctggctcagtttgcttcaggagagttcagctcgaagtttgaagatggatgcaaacttcaggtttcagaaaggaccagatatttatcgtacctacgagataattatgcagagcctatggagtttgaggctctacgtgaggtcaagtttctcagaacttttctaccactcagcctcacaaattcttctcggtcatgctgcttagatcaaatggtcagtgagaagttacttccaacgctcacccgcttgcgtgttttgtctttatcacattacaagatcgcgaggctgccgccagattttttcaagaacattagccatgctcggtttttggatctctctcgcactgaactcgagaaacttccgaaatccctttgttatatgtacaacctccagacacttcttctctcctactgttcaagtctgaaggagctgcctacagatattagcaacctcatcaatttgcggtatcttgatctgattgggacgaagctaagacaaatgccgcggagatttggtagattgaagagtctccagactcttacaacatttttcgtgagtgctagtgacgggtcaaggatttctgaacttggagggcttcatgaccttcatggaaaacttaaaatagttgagctacaacgagttgtggatgttgctgatgctgcagaagcaaatttaaacagcaagaaacatctgagggagatagattttgtctggagaactggatctagtagctcagagaacaacacaaatcctcacaggacgcaaaacgaagctgaagtgtttgagaagttacgcccacatcgtcatattgagaaacttgccattgagagatacaaaggaagaaggtttccagattggttgagtgatccttcgttctctagaattgtgtgtatacgcctcagagaatgtcaatactgtacctccttgccatctcttggtcaactaccatgtctcaaagaacttcacatttcaggaatggtcgggcttcaaagcataggtcgcaagttctacttcagcgatcaacaactgcgtgatcaagaccaacagccgtttagatcacttgaaacactgcgatttgataacctgccagattggcaagagtggttagacgtaagggtcacaagaggagacttgttcccttctctcaagaaacttttcatactgagatgtccagagctaaccgggactctacctacctttcttccttctctgatctcacttcacatctataaatgtggcctcttagatttccagccagatcaccacgaatacagttacaggaaccttcaaacgctaagcataaaaagcagctgtgacactctcgttaagtttccctttaaaccatttcgccaatctcgacaagcttgaagtcgatcagtgcacatccttgtactctcttgagctctcaaatcagcatttgcgtggtccgaatgccctaaggaacctgaaaatcaatgactgtcagaacctgcagcttcttccgaaactaaacgctgtgcct

SEQ ID NO: 26533 - DNA, 739 bp, Arabidopsis thaliana landsberg
  unsure (1)..(739): unsure at all n locations
acacagtggctgagctgatgcattgggaggggttttaattgattttcatgacatttggaatttttggtattattgggggattgacttaacaatgttaaatattttggtataatgttttaatgttgacccctatgccatatgatcatttcctacttttgaccccattcattatcattttctaatttaacattaatttctgttatttttgttttgtgttttcttagaaatgattataaatatctaactttttcttatatattgatttttttcttctcattagatatcctgttttatttatttccatacctttcttttcaaagttcttacatagtataacatctaattaatctctacaatatatactatagattagataaacatatattctgaaaaaagatactgaacacaactgaaaataaaataaaatatgaaagtagaagcattttaaatagtacacataaacttatattaaaaagtatgtttgttttattttcaataccatttaaacaataattttattataatttaaatatatcatttaatataaatatataatatataaataaataatataattttgtaaatatgacccccataaaccaaatttctggctctgccactggttgtaatggcttaaacgtttttgttatacgaaaaagaaaaactaagaacttcacanatcacaagtctctgtttgtttctcctacgcgtgagccacacgttctctaaataccgatta

SEQ ID NO: 26534 - DNA, 2684 bp, Arabidopsis thaliana landsberg
tgatggttttctgtttatcaccttcttatttttataaatgatattttaaatgatagtatatgttttaaatatggattattaggaaaggtgatggagacgacacaaagacatatatgtcatgactattttaaaggagatcattgtgatcgtagagactgtaatctagattgtcgtgacaaatagaaaggaacaggaacatgtgaaccattaaccagcacaccattaaccagaacctgctactgtagttataattgtttgaaacaacccgacccgtttttttttttaacataattaattatttctataaatacttaattaaaccaaccaataaagcaacatttaaactacaggtcaataatactaatttatgaataaataaataattcgaccaacaaaaccaagaatgactaacaatcctaacacaactctagccgggttccaataatcaaaacacaaaaataaaccacatgagtttccttcttttatatgcacactccagggtttccattaactcaaccgattaaacagagcgatttaaatacaaaccctaaccgattttccggttcaagagcgttacaattctataatatattgttgatagattttattgtaacaataatttaaaatttaaattgttttaaaaatctactaacgaatcatctataagaataatacacaaaacatgctagcatatccataaaaatattaacaaacatattattgtacaataatttttaaaatgttttgaaaaggaaaatattaaatgattaaagaattttcaacatttgagtggtgtcaatatttcttgagaaaatgataacactagattttaaccattttaagcccttgtttctcatgcatttaacttagtttcatgtctcttttcatgcattcttagtctattttccttccttctcaaattttgcattacatcgcatagcatagttgcacttggaatgttttacaggtgaaaccggtgcttttggactcgattgggagtgtttctagcacaaggtgatggacgagctcaagtatgcggatcaaaaaaggacatggagccatactcgacatatatactcgtctggaggccgagtgggacacacaaggaggacaaggaggatactcgaccaaggcactcggctggaggacgagtgacacacatgaagaaggaggaaagctactcgaccaagatactcggcctgaagccgagtgatgtgataaagggaagctactcgacttttctactcgcccaagactcgagtggtgccgcgccgacttactcattttgtcctttttctaattaggcatcctagtatttcctataaatagactctttaagttgttgcccaaaatatcttttgcttttgtctgattgatattagggttcttagatttcttttgcattttctggttgttgtgttgagaatctgaattttatttcttctgcaaaattgtttatcttattgagatctatgatttgttaagtttataataatttttgggttttatgatttttctgggttttgtatgatgatgttcttgagtgttcttgagtagtgatctctagagttcttgaggatgggttaggtttaggtggactcctctgtttatttagttagctaaggttataattgcatgattcccttcacgattaggagttcttagtgttatttcctttctgatcaactggagattgattttagacttttcacgcccaaaaggtgtttgatgaaatgtatgaaccaacttattccagagatttgcatactctaccccaagagattggatgtttagaatgcttattgactttaatagattgttgcttaatgtttgctttgttatgtttcatcaatgagaattgtgattaggaagtggtaaagttatgaggatcattgtcacgagagtggattgatctgggttaatctattgtctagggatagcttgattgagtttgttagttagctgaaccaattactccattctaaagagctacgttttgtttagattgatttaaacttcgtgttattactctgtgcttgttgtgtttagttatcttgctcgacttatttacttgaccaaatttagtattatgctcggccgagtgccttactttctgtttaatatagtttcattttgaatctgatttgcatgataacatgttgcttggtttagtggaaacaaaccaaacctattcacacttggcttgacttagtattctctcattgcatcatgattgttagggagacactcatttggattgacaccttaaatactacaatgacatgatagtataaaggaattgatcttttggaaacacagtaaaaaccagactatcaatttgacgttgttgccatttgggtgtttacttgttacatttaggatttctgagttattaagatcaagttctatttcatctttctcgaaactcaattctcttttcatttgcttgtttttatcttgtaagtactgtcatactcgactagcacttcgagtgtaaggatcgaggaacttcacccaatgtatgcaaactccatcttaaggttttgacaatcttctgcggtatagagacaacatcgacatgattcagcgtaactgagagaacaacaagccacatcagatctggttgtgatggcgactgaagacaatgctaatgagttgccatgcaacattgggtagaagatgca

SEQ ID NO: 26535 - DNA, 2011 bp, Arabidopsis thaliana landsberg
atggatttttttccgattcaagcatttaattaattactaatactaattgattgttttccttttatttttggtcaactagtgttgatatatctctataacattcatcagttttattttatttgtattatcaaaaatggctaaaaacatggttcttaccatttttatggtgctctttgttcctggtatgctctacacttaaaaatatattaatattctgcacatccttttttgttttatttgatggttttctgtttatcaccttcttatttttataaaagtaaattttaaatgatagtatatgttttaaatatgtattattaggaaaggtgatggagaagacacaaggacatatatgtcatgactatcttaaaggagatcattgtgatcttagagactgtaacctagattgtcgtgacaaatggaaaggaacatgaacatgtgaatcattaaccagcacaccattaaccagaacctgctactgtagttataattgtttgaaataacccgacccgttttttttaacataattaattatttctataaatacttatttaaaccaaccaataaagcaacatttaaactacaagtcaataatactaatttatgaataaataaataattcgaccaacaaaaccaagaatgactaacaatcctaacacaactctaaccgggttccaataatcaaaacacaaaaataaaccacatgagtttccttcttttataggcacactagggtttccattcatccaaacgattaaatcgagcgatttaaatacaaaccctaaccgatttttccgctcacgggcgttacaattctcccccactaacatagatcagtcctcgaatctagcttcaccctttactccgaggaaatccgtgcaactgtcactacagtctacactccctccaaccagaccccctctaggtctctctatccagtcgatatactcacgatttactagtcattgttgctcacaactcactctccactctcagatcgcaatcttcgagcataaaccgtcactctcaagcatcggcctacggtatctcgggtatcacacgtattatcttccctactcaaagtcaaacccagagttgtgtcggctcactctcagccacaaagtcatcgagttacgacacttggagaaaataatacctcaaaactcgctctcgagttaacacgctaaaccgtgctctcggatcgtcacccgaagccaccgtaccccttgcactataaacaggggcggatctatgtgcaaggctatatgggcacgtgccctacactactcttgaaaattttatgcttatagttataattattttattgaatcatggtaaaatcatgacaaattttcaatagtgccctaggctaaatagacttttgattcgtttattatctctttcttattattcgtttgttttatttatggtaattaacactttttactttgcaatttaggtttctttcccctcaacaacactttttatttcattttctataatccaatatcccaccatcaatattaattgtatatttgattccctaagtttctttcactttccttttcttaatggttataacttataagtaaaaatttatataaaatagtttagcataaaaatttatccaatcacaataaacttcaaaatcaatacaaaatttacaaaaaaattagcatatgtaacatttttagccgtattatattacatattttatttatacatttttgtttttgacaacaatttatacattatttgtaaataattagtggtgtccgaggtagaataacgttctagatccaccactgactctaaagacaccaagcccctcgagttaccggtacttcagaagcatatcctgctcctcacgagtcgttgggaccctcatgtccctcgagcaaacaattctaaacgcttccgagcatatcttcagactctctcatggatttgcgtaggacacctttatacctcaccatccatcatatcccctcgggaacactcttatgaccaa

SEQ ID NO: 26536 - DNA, 2195 bp, Arabidopsis thaliana landsberg
cctcccccgcacctcctatataggcaagagctcccttttctgggtattcacacacgagaaccggacgaggaaactctagacaacaccccaagagcttgagaacattcttatggctgctcatcatcgatgaaaccgcaatatcacggtagaagttgtcagggtcaaagttaaagggttcacctttatagtacttgatcagcacggctctgttttcaatcgtacctttgtaccacacgaatctgtctacaccgattgcatagctccagtcgaagttgtttgtagcttcaaggatttggtgagaagataacgtacggatgggattgtatttacctcctgacgatgcaatgagtaaagtcccacatcgacaagctagagagagtttgtcataaccttagtagtataagtaagaagctgagcccatcgaaaaattcatacctttctcggccttttggctaagatcaagtgtagtatctgttcttatcagtttaatatctgatatgtgggccatcggcccacacgatattaactctattttttaagggagaaagcccgttaagatagcttgctatctgggctttcgcgagtcgcccatgcgttgcactactgcacgggcctggctcaacccaccaactaatcagtcaaattttgattcacatagtataatcgagaaattaaacaaaatctataaaacagcatgggtggagaaaaatcacctctctattgaaaatgacattataatgagtaagaacttgaaacattacatttgtgaattttgatcatttaaactcgcaaaacagcaactatagcatagcataaagccataaactgtgcatctagctgtaaaattattcctaaaactgaaaagttgttgacataaaacaatactatttgcacatgaaatagaaacttgacaatcttctaatggaatatatgagcacatgaattgtagaaagccaacgatgttctgatgtctaaattggagcattgatctatacaatatagtatcactaatatgcagtttagcttatggctaatgattttccaacaaataaggggttttgccatgtatttgagataacacatatgcactttgagctgtcttaacatcattatgtccaaataattaagatttacgagataatctctttctggctatgacttcaattaattaataagattatatatcaacattctatatgtaacgaaacatgtatacttcagctacaataagtcaataattttaaaaagccttgagaagagaaagaagaaccatcccatcatagaagaagaaaaaaaagaaaaaaaactaaactcaaaatgttgaaactttctcgtgatccgattctatgtatcgctacattaattctcattataacattctctctcttatcctatgaaactgaagcaaggctacatcatcaagcgtttcattctccttctccctctccaaaccctaacgacccgtcgaaatctccatctcggtcccaagatctcgaccacgaagtagtttacaacgttagaaagtatggtgcggtgggagacggtgaaaccgacgacactgaagcattcaaaacggcgtgggactcatcttgtaacaacgagaacaacaccgattcagtgttgcttgttccttacggctatacattcatgattcaatcaaccattttcactggtccttgccgctcctaccaatttttccaagtaatagttctctactaaataaaaattcaaaagcttaattttcaacatttagataattgggtcaaattttttgtttgtaaatttgattttttattattattattgctaggtggatgggaccattgtaacacccgatggaccagagtcgtggccgagcaatataagtaagagacaatggcttgtgttctatagagtcaacggaatggctttgaaaggcgaaggagttatcgactgcaggggacaaaagtggtgggatcttccatgtaaacctcaccgggtaaattacactaattaattacgacattttcagtatgaatattttccaattaatcaccattttattttgttttatgactctattttcgttaaagttaattttaaaaagtacgcttaagttttcaaaatgaaatcaacatatagaatttaaattactaattagtttgctatatttctatacagagtgtaaacaaatcagcaattgttaccggaccttg

SEQ ID NO: 26537 - DNA, 610 bp, Arabidopsis thaliana landsberg
caccatagcacattatgattagtggagtaattgccaccagcaaaatataaatagttgtatgttttttatgaagacatagtatgtaaggtggtagaatggtaaagaatgcccccattaaaaacaagaggtagtagctttgaacccttttagcaatattttgcctccattaaatgttttggttggatctgcccttgacaatagctaaggtaatgtctatgtgttctccttctaacacagataaagaagtaacatgaagaatgacttagatagataggcttgagatcgtactgtttgtagtttgtttagtgattcggtagatggtggaagatttaattgaactctatccaattttcacgacattatatattgtagaaaatttgcattaacagattttaaattaattttttttttcactaaacatataattgaagaaatttattacaagtcatctttacttgaaagattttattactaagaatcccgtttagtttatagttttaagatttcccaaattcaatattttccccaacaatttgtttaatactcctaatttagatttgttaatgcaaccaaacaatatgagtacttattacaaaacctaaatactaca

SEQ ID NO: 26538 - DNA, 1272 bp, Arabidopsis thaliana landsberg
taaatgaccaaacccaccttgtagaacacgtccaaatcaagctgactacggattggtgccaagtccaatccaacagggttagatatgtcagaattcagcaagtattattgtccgaaattggtagacagaattataatatcaatgaaagaatttcaaacttccagagatgatagatatagagatacaggcatcagcggagtttcttgtcaaagtcgtacctatttcggtatgtaggaaagattccgtatacaactctcagtatttccaattcatcaagagagactccctttgccaaaagacatcaggaaaagaaagaaaaaacgaaagttgatgaaagattgtgatataagatggaaggaaactcacttggtattttggcatcagtttccagtattcttcgagtaaatcctctaaactcggagatgttgattgcggttcagtgtaagtgaacatgtaagtagtgcggtctaatggaccagagccagccgggaaagccttaaagcaacaataagcatccttatattaaaaccatttctttgtggttatgggaattgtgttagaatggggacagatttttttacctcccaaaagagttgtacattggaatctgcaactctggtcaccgatgaactgctatatataacgtcgcttgatgagttctctttaaacccatgagcacaagatccaacaacaaggcacattccatctggctttctaccacgtttgatcttttgtagcagaatacataacaagaaaagtattatgcaagggcaatacacaatttgctcaagaaaagcgaatcagtaagttttatttttttaccaccataactaatgcaaatgaaaatgtaaaagtagatatgttcttaggccaagatatgacctgcttcagaataggagaaaagtttcccatggcatcgataacgagacgggaagataatgtgtcacctttagaaagttgcataacctgtcaatcaaaatgttcaaacaattcatatcaataagctgaatactcttcttaggtacaatgtttttggagaaaacgccagataactcacagctaaatcattgtagatgacgatgctcgagaggctggagtcttctaaaatgactccaccaagagaaatgaaacgttgttttacagtttccacaagtttggctgggctggtttaacatacaaaacgaaaaaacaaacaaatcatcactttcagaaagtagcagaacacaaggggattattcttttcctatgtattagagaataagagaagacagg

SEQ ID NO: 26539 - DNA, 947 bp, Arabidopsis thaliana landsberg
actaagttagttgggcccagagtagatagataaagccagttttcattttcttagtcgtcgtacaagttacctggaaataaaataaaaacacaaactttcctgaaaaagtcgtctccagttttaagcattgataaatccgacaagaagtccgattttgttccatagcttgcttgtgttttcagtggattgagtcactgaaagagaaatcataaggctttgttgatgatggatcatttggtggagacgaattcagttccgagcagattggtggaagaaaggcttgatgagattcgtagagtaatgggtaaagctgatgacgacccgttaaggatcgttggtgtaggagctggtgcttggggaagcgttttcattgcaatgttgcaggaaaattacggtaagtttaggggcaaagttatgtgtgagaatctggagaagaggaggcagagcaatcgataaagccacagctgaacatttgttcgaagtgattaattcgagggaagaattgttgaggaggttgataagaaggtgtgcttatctcaagtatgtggaagctagattaggggatagggttttatatgctgatgagatattgaaagatgggttttgcttgaatatgattgagactcctttgtgtcctttgaaagttgtgactaatcttcaagaagctgtttgggatgctgatattgtcatcaatggtttaccatcaactgagacgtttcaggtgttcaatgagattagtaagtattggaaagagagggttaatgctcctgttattatctctttggctaaaggtgtggaagcagagtttgagcctcatcctcggattgttactcctacgcaaatgatccatcgagcgagtaaattcacttcccattgtcttttatctgattgctagatgaatatttgatatcatcttccttagtatttttgttgatgtagagaaactt

SEQ ID NO: 26540 - DNA, 1919 bp, Arabidopsis thaliana landsberg
cagtaaaccaagtagtgtaagttgcttgtaactcaagaaacacttgtctttttaaactaaggcaaaatgaattactgagctgaatcaaaactaagttttttagtaacccaacgaaccatatgactcagttatgaattattcatagtgaaacaaaatatttctattcattgtttagaatagtacaataaggttacttgaaacgtactctgtttcatacacgaaaatacatgaaaagaagaaataaaactgacattttaagcaaccggtgccatggaggaagccgtcgccgacgaagccatcacggcacacacaacgaacacttccttcaatagccgtagcgttaacagttcgagcctcacgatcacaaatagcctccgcgaggtttcttggaatagcccactctaacttaacgcctctttttcctctgttcgtccctcttggaacaagccacgacgagaatcctctgcatccatatctactaatcacagagaaatcatcagctacacgccacgcgctatgatcagacacaggatagcaacatccgatatctccaccggaggtttcgttttcttttttgccgtcacaaccgaagagatcggtggttggggcaaccgaatttacagagagaagaatcttcgcagtcgtaaagaccgattacgttttcgaaagagatggagaagaattggtttgcggagaaagggaaagagcgtaagtcgttgaattggcgacaagaaggagacgaagggaagtctacgaggagaccgtcggtgaagaactcgatgattcggtagctttggtggtttatgtgaagaaacagagtggaggagttttcgcaggagagtctaaaagcggctgcggaggaggaggaagagagttggaaagggaaggagacagagaagtttccacacttttctggtgaacggagagcctgtggctgagagagagagatagaggttagggtttggagagttaagaggaggagaagaagtagaaacagagcagaggaagaagaaggaagaaacagaggaggcatttcaggttttcagcaagaacaatcaatgagtaaaagatgtttttgtatataatgtttaaaagaatatttaagactttgtatcaaaagctacattcgtgggacttggaattatgaattttttgttaaagtttttttatttgggaattgtgaaaaaattgaatatcgacaagcgtgtgtgcacagttgtttttgttagaaatcacttggtttccgaattattttggttattaaaagataattggattttggacctaaagagaaatctgacgtgtcgagatcctgaggggtatacgtgaaaaatggagggtggagatgcgaagtagagagattatagaaattggggaatagtagactaatggtccgttgaatagctaacaattttgcaccattggacctcgagctctcctatttttactccaaaacgctactctctttgttttaatcaatcttcataaatttactactagcatatagttttgttattgttacgtatccgtataatatagaagaaatatgaaaagtttttttttctctttgttgctaaagcaagattaaaaattacggaatgtgtcagatctaaaggttaatcgttctctccgcaacaaaattaaacttggggaatggggactcacgttacgatgctagcactatcgtttggtaatagtgacaatcatacactatctcggcttataactatagttataacagttcaggattggtcgacctttgttaccaaatgccacctaattaaattttggtccttcattgagttttgtgacctttgtgatggaagtcaaatcctactaatttctcacaatttatgaaaaaaatttcaggttgaagaaagtcttcatataacacgacaaagtctgtaacattatacaac

SEQ ID NO: 26541 - DNA, 984 bp, Arabidopsis thaliana landsberg
  unsure (1)..(984): unsure at all n locations
agacttatctatttaattatgatcttaaaagaatgatttgaaaagaaattgtaattaattagaggaatcccggagcattggtttgttaatccatacttattcatttcaagcctacgtataagagtgaaatcatcatgcacttggtttggtaagcatacacggcnnnnnnnnnnnnnnnnnnnntcataatgaatctatattgtgtttttgtgtattaattgattcaggtaatggatacaacnnnnnnnnnnnnnnnnnnncattataagctatacaaatgttttgattttttagttgttgccaacaataaaattgaggttgcccaagcatttgtggtctagtggtagaagaagttttggtgatcaagggtgaaactctcatatccgaatacgattctccttgaaaacaaaaatcatattcgtttggaaagtctgtcagttggaccttggtccaattgtttatctgatagttagaaatacaggcggcctgagtactatctaccattagtcggagtagagtttgtgtccctgacattagtcggaaaacatttcaaactcgggagatatagtgcggtggtctttcgaaaagaagtccattcgaaaacattttggtgcgtttttagcaaaactgaccgatcagccgataagatttataatataaattaaaaaaataaattgagattttcgttatgctaaattcaaaaaagtggatcaatatacctcatactaagatatacaaataagaaaatcgagttggaaattggcccaatagagtaaacaaataggctaaaaaagcccaaaacaaattggttagagccacccgaatgttggaaagccttaaccggatgttcgaagaaccgatgtgggacaaatactttattccttaacttgaagcctctgtctctttctctgtttctggtttcgctcaatttatgaagaagctcgtttcttcttcttcgaccgttccgcgatgttggtaactact

SEQ ID NO: 26542 - DNA, 1748 bp, Arabidopsis thaliana landsberg
atccagagatctttagagcgttttctgatatacggtaaggctcttgtccatttttcatgacgcggatccaacttctggatgggtaactacacaaaaaacacatagttttgctttcgttttttccctctttcgaaactcatttaattcttctttaaaatctctaccattgagtagcatttgaacactttcattttggaaactgagtttttgaatactaattgaatttgcaggtagcttgaaacacaaggacttgagagggcaaatagtgagttctcaggcttatatagataacgaagccgatgaggttgaagaaaccatgtccggagaagaagagcccatgcaagaggatgaacttccattgacaccttaattagactgctattaacgttccacagtaatcgatttcttagtatcttaaatctatccatctatatatagttcggtgaggttgaatttagagaaacaaacacaaagtgaaatagagagaaaatttagggaaatggttcatgtgttaagcaccaacaatttatgggacatgtaatctaagttaaccaactaaaacattttgaataataactaaaaggcttaaatgccaacaaatatagcttcttgcagcatcttggaaacatatcgaatgccttcacaaatttgtataatactttcatggctaccctattatttatccgcttttgggaatacacagttaatcgaacaaacgtagccagtaaagtctcctacagctccccacatgatgaagggaaacttgcaacgaacttcacaaacgccgcaaaaaagtcgagtaaccccattgttggcaaatactttcggctgatcaggaattaccttaacataataaaaatcaccaagaacacaattaagatggagactgagcccacattcttcacatgtatagtaacatacatttggatctgtcttggtctcacaaatatcacaccacaagttgccgcttgcgtttcccacaccttgacataatgacagaaaatgatcatcacacctatgttttacctttcttggtaaagtggcacacttcatgcataaagagtactcctcacaaaccgtacagtttaagggattattctctataggtcttttacaagagtgacactgattgttgctttccaaggtaaagtataagggatgttgatgcagatcatggtgaaacggttccgatacagaactacaccgaacatcgtacgtaacactaatacctttgcaatcttcatgatgacacttgtatatgaaaccatcagtatagtttccacaagttatacactcaagatttgtacctccattaagacgtgtcgattgaagagtgagtttatggttgtgcaaaaaatgtcgtctcttccgcggaagacttgcacatactttgtgaatgatgaaatcgcattccagacatttgtaggatagattgccattaatagcaagaatgcacccccggcaacgcgtagcgtcattttccatatgacaattctcatccaatctaagtacatgttcttcatgactaaaatgtatgatatccgtttcattaattactttgaatggatcttcaattttcttcgtcttctttggacacatcttccagttctttaccatcccacactttttttcttcgttgcacatttttaattaacactctttacttttgacattttgatctcgttttttctcttctttctctattaattttttcttaacatttttcattcttccattctctttttttt

SEQ ID NO: 26543 - DNA, 1469 bp, Arabidopsis thaliana landsberg
aatttctttgggacttgggtcaccatctctctttttcatttggatgaagaccagaccgttgcaacccggatctaacttcatgaaccgtctctgtcaaaaatggacaacaagactcttatgatccgcaaagaaataaaaacataagacttcaagaagtttttcaggagagctcctgtcattcacccatatataatagcttagcttaccttactcttgtctccaagttcttttagttcagcttcaatcaacttatcaatagacttctctgcattttcgtttacttttgctaaaggatttgcttcttccgtacacgtcttctttctaggaggttcatctccaccattcttctgattccctttatcttcttcctcttttacagtctcattttctgccaattgtttgacttcacatgacccttcacttgctatttctttctcattcacttgatcattaactccttcactagctatttctttctcattcactagatcattaccgccttcactcactactgccttatccccatctcctttgttttcctcttcctcgccattattactctcatcttcctcctcatcctcatcctcgctatacgaaaatgtaacttttttgtttattggattaccaaacaaaccaggattcactttcgagtcagtcccttgtattagctcctcgaaaaactgtaaaaaagaacaaaagagattacatttaagaacactcaaaagattataagagctgctcaaacattacaaagctcttgagaaatctaacattggcactgtgcctagtgatgtcgagaaagcagaccacataacaacattgttcagattagattaatttgcaataaacacacaaacttccaaactcgacaaagctaacagagaaagtatattactaggaaacctaaaacgcaattcgaccagaaattaaaagggctaagttcagttgttgaagataatctgaaacgtgtacaggaaatcaatttatggaagaagcagtgacactaagtaaaatatgaactagttgggagatgaaatcaatttcaacaaaaaaaagagagaaactttacggaatcaatgacgttaatagcttcctgagcagcttggaattcgcgtccgccatcgcaagagatgaaaaaaccttgaacacctggcttcaaagggtaagatcccttcttcttcactggtctctgctaacaacaaattagacgaagaaaattaaacacatgagaatagttagcagctaatccacagatagacttagtgtgtgaaagattacgttttgaggtcaataatcctgttttctcttcgtgctctggtccccgggagccatcgtctgagagagagagagatagaggtttttgcgtagctcagccaaacacagtgacgagctagtccttagagaaaaacaaacatgacatgggctgtgttgggctttggtcgtgacccattagctaaaggccttggtgc

SEQ ID NO: 26544 - DNA, 1734 bp, Arabidopsis thaliana landsberg
  unsure (1)..(1734): unsure at all n locations
cctccggataggcaaaaagacgcctgccagaaacaaaaaaaaagatgaacaacccaaatgaaaagaatcaccaaaactttatagttatatacacatatgtctaatataacattatttaaaatgaaagagaacatttggaatggaaagaaaaagatattgtgtttttaccaattgacgtcatggatcagaaccggatcagaaacataacaatcttgtaattgcaaagaggaaaaattctttataacccaaacaaacttcttatcacatgggttcatgattgatgtcatgaaagattcctcgttcgcaaggaaacaaaactcctttaaaactcaaattttgtaaaccaaaccctaatcactttcaaggtataaaatagaagaaaaaattataaactaagattccactccaagaaattttgaaaatcgagcagaattctttaaaaagttaccacgatatgaattggaatagagactaaagggttttatagaaaaggaacggagactacgaaaacaaactttttaagcgtaacctaacgtaaaatcatatataaaggaaaatatatctagctttttttttggtaacagatattgttagataaactttagacattttccaacaaaataaattcatctatagattttcttagcgtataagtaagaaataaatctttaaacccttaaatataggagatttattcgagcataaaattcgaataaagattcttaaatataggagatttattctcatctaaggaaggagttaataaaattttagatcaaagtggctaagttaaataaaatgaccttgatttttgtatagattaacaatcttttaacaataacattatgcttacatagcgccgtaacgtatgtcaaattaaagcatgtattgactttccaatcaccctgtttcttcttattacgtttatttggctcaaatactctgtttctgatttgttatgtgaaagatggtagatattttatacttgatttcgacgtagccactttctctctaaagaagacaatctttatcaaggaatgtttttcaaacaaaaacagaggaacttcttctaaaaccatcaattagtgataaggagagttaattgacaaaaaaaaaaaaaaagtgataaggagagttaaaacagaacaagaaaccgaggaacttcacataaaaccatcaattagtgatatcaaacaacatcgctgaaatcaaacggagtttcagctgccaaagccgcagctttctgtttcttcagatcagattctagatnnnnnnnnnnnnnnnnnnnnnnnnnnnnnnnttcctcaagttctctgatccgtgccccaatgtcccgttttttctccttcttcaagaaagcttcgtccagtttctgacgcaaccattgcaacttcaagccagcttttgtcagatccaaaaccgtgcggtctgctttgtttagatcgtccattgtgagctccttaggcggtcggcacagtgtcataattaggtcaagaagaacacccatgtaagcatttttgagctgttggttctttaaattgaagtccgatgcaatgtctggatgtttttcaaagattgcattcacttggcttacctgtggaacaagaaaggcaaacacttttcttcgctaaaattgaaataagaggtttaaaatcaatatgatgctttattacctgcgaatcaagaatctgaaacccattgacttcaacaatttcatgagcatcttctgacgac

SEQ ID NO: 26545 - DNA, 1295 bp, Arabidopsis thaliana landsberg
aagataattgaatacaatagttactaaaaggttaactagccaaattatttgtttgaaagattaaaaacttttttttgcacaaaaaaaagatgattaaaatgttttttaagaatatataaaattatgtataaattaaattcttagatcatttaaatacccatattattcaatattcatactgaatccgttatccgtatcattcattttttttttttaaagtacagttataataataattgtaatatcttaaattacacttattcgattctttcagttattatccggtatttatctgaaaaagaataagtttagtcatgtaaatgtaaaaaagagtgaacttttgaaacaattgaggcatgtgaaagcttttcaatatacatattggcttgaacttgaaggattgctaatagatagtaactggattcaagggaccccatcaaggtgaaagattcgctcctctgagtgcgtgtgaggcagctacgatgtgattggtcggagtgtggaacccatgactgctcttacgtcggaaatcgtttctcgggttctgtcttttttaaaacactttagtattgtattaaaaagaaaataaaggaaaaagttttttcagtacgagcgtgttgtgataacagtttttttttttttttttggcgccctgaaaaaaagggcgggaggacgtgaagagtgttattgcagatcctttatttgttttttgttttttttgcctttatctctgatttttcgggattcggtagcgttcgagatctgagctgttgcatgattgctgagagtcatcgcacgtgtgccttccttctttgtacggtgaaaatagtttttaccatatttaaaccggttccaaagttttgttcaggtttaaagtattatgggctagtagtgtgatctttcgtgtttggatgaactgatgaacaaagaaatatctaaagattgtacacagtgttggtcatgcatacgatttgaagcatataaaatcatgattcatgagaatgtccctttgacatcttcgataaaatcatgagaattatgaattatcgcaagctttaaatttagagatttttaatgtaattcatcttcttcaataataataaacctctcgattaagaataataagcaccggggcattgacattgggagcctctactcagtactcaccttgttgttgtttcacgggttacatatatattaatataagaaggccttttaacaaaaataaataaatataagtctgatttaatgtataaatgtatatcacgtaacagtagattaattagtcgccgcat

SEQ ID NO: 26546 - DNA, 1231 bp, Arabidopsis thaliana landsberg
  unsure (1)..(1231): unsure at all n locations
tttattgctatactaagcatgctactggtgagattatatatactattatatgcacatgcacatgaacattaagtatccatgtttctcatgaatcattcagatcaaatatctaagccacactcacattgatttagctactgattgttatgatcatcatggtatggacaaatgtgttaaagtgaatgaaagtctaataatttagattggtgtgagtatgttaacttaaatgttacatctgtttttcagccggttttgattcacgtgaattcgtgaggattaaacacatcatgttatgttgggagagtcttgagggatggtttataaagataaaacggtgatgatatagaagagagagccaaaaataaattagtgagtggtcaaagattgttaataaatgaaccaacacaatcttaattgccaagcattcacacttaactacttctttagcttcatctagctacttgatgattattatatgcctttccttgtctatatgtgtagcacacactctctttaaaaaatgatgtagcctttttgtaatttgtttttccttaacctttttggtatcattatgataatgtttttataaactaaacactttttgtttcttatttcgcattttaaaatttaggtatatataacaggatctatatacttttccagaaacaaaaaaaaatgtaaatgcggatatacaaagatagattattcatacttttttatttaatatttcgggttgacgtcggatatgtgataaaccactagggcaagtaacacttctcttgacatctaatttacaaatagatttgcaaccaaaaacactaatttctcctttttttacttaaccaaaagaaatgtcaaaaaaatattaataggacacaaagaaagaaaaaaagcaaggtagtatttgtttcggggatggagtggagatcttttgttcaaattgatacgacgaggcctttggtttatacttagctttataccaaaactgtctgcaggactcaaaatcaaccaaataagctgacttctttgttagtcgtttgacttttacgtggtgagtgtcttttcgctgttggacgtccgacaaaatcaggaagaaagaaaaactcaattgcgtccataatgccttgagcaaagtcagagtttccaactgcaagaaaagtcgaggaaatataagtnaaaccaaaagggagacttaagaacaatattattaatataaagaactngatcgatg

SEQ ID NO: 26547 - DNA, 988 bp, Arabidopsis thaliana landsberg
ctaaaaaacaaaagagattcttgttttaccaaagtgaacagagtttcagccagcattttagatgtgttcaaaacaggctagcttgaagtaatcatctcccttgtgttttatgtaatggaacctcccatggaggagcattctaaattagcatcaacttcatcattctccatagttacaataaagcatgctttacaaaaggattgtgaaagtatcgctttaatgttttgtgggagaactttctaagcttggcttgaacttactctattttatgtacccaatacaaagaaacgagtaagaaaaaagatgcataaaatatcatcatggcactgcttccagtttttcccacaacctgaaagctcttctgatgactggatcagctgaaaatccttctgcgtaatccgcaatcgcgattaacaggctactcaatttctcaccattgtcctgtacatttcacaaattatcctctgttactaatctttctgttttcagttagtctattgtagtagatgtatatcgtcatacaaatacaaacctctggtttcttaaaagtaagatctttcgtgtcgaacggtactatgtaatctgggagatcagaccgtaacagtgcctgccattaacacaattcatcatccctaccttgtgaacttaacaactgaataaatgaatgaaagtatgaaagaaaaacaggaaaacctaccaatttcttgctaagaatggcttgatccgcactagctattagagactgttgcaaagacaaggaagattataatattaggccttgcatatcacagaagcactagcttgcctaacctctgcaacacttgttcactcacctcctttatttttccttctttgatctcatccacagactgcaacagattctccaacgtgcctgataatgcaataaaagtgagtaataggaaacatggggcgcaaatcaatgaaatcaaagaatatagcatgactcagtgaataccaaatctagata

SEQ ID NO: 26548 - DNA, 1491 bp, Arabidopsis thaliana landsberg
tgaattccctatgaaatataaaccgcataaactaatcgtgaccgccttcaaataaaaataaaaccctttattttctctctttcagccgccgctttcacttacctcttcctcttccttcttcttctaccttcatctcgtaaaggttatgctgcacactgaagctcgcaattctggctatcgaaaaccacaatcacaagctcaacttcggggccttcaaggccaatcacaagaaagtcatggtgagtcttctatcaactctttttgtttgttttaccttattatctatctatcttctccagattctgatttggtttcgttttgttcagggaccaatgataagaacagaggaagaagaagactatacaagtccaccgtggctaatgccaatgctacgagggagttacttcgtcccctgttccatccatgtcgattcaaacaaaaacgaatgcaatttgttctgtcttgattgtgctggaaatgccttttgctcttactgtttagtcaaacataaagaccatcgtgttgttcaggttcaatatctctcttcttcgttttatcctcctcaaaatctcggttttttaattataatgttaatgaaaagaattaaatttgcagataaggagatcttcgtaccataacgtggtgagagtgaatgagatacagaagttcatagacatcgcttgtgttcagacatatattatcaacagcgcaaagatcgtgttcctcaatgaaagacctcagcctagaatcggtaaaggtgttacaaacacttgtgaaatctgttgcagaagtctccttgattctttcaggttctgctctctcggctgcaaggtataacacaaaaagactctccctctgttttttttgcctgttttcaccatttttatttgaaacaattcatatgcgtttaacaaaaatgtaaactttcttaaaacccattaacgcatttcacttcttaatgatatctatatcaaattttatccgttttgtttagttttgttcgtgattcatgtggatatgctctgtttttgtaatgttatttgtggaaatgactatattgtcctttggttgtttttgttctgtttagcttggaggaatgaggagaggagatttatctctaaccttctctttgaaagggaagcatgggagagagtaccttggtgggtcggaatcagatgaagctactacaccgaccaagatgcgtaagaccaatgctttcaaccgtctgatgagtggtctctcgatctcaaccgttagattcgatgactacggtcccaatggtgatcaaaggtcttcaagctctggtgatgaaggtggttttagtttctctccgggaacacctccgatctataatcaccggaattcaagcagacgaaagggtgtacctcaccgtgctccgttctaagaaaagataattactaaatttccaaccccataataattaattatatatatatatagataatggtataatacaatgtataactgggg

SEQ ID NO: 26549 - DNA, 780 bp, Arabidopsis thaliana landsberg
  unsure (1)..(780): unsure at all n locations
gtggctgttaacaaattcttaggtatttagtttctacgtcttgtttcgggatctggtatccaaaggggtctacctttgacttaattggatacttagactccgactatgccgggagcaaggttgataggaagagaacatcagggacgtgccagtttctaggaaggtcccgggtgtcctggagctccaagaaacagacatccgttgccctatccaccgctgaggccgagtatnnnnnnnnnnnnnnnnnnnnnnnnnnnnnnnnnnnnnnnnnnnnnnnnnnnnnnnnnnnnnnnnacaatctgagcaaagtcccactcctatgtgacaatgagagtgcaatctgcatgcggataatcctgttgaacacagccgcactaagcacatagacatccagcatcactttctgagagaccaccagcaaaagggagatatcgaggttttccatattagcaccgagaaccagctagccgatatctttaccaagccattagatgagaagaccttttgcaggttgcgtagtgagctaaatgtcttagattcacgtaacttggattgatttacagcatacatgtgttttatgcctttgatcatgttacatatacatttatgcaatttgttgcttatttatggtgctaaagttgtgcaagggatccccggacctcacaagtccatgtgtgaatgatgcacatatttagggggagatgtgctacaacttgaccctttgagactaacctttgtgtttaagtgtacttgatgtagtctcaaaggtgaattgaaagg

SEQ ID NO: 26550 - DNA, 1188 bp, Arabidopsis thaliana landsberg
  unsure (1)..(1188): unsure at all n locations
gattcctatctctacctagtgcaccagaggagtatgtgactaaagaggaccctcctaaagccaatattattgatggaccacaaacgaaatctacatcaaagcgcaagagatgtcctcttttgctcccaccaacagaagaaaaaactaagatagcaacacgcaaggccaactgtcgttttgatgcaggagcatcttcttctgggacgagagagccaacaccggagtggctggtgcggttgatgagggtaaagtacggagaaaatcctataaatgtcataaataaagaactgactgcaaccaatgtcaaaccacatcaccgtcgtctctccatgcctttcagccagatcatagattttgaattcttgaaccccgacgaaaaaaggatcatagaagaacatgccaataaggaacgtgaagaaggagtagacgtgatactcgtaaattttgatcgaagggaatatatgttgaatttgaggagatggaacatggggacctctcctctatacattttggtttcagggcggtataatgtggtcaaaggatgccgtctaaaggaaggcaatgagattcgcatctggtctttccactttgatgaccagctctatctcgctatggttcctcttacgccaactgagtccggttaacgatcaaagacaaagctaatgatggattggtgcacaagtaagctcggctgtgtgtttttagggaggttctatggttttttttttttaattaagaatatatcatcaccttcgttttatttagattcaaattctcattaggagtctcgagattgtgtttaggtttttgcttcattgaatatttgatattattaatgattttagtttagtaataattaattttctctaataaataattgttctgcagtaaaaaataacagtaacggtcacttttctaaccgttgtgatcagtttccttttcttttttttgcagccaccaaactttnnnnnnnnnnnnnnnnnngaatttcccattttaattcactaaaatatttaaataataaataacatattttcaacgaaaaccatgttaaaactttttaaaaactagtttaagtattaaattttaaaaatgtcgaaaactaattgcgtctaggcatcatgtccttagttggtccgtaagtggtgttcgaagttctatatggttttcgagtaatatagatttaac

SEQ ID NO: 26551 - DNA, 2027 bp, Arabidopsis thaliana landsberg
  unsure (1)..(2027): unsure at all n locations
actcatgtcttccacctttagtgggatcaaaaccaggggtcattgtaggcacagcactagtgagaatcacaagcgaatcgattccttgaaacgcagggttaatgctatcagcatctgttatatccccaatgaaaacatcagcttctcctccaattttctcttttccttgagcacttctaactaaaccctttgctacaaacttgtctgacccctccttcagcttcttatacacaatctggcctatcgattccatgaaaacaaccacaattacaatatcaaaagaaagattcattccagatcatcacatgcataaaccataacatcatcactagccctaacagaacgaaagatagctaaaatcaaaatcggcggcaacgaaattgaagaagtgattacctgttctgccactagcgccggtgacgagaacggtgggaagattcgccattgtagaagcttaggatttttttgctaaacttaaatatctctcagaagccattaaaggagagtatgggaacggaccgattggtgtgagcattgatgaccgtctgatttgaaggttagtcgttgtgattacacatgtcatcttcttagtggtaaaaattactgacactcttactaatttcttaattgaatttttgggcccagcccttaatatctctgttacttatgggccataactgttatttatggcaattgatcattttgaatatctaactacgtgacgtttttcatgaactcgtcgccacaaaaacgacatgcttccataatttgtttttttttttttatcaaaagcttccataattaaactacgaaattattgactttttttgttggttctgtacatattccgaaacaactgtataattgaactgtcgtctgtcacagactcacaagctttgttttttttgtcaacatccatcatgattcatgactcatgagcaaatattgaagaagaatattagtatcaactacttgaaataaaattacttagccatttcaactgatcacattgtagacttattacgataaaacaaaaatctaatctttaaattagtttaacaaaattactatattagattagatacgaccgtatcaacattttgtagcatatggtgaaaagtatatagcatatatctttaatttttttataaagaaatctatgggtggcaaaaaagaaaaatgtgtatggtgagatcttgttgatttcttatgcatttttaaagtatgtttattatatttgattgattctagaagatacctagaggatatttaattatttatttctcctacaaactagatggaaattattttctcattttttattaatcttttataaacacaagtcgaaaaaaaaacaaaaatgacattacgtcatttgaaaaaagaaaatgaaaatgacagtggtggaaaattaggtacaacggcgaaacagtactcctgctaagctctaacagaagtctcaacggcgaccttgccggaatatccaacatccgacgatttcctgtcggattcccataactccggtatcgcctctttcatgttgtgaatgttttccaacgcgtaatccgctcctttgactttggtcgatttaccaacctgaaaacaacaataacaaactccaaagtcaatattattaaactatcctgttttgtttaattaaacttgattatgtttggttaattaaactaagataatcgtaccagaaccgtgtaaagaccaacgcgttttccagcttgtacgtttcggacactgtcctcaaagaacagctgcgatgagaaataatataaattttagttttgttgtccatgtatttaaaaaaacgaaaaaaatgaaagtatccggtttgctatnnnnnnnnnnnnnnnnnnnnattggcgatttcaagagctttctcgatagcagattcagatggtttacacacaacaggcgttttgggaagtgaaccgaccggttcagaccggttaaaatgtccaacgatatcaaaaatctcgggattgttagacgcagcgtttgtgtggataggttag

SEQ ID NO: 26552 - DNA, 1574 bp, Arabidopsis thaliana landsberg
agggatcatatagatgcgttgccatttattaaacgatctgacatcaaatgataagacgatactaccatgtgtaatatatttttctcgccaacaaccattaattaaaatcttatttcacctatagtatacaaatggtaaaacgaatgacaatgatagaagtgtgatcgtaaaaatatatatatggtagctatacttattcttagatagattgtctcgtagatctacatttgcgaccacattgaaattttttagctaggttggatattgggtgtgaatcgtgcctaagatgcaagtgagaaatattggatatgtagcagtagcatgccgtgcatatatcatgtatgctagaattggtgattggtcaaaatccattgaacttcgaaacatcacaagaaaaatattaatcgtgagtgtcactgtttagttgtccaatgagatataaaagaaaaaagtacatatttttcccatttatgaaaagtccaatcacattttatttataaaggcgacttattggactttctagttgacagatcaatgaagcagaggatatttagatgatcatcgcaagcagagagaaagacacgtcgaagaagacaatgagaaactcacacccataatttgctgctcatcatttctaattattaaataaaaacggtaatttaattttcttgatttgtcacatctttatttcatcatcttttgcttaccttttcttcctaagctcttggatattattaatgttttagatcgatttatattataatttgatattttcttgaattgcaagttttgttgcttaattgtcagaataatggctgctttctttcttggagaatctgaaatgagagaacactcttctgatctttttatgatgactctgaatccgtttcgcgagcagacaacgaccactaatgctcatgacgatcacttctacaacttgtgctttggttcccaacaatatagacctcgagatgaagtaggtcatatagaacaaggaaattcttccatctccactttttcaaacggaggagtcttcagggctttggctccgatctacttgaaagcggctcaagaattactcaatgagattgtcaatgttggaaacggtagccacggcgcaaaacaagagcgaccggtgagtaaagagtccacgatttatggagttgaggacatcaatggtggctataagcctggcgtagctgctttgcaaatgaagaaagcaaaactcatctccatgggtgaaatggtaacttatttatacctacctatataatatgtgatacacaaataataataataagatctttgtatatacaaaccaaccatggtgatatatataatggcaataaactttctgttactttgagatcgggactcaagttcagtccatatatttggttattgcatgttaagtaattgatactttataaaggtttcaaagattggtaaattgatttgggaaatgaatttggtaaattatacacaggtggaacacagataccagcaataccatgaccaaatgcagactataaactcatcgtttgagcaagctgcgggtttaggctcagcgaact

SEQ ID NO: 26553 - DNA, 1274 bp, Arabidopsis thaliana landsberg
  unsure (1)..(1274): unsure at all n locations
tacaaacccagctattgttagctttctaatttggtacatttattgcttttacatacacgaaaactacttgaaatcctacatacacaaacgagtaccaatgtgtgtatttgggtattagatataaattcatatacttatataagcactgtccacaattttcagagtcgagtcctttcattttcaacaatctctttaactccactatagatcccaacttttctcactataaaaggaacccatttcctctttccttcaatcactttatcttcttacaccaaatctatcttcaagacttcaacatactccattctctatatacaacctttttaagaaaactttgattaatcagatcaaatatttataaattaaaacacacacacacactttctcaacaatgagattctctctttctcccgtacgtccgcatagtgtagtagtagtaccttcactaccaaaacaggacgtcgtttcttatataagtggtacgacgtcgaatcgtcaatgtcgatgtgtacttacacttccttctccttcagtttccacttccnnnnnnnnnnnnnnnnnnnnnnnnnnnacctgggagagtttgctgctaaaccatgatcaaattccaggcgaattctcacccactggttcgagtatcccggttaagcttggccggagatggatggagtatcaggggcttcaaaattgggacggtcttttagacccattggacgacaatctccggcgagagattctccggtacggtcaatttgtcgaatcggcttatcaagcatttgatttcgatccttcctctccaacctacgggacatgccggtttccgaggagcacgttgttagagcgatccggtttacccaactccggttatcgactaacgaagaaccttcgtgccacgtcaggtattaacttgccacgttggattgagaaagcgccaagctggatggctacacaatctagctggattggttacgtggcagtttgccaggacaaagaagagatctcgcggcttgggcgtagagacgtcgtcatctccttccgtggaaccgccacgtgtctcgagtggttagagaaccttcgcgccacgctgactcatctccctaatgggcctactggagcaaatctaaacgggtctaactctgggctcatggttgagagcgggttttaagcttgtatacttangtgttcacagtttgagagacatggtaagagaagagatcgcaggctactccatcttacgggacgagccgttaagtgntacgataaccgtcaca

SEQ ID NO: 26554 - DNA, 1596 bp, Arabidopsis thaliana landsberg
agtgagagtcatataaactctttgatgctgtttgttatgttactcgcagggcaacaaactgacaccaaaaaccatgaagaacagtgttagatcactttgtaactcaaatgttgcccaaggcttcagaattgggaccgatactgctttaccggtaacatatatacgctcttccgaggcccctcttgagtatctcggtggaaaaacttcgtccgaaaggaagattcttgcattctttgctggcagcatgcacggatatctccgtctgatactagtgaagctttgggagaataaagaacctgacatgaagatttttggtccaatgcctcgtgaccctaaaagcaagaaacaataccgagaatatatgaagagcagcaggtaaggtcaaggaaaggccttttctatcatcatcctctataaaccatattgattttggttgtgagaagtttagctcccatttcaacaggtactgcatatgtgcgaggggttatgaagtccacactcctagggttgtcgaggctatcattaatgaatgtgttccggttatcattgctgacaactacgtgcctccctttttcgaggttttgaactgggaggaatttgctgtgtttgttgaggagaaagatataccgaatctgagaaacattctgctatccatacccgacgatagatatattggcatgcaagcaagggttaaagcggtgcagcaacatttcctgtggcacaagaaaccggtgaagttcgatcaattccatatgattttgcattctatttggtacagccgagttcatagaattaaaactaggtgaaaacattcataccatggaacccaagacaacatataggtgaatgcattgtatagttatctgttatcaccactccctttataaactgtattgaactccgttagtggattctgttgatcctttatgttaaatgtgttgaatattcaacgatgtgtttagctcccatgtactagagatgggagctaaacacgaaaactcttaactgattcaatgagaaacgagttctcaagccaatcagagtttgtcacatctcctccatggatcaacactttactagtattgtcttcttcaaccttactaccactaagctgaagagaacaagtcctgcttcaaagagtccatcttcttcgcctcactcttctttgatttcccattagacttcccttcacttcatcaaatagacttggccaattcaacatttttgatcatgtggtttaagaaaattaagttttttgaaccctgaagaagcaatattcaattgaaatgatcaagtgattacaaaaggaacgcgacaccacttgctactctgcaggctatgggaaacaacgaattcattattacattgatactgcagcaacacgagtggttgttgcctgaagaacacctttgcctgaggacgacgaatcatcaacggctactatggtgagtccaacttcaacaccgttcttcttcaacggatcaaactcttgtttatcataattcacaccaagtggactctgatcacgttcttgtttgcttgatgatcttatactcacttgatccgtcgattcatctgaattctgttcccatgaag

SEQ ID NO: 26555 - DNA, 952 bp, Arabidopsis thaliana landsberg
  unsure (1)..(952): unsure at all n locations
acatagattggtaaagattttgacccgttttgttggtgtccctttaatttaccgttttaccgattgctagctcatagtaggaattgtataacttctaccgcggtgataaaatgtaaaaaaacttttaacttgaaatattttacgtgaccatgttgatatcgtatgatgttcgggttcgaccttttgaaacagtatgcaggcacaacagaacaaatttccacggcggctgaagcgctagtcgggaggtcaacgacattgacagaagcactcaaagcagcggcgataaatgtcggccgtaaaccggtagaaaccaccgacttggctgccataaaagaggtggaagctagggctataggaggtgatatagaaagcgatggtggtgtaaccgctgtagcaagtaaagcggttgctcgtaaccaaaaaataggagaagataatgagaagacaaatctcggcgacgttatcgcggagattgatgtgaaagtaacgagagatagagaagtgacaagtgaagacgcagaagcagtgattcgggctgagctgaatcattctcctttcaataatattattcctggaggtgttgtgttgctgaatccgtcactgcagcttataaacttaattgcaatccatgcaatgtatctctttgatatcaattgcaatttacatatttatcacaataagtatataataacggtcgtgatttttgtattttttgttttgttttcttttagagtaggaagtttcgaaccgaagttttgtactgtcttttttaccgagatcagtttttgatccaccttatataggcattggaagcctataagattttgttgcataaataatcattaaagaacaaatttaaatcccaaaatccaaccatggaactccattttattactttngaagtttgacannacgtcaaaacatgcnagtcgtaaaagagatcacatacctt

SEQ ID NO: 26556 - DNA, 866 bp, Arabidopsis thaliana landsberg
ttgctgatctagtcgaaagctgcttctatggattttatagagaatgcttcgtttcaacagatgttctatagaatctgtcttgtaggcttgtaataagttttaactcacgtgtgaatgcaatagggatctttacatcagtttctagacccatattcatctgttccttgtatagctgccattggattcagtggtacacaagtttggagaaccggtaagaccatatgtactttagattttaagtatttacacgttatagtcaagcaaacgtactcaagtttgttttctatccctttctatctttcagaaggatttatcactgctgaagaccttgcatccagtttagagaaagcgtggttaggacttcatatccaggtacgtgatagctgctttctcacttatggtggtgttcgtccttctatacattttcagttgacttttctcattttcaggaaacaactgcaagtatcttttcagcagcacttgcatcacagaactcagagacacctgtttctagtgcttcgagtgttgtcttgcctcccggaagtgttcctttagatgcagcggttgcatctccatcgacggcttctagtgttcaaccctcagagacaaagtcaacggtaacatctgcatcaacaacagaaaacaatgatggcacagttgcagttaaggttgtccctggagctgaaatcatttccacattactttagtttgttgttttgcttacatgatgcagcctttttttaaaacagggcaaagaatctgctgaacccagtaatttgtgtgatactactaaaaaccagccagatccctctgacgatgggactaaagccaatgctgaacatgaaccgacagagacctgtttgcgc

SEQ ID NO: 26557 - DNA, 489 bp, Arabidopsis thaliana landsberg
cccaacattcttgataacgaagcaccaaggcaggagatgatggtatatccccaactgctgctcgcttaggattgccagttactggtgggaagcgtgtcatggttccggaaatgtacttcaaagatgcttaagttgtccccaataaaaatgacagaaccctctgttacttggaatttggctgatcaagaacctcaatctactgagcaagctaacgtgggtgggccatcaactaccgttcaggcagcgacgacctattcctttgatgttcaaaaggccgaatctgaaactggcacaaaagaagtcgaagtcaccaatgtaaactcagacggtgatcaaagcgacatcaacagcaaggctcaagaagttgctgcagattctttgtccaatctagatgttgatggccaatcacgcatgaaagggaaagggaaagccagaaccagaagaacacgctctgtcaaagatgttgttgatgatgctaaagctttatat

SEQ ID NO: 26558 - DNA, 1199 bp, Arabidopsis thaliana landsberg
  unsure (1)..(1199): unsure at all n locations
ttgctcgtgaatctctacccttacttcagctacatgggagacacggccaacatccatctagactacgctctgttcaccgcccagtccactgttgataacgatccagggtactcataccaaaacctattcgacgcaaatctcgactcggtttatgcagcattggagaaatcagggggcggatcgttggaaatcgtggtgtcggagaccggttggcccacagagggagcagtcgggacgagtgtggaaaacgcaaagacttatgttaacaatttgatacaacatgtgaagaatggatcaccgagaaggccagggaaagctatagagacttatatattcgctatgttcgatgagaataagaaggaaccaacgtatgagaagttttggggactgtttcatccagatcgacagtctaagtatgaagttaatttcaactaatccttagagacttgtgggctttttatgtaagcgtatttaaaaattgggaacttgttgtagtaataaggaataattaatgcgctttcagcgtgtagtatgttgttatttttaaggttataaatgagctgcaagcataaataaggaaaaaaatcagcatgggcctataggcatataataaaacaagcttgcttagggaatgtgagacccaaaattttgtggaattcttgttagcaaaatgtttttgagtatgcatgatgcgatgagtcatctgggcgaacgggttctcacctctttttttgttactatcaacatacattttacatacaaggagagaacgattgattaaagtgcatgtttaccactgtcgtacgcgaactgataacgaccgtgctttttgtcttataactattttgttgtgtttacaattttattctggattctagtttattctaattttgagaaagtggggaacgttgtaaacagcgagaagtaaagacagagaaatagtcaactagtataacactatacccaaaaaaaaaggaatgtataaatggtatattttcttatataacagaataaaagttttttttgacaatgtgctggttatttctctattaagaaagacgtgttaaattatcttctacgcacatttaataatctttgacttgtaaaagatgtgttaaagttttctacattntaattgcttttctcgtatttagaagaaaacaaaatcagtttgagaatangtaaacgaactgtaaagt

SEQ ID NO: 26559 - DNA, 1356 bp, Arabidopsis thaliana landsberg
gttcatcaggttaaaacgaaatttctcagcaacgtcactattctctctgtcacagtgttttattcttttccattatctttattggaaacttgattagatagaattgattaaggtatgaagataattagtgtaccattcttcacatgatacgaggtgaacaatagtatatcagaatactagaataattttataagttataaagatgaatggtataccacttattacaaaacgaaaacatagttagatctgagaagaaggaaagattttttgttttaaaaaatgagatggttagatatatgccatgttaagagatgccaccatgttcttcttcttcttacccggaaaaaactctttcttcttctctttcccataaaaagaaacaaaaaaaaactaacttcccacaaattttgccaaaccaaaccaaaaatagtaatgatctcattcaatttgaaccctctctccattttctttcatagtttttttttagggtaacccaaaacattaatgttggttagaaactcaaaagttagtaactcttttttttctctgtgattgacagagaggtaagaggaattaaagagagaaagtgtttcggtttttgatgccttctctcgagttaggccttctctcttccgtcacaccatcattttttttctccataacgaccaaatcataaaaacggtcgttcctattttttctttctctgcgttttttgtttcgaattcttcaatagaattttaaaagaaagaagaaagctgggtgagacgaaggaaggaagaatgagcacttcgtcgagcaacggattgcttctgacgtcaatgtcaggacgtcatgacgacatggaagctggatctgctaaaactgaagaacattctgatcatgaagagcttcaacatgatcctgatgatccttttgatattgataacaccaagaacgcttctgttgaatctcttcgtcgttggagacaagccgctcttgtgttgaacgcatcgcgtcggtttcgatacactttggatcttaataaagaagaacattatgataatcgaaggaggatgatcagagctcatgctcaagtcattagggtatgtattttctttatataattcttcctatcatttcaacaacaatgttgtttgtttaattgaatctcacatcgataaatcacttttatgaatcaggcagcattgctttttaaactggctggtgaacaacaaattggtatgatctcttataagtcaagcaaatctctgttttgttttctggtttcttgttgaataatctttagtttcttttggtatcaattagcgtttggatcatcaacaccagcagcttctactggtaactgtgacattgatc

SEQ ID NO: 26560 - DNA, 1193 bp, Arabidopsis thaliana landsberg
aaacgacgtcgtaataactcggaacaaaatcattgttgatctacatcatatcatctacattgaggcttaaaacatcatatcaataccttaggatcatttagaattcttagaactgattaactgtagatgaaatcacagcaacggattaatacaatatgcggttataagtaaaaagaaataagaagcaaaaaatactgacaaatcatagttgttatatcatcaagaaacgtggaaaacaaaagaagaagaaaaaaactcttcaagaaccaaatgccaaaggaacatagttgcccaatttctaactctagttttcacccataaaatggatcacaccttattagaaaatggtcttacggatcacacttccttctccagccaaatatggcccccgtctcatctcatctccggcgatgggagctcgaaagtaccttcatgtatttagatatgtaagagataagagaggagagaggaaggtttgatgaggagcatccattgttgatggtcttttcgaccttatcaaaggagaagccaagtgagagagacgtttcattttgggtttatagaccaaaaaagtggtcatttgtgagagtatcttcgaaagcatatgctttgaaccattaactaagctgacctgagtcccattattactacttttgttttcttcttcttttttctcttttgttagtatattaaaatctatttaaattattgatgtgagtaacatgggttgcttcgccacaaatcataagtagaaaaaaagtgaggtcctcttttcttcgcctagttgtttctcattggactgcttccaactcttgttggttctgtcaatcttacgaggttaccaaatttggttcagttttgtgaatcacttgggaattaggttacgatggtattcttctgcgtttataaaacgtgcctatgatctaagtaactacccaagtcattgtctccagctagtggaaagcgacacgttactgatgttagagttgatatgatttgcatattttcttgttttaaagcacattttgtgtttgtgtctacaattttacatgaaacgaaattaacattccaccaaccatcaattatacaagcgctattaaatacaagatttacgtcagctgtctaatgcaatggaacttagcagcaattttgaaaaaaaaaatatggtactaataccatgataaatattacta

SEQ ID NO: 26561 - DNA, 1121 bp, Arabidopsis thaliana landsberg
gtttcctctacctttaccaggacctgagtcccttgaaaacattgggtttgacctcattctttgggtatcaaactgtacacgttggcctgatccagtcccaaaagaccgcttttcatgttcactaaacgaattgccattttcataatgtctatagtttttcctgtacggccgtgagaaagcctgatctgaagaatcttgttccaaagactgagacctggtctcttctttcctacggtgcttatggttgcgatcatcatcctcctcctcactgatctcatgctcctcctcagggtcactcatacaatcaggtggagataacacactttgctttggagaggaaacagaaagttccatgaaaccacttcaatattgcagagcttcttgtctctcatacaaaactctgatacaatttcgcatccatcagatcaaagagtataataccaaaacgaaatcctaaagcaatcaatactcaaatcctaacgtatatactatcgattaagttcataattcccacaacaactcgaaaacactaatcaattaagactaactccagaattctaactacaagcagcataagaacttagggtttatacgaacctagagagctttcagaaatcttcaaaaaaaaaaagggaaataaatcttacaggttctcgtgaaataatcagtgactctgttcgctcctcttcacagacaaacaaaatcggtttcggctccgacgacgacgaaaacctaaataaaaaacaatggatggaacatttggggaagaaattggacaaaattggaggaatcgtcaatgaagattgaatccacggcggagatttttggccgcgccgtcgaggtttcggaattagtaggagaatcaacgtcgccgatagcgactggtctcgtcgttagggtttgatggagctgtggaatagctgagaaagagagagagagggtagagagagaaagaggggcttatttgttattgcaagtaacacaaggaaaggcgaggaagacagaaactagactggaaaatgttttattttctaccccaaaaattctttaattttacaaattgacccaatatttatttaagtttacaaattgccccaatatttctttcgtattcgtaattt

SEQ ID NO: 26562 - DNA, 1703 bp, Arabidopsis thaliana landsberg
acattattggatcagaagcaataaagctatccgtagtttaataataaaactcttaagctttcaaccattagtccaaattgcgcaggcctttccatccccttgtttctatccctcccttgcttaaacatttgttttctgtaactttctatgtcctaaaatccaacgaggacaatccaataatctccatggcacatgtgattgtttcaaattgtattaaccgcattttaatttattttcaccaataaattttatcctcccctttttcgaattttgtcttctattttcatcaataaaatttatccacccatttttcagattttctaatctcattttcatttcaaggttactaatcataagctctaattataaataacatcatgatctacattgacaacaacaacaaaaaaaaaaaaaaaaaaacagtatttatcacttatcaaggtctacacttgaggactctcctctttgccagtgataatcttgacctcaaagaagagactctttcttcttcttcttgtccactatcatcactgtctagaacaacaatggattcagcaattgatgtttcttcaaataccgagttctcaaacaaaccgcgccaactttttgcgtcttcattttgattcatctccagtttcatatcagtttgcgcaagtacctcaggtttgctaacttcattcaactctccaagtggtgatctcagggacagttttcggcttagtctattgttgtcactcttcgcagcagaagttcgaaaactcgcaaaggtatcattaaacggcggcttcagccccagagaaagcttctttccattcaaatttggtttcttgttttctttgcaagcaactgaaacaccacgtgtgagcccttcttcaccacacaagtctttcttttgagattgagaaggcaatgcaagagataacttcttcctactcgtttttatcccatcgttaccaaacgaattcccctcgccaaaaccaacccctgcttttcttttcccatttccatcctcttgttcatctctccctgcagtctcacggttcactgtatgtgctatgcttaaagaagattccactgtcaacttcagcttaacactatttccactttcaccagacttctcatctccatgattctaaagaaaaaacatcaacatttacttaaaagctccactcaacaaactagataagtataactaatttatgcaccttaatctgtaagctggtgctgcatccatcagctttaaccttagcatacttctcagtcatctctcttgccttataatcaaaagtttgtctattgtatttatactccctgctctgtaaacaaacaccataacaaaaccttaaagaaaccaaatcaaaatctcaaaagaaaataagtctgtttccttcaagtagaaacttactacttcacacatcaatccatcatcaggatttggttcactaagcaacaatctcatactcgtcaaaactgtcgagatattcaacgatggttgccaagctccctatacattgttaaacacgattcatgtattccatcactagtgttgaatatagctatcatgaagaatcaacaaagctatggaggaagatgatgaaacaaagtctaaccttgggagggagatttagaatgtcaagacaaatcccgccactgttatcgatgtttgggtgataaatcggtgtagtgaatgacacaattggtgg

SEQ ID NO: 26563 - DNA, 913 bp, Arabidopsis thaliana landsberg
  unsure (1)..(913): unsure at all n locations
gattgccactctctatggagaggttacttcttcactaggaaacctttctcgtctcacgcatcttgacctttcgagtaatcagctgacaggtgaagttctggcttcggtcagtaagctaaaccaacttagagaccttttactttccgaaaacagttttagtggtaacattcctacttcatttaccaatttaacgaagctttctagtttagacatctctagcaatcagttcacattggaaaatttctctttcatactaccaaatttaaccagcttgtcctccttaaacgttgcctctaatcactttaaatccacgcttccatctgatatgagtnnnnnnnnnnnnnnnnnnnnnnnnnnnnnnnnnnnnaattcatttgtcgggacttttcctacatccttattcacgattccttcgttacaaattgtttatttggaaggaaaccagttcatgggacctataaagtttgggaatatatcttcatcttctaggctttgggatctaaaccttgctgataacaaattcgatgggccaatccctgaatatatatctgaaattcacagtctcatagtactagatcttagccacaacaacttagttgggccaatacccacttctatatcaaagttggtcaaccttcagcatcttagtctttcaaacaataccttggaaggcgaagtgccaggttgcttatggggattgatgacagtgacactttcccacaattctttcaacagttttggaaagtcatcatccggagctttggatggagaatcaatgcaggagttggatcttggttcgaattcacttggaggaccttttccccattggatctgcaagcaaaggttcttaaagtacttagacttgtccaacaatctcttcaacggctcaattcctccttgtttgaaaaattcc

SEQ ID NO: 26564 - DNA, 1113 bp, Arabidopsis thaliana landsberg
  unsure (1)..(1113): unsure at all n locations
agaaaacacagcaggtcagccatgatttcatttcattgatatccaaacagttttgcaaaagtatgcttaaataactctctttatcccccttagaaatatccgttgtacattgaagtttcctacgtgcattaatgtttagtttgcctctgtcatagaatgagttacttgttttgtatacggcttgcagtaaagtttgtactgtaaaagctttgcatttagatgtatgaaaggcacgataatggtcttccatcatcagcttggatctgattttctatccctagctttgtgactttattcttcttttcttttttaatgtcattgcatattagtgaatgtagatggggtatatgtaacctatctttatatgacatactgaatagtaaatgagtataaccttatggcttctgaccagagagtgttttaaatagatcagctctttagctattggtgcaagatcactgagcttacgtgtgcttaccctattctttttattttatttcagcatttggacataannnnnnnnnnnnnnnnnnntggatttctggatgatgtgaggtctcgatattcgaatttcacatcgtggaatgcactggtaggggaaagaaaatcaaatgcagttaagcgtgcatggcctgatgctgtagaccagtcttcagattgcagtgtacagagtgcttccctctttattgaggatgctttagaaaatcttgagagagagccagaatacagtcaggaaataggtgccgacctagaagttggacgtttacagaaggataagagatcatttcttaggtccaaaatagagggaacttcaggatcttatccatttgagaatcttagaactgctgctgacatgctctttttacatggcggttcagatttggttgttgcgaagcaagcaattgtatccttttgtcatcgcctagtttcacattacattgcactttacttttaatgaatacttgaatcaggaaacattcccatgtttttcctttacgctggtttccttaaccagaagatagtttctttactacctgtttgatcggcattggactacccctgaaaaatattggaagcacactatagatgattttgctgctacgtttggcataa

SEQ ID NO: 26565 - DNA, 1202 bp, Arabidopsis thaliana landsberg
atctcgctttagtaaaaagagcagttttttgaatttgaattttgtttgggaattgagagaagttattttatggaagcttttgaagagatgatgactgataaagcgaccgcgttagtgcaagctgtaatgaaaaatgtttgtatttgcaattcaaattttccctggagccttttttgttggctttttttgctttttcttttgttgaaaatctaagaaactttatggataccaatactcttacattattacataattattttcttaacaaaaataatgtatggatataattttttaaaccctattttataagaaaagtaaagattaaaaataaaataaaaaacacctaattgcaacaaaaacttcattttgtattcaatttttagatatatttaaaacgcactaaacaagtgagagcacatgagttctgtcgcaacataccaaattcttattttcttgtcaacggtgggttgcttacttataaatggtatgagcatgagactatgatagcatcaatacatattccttaaaaccatccttgtacaactttccgagtcaatgagttcgtagactttctcttgaatagtgaagaaaatgtgttgtatcattgccaaattccactctttgcgatattaagctgtgttcagtgttctcgttcatagtcaggtgattaaaacaaaataacttcagaacatataagaaagcccaaaataataaaaagcccaaacccaaaataaaacgtatagcccgatacaatagacgatacatcactatcactagtactaagccaactagacataagacatcttccgtgaaatgtttgcttggtcttaactcttaagcttaattaagaagacaatgagataatcctcatgccaagttagatcactaatacactagtaacctccaatccattattaacagtatttctaatcatcggaccagacaagaatattaaacattcatgctactgtcttcattgatctctttcccttaaactctcttgctgctgctgctcacaaatgattcgtccaacagaaaacggtgccgtcttttcagaaactttataaataatggataagaatactatgttttttactacttgggttttgtcacagatatcatctgcctcgtcagaaaggtaacagataaaaaaaataaaaaaaatgatgaccttatcttcaaccgctactcctacaacttgg

SEQ ID NO: 26566 - DNA, 1043 bp, Arabidopsis thaliana landsberg
aaccccgaatcctaaatgatttaaagattaaaaaagtattagactgctttcgataattccttcttagttttatgattcactataatctatttagactacctcagcatatcaatatttttttcttgtatagaacattcaatcacgaccaatcgaatttcatcaatctacaagaatgaattctcatgcaatttttctcttatagccaacatgctcatgcaattttgattatttacttaaataaataaataaatagaagtttatataagtgtcaataataagcttaaccttgtgattctttgagaagaatcactcagtaattctagtaagatatgagcaatcaattggtatttttgattgttacttctctcatccgacaagtttgaatggttacggcagttaagatggataaatccgtcaatggtttagtccgaactatttttaaagtggacaacaaaccgtcgcaaccaactctatttgtatgtaaaagcggtatgtggtttagggtctgcatcagttttctcttttaaatccacactattacagacgtaatttgtgaaatagtaaataaaacgtggtcaaatacacaaacgaatttgtccaccttaaccacaacaatcatttagaccctaaaattgataataaatggacaagtgaacatggaaagtgtggcaatttatgttattttagacaatcgaagcgattatttaggcgttacctgagagtctagcgcctagatggagtttaaacgaccgcctaaaccattttttagaatactgaacttttgtaatcatttatttgggaggtggtgcacacgacaatgcctacattactcgtgaaaactatattatacctcagaatactaaagtccatgttcccgatcccaatatcatcaaatagttggaccattatcaaatgctatgttaatttttcttatcttttcaaattattctaatgttatgttgccaacgtctgcttttactttataatagaatagaaataatagaacttagtttccgcgattactattgtatatgcttagacca

SEQ ID NO: 26567 - DNA, 1911 bp, Arabidopsis thaliana landsberg
catcattgtaataatttgtaagttgggttattcttatatgaataatttgtgagttgggtctttctatatagaatactattcgtaagatagatcattaattctatataaaatattattcgtaagttagactattcttaataaacatagttatataatttgtaagctggatcattcttaacaaataaatataattaataaaaaataagaataataatttaagttaggtttgattgcggacagtgccggctcaacgcttttatggcctagggcaaaaactttgtttggacccttataattttttttctagtatttttttgttataaaattaatttgtatggtatttttataagcaaattaattgttaaaagcaaaaaaaaaatacaataaaaaatttatggacctatctaatttatttttttgttgtaatctaatttatttatgtatttttaaaaatgatttttaaaaataaaccctttaattattagaacacgggattgaacacccagaccgtcgcaccatccgcccccaatcattttactgatcttcctaagcgttcatccaaactccaaattctgatcttgtgagattcacatcccctcctactctcctaatttgagacggccctgttatcaaaagtgaaccaaccaaatctggttactcataaggttaaccggaaaaatattattaccaaaccataaaacaatccaaaagccttgaaaagaacaccactaaaatttctcaaacaaaacttgtatatatgttctctaaacctctccatttaaacacattttcgattcaaacccttccttccacattgtcgattacccatataactggtgactaagcataatcggtgctagatcctttttctctttctgaaagttttgaaaagactgcaaaagaagatagcttatgtgtccgacaagcctcaggactaatccgggtggtaaccagacatccacgactttgcgatgcaaattaaagaacagcttagaacaagcactcataaacactacaaattgtcaaccacattcgcatccctataacactttaggagccatgataaatgcaataaaaatatgtatgtttttttcttactttttagttaagtcggctcaattatattgtataacatcaactaaaataaaatcatgtaaaatgtaaaatatccatttaaggaggagcaataccactttcattggggcagcagctgaggaactacttcaattaatggatagtgtagcccgatgtgttttatagctcatagtctagggaaaaaaagagcacacgagtacgaggttttttaaacactgtcttcatcccactgttcctcagaatatgcttgtcaagccattttcatatatttgtggcaatactcaagtgtctcgaacctgtccaattctgctcttaaaccaatttactagaagaaagtgcaacgaactccgaaaacatttcgggttggattgggcaaattcctttggtaggcagtcaatgctcttacttgtctactgtctaatctggtaagagtacgcagccatctacactaattatgtttttgaagaatcttagatggaaactttgaccccaaaaaaaaagaaacttagaaagactcagcacacaaataatttttatagaaaatgacccaagttacaaataatgttattaagaatgatacaacgtacgtattatggatgtcggaatccgcaattagaatcttgtggttgtttttacgaggatctttagtcttgttaaacgaacaatgatcaaatcgagaagagaagaatgtgtttgtgaattttgtgtatagtattagtatttcatcaatagtccccctttaccaatgtcatcgactcgtatttatcctcaatacatcgaatcaaacgtattaaaatacttcctgacgtctcgccc

SEQ ID NO: 26568 - DNA, 1774 bp, Arabidopsis thaliana landsberg
  unsure (1)..(1774): unsure at all n locations
tcagatgctctatcgagggaggcaaaacattttctttcaagctattggtttctttgcacaacgtatcctcagcgtattaggtaaggacttctctcatctctgccctacacttgttttgatgtcatttaacagatattttgtttcttttaaacttaactttcagagaaaagactgaaatggctgttcgtctttttgatgcgctgaaattagaaacccaatctcttcgttcaaccatccaggaggcaatagtttctcttgctgctgcatacaaggtctgctactttaacattatatcgataagttatcatttcattttaaattttcgtccttatggtttcattttattttttgcattcttttggtggctcaccatgtcattattggtatttgtttctttaggactccccagagaatattctcagagacttggaggtgcttctgctagcaaattctctggcggtaagtgtgtgtatatatatatatatatatatttttttttttctctctctctttttgtgtattatttcaagatgattttgttaccaaagtatcaggggtttataaagtctagtatctttattgcttctattgaccaggaacaaaatgaagctcgcttttgtgctttacgatgggcaacttctttgtataattcacaacattgtccaagtctctatatttgcatgctgagtgcagcagatccgaagctagatataaggtacaggacatttatctcattgcttattgttgtgattgtggcatgatgaattgcgtaaaatgcatgttgactgtgtctgaagaacgttctccaattcagttttttttttctcccgatagattcgccctatatttatacatatataaaaatatatcaaagctgaaatcgaactgacacatgaaaaaaccctagctacccacacacgaatggagcacaaaactgtttgagctttgtccagtggagggtatacaaagtgggatctattccttctaattttgtagtacttttttgagttcaatctgtattaggttagttgacggactaccaaaacctcttccgttgatctatcatgacagaatcttcaatgcttcatttgtttctggttcttgctatttattgaagtgatgtgtatttattaactttttctgctttcagggaaatagcactcgaaggactctttctgaaagaagaaggtcgcagtatagtctctaatcatgaccataagtacccaaaatttattgagatgctggagtacattctcaagcaacagccaaaactgttagattcttcagaaatgagaagccagaagcttctctttccctcgcaagtctatctggtcatgataaagtttttagtgaagtgttttgagttagagatggaggagagcaatacccaggctgtagggactgaatttttggattcggcacaaaaaatgtgttcgttgttggaacattccttggcattcgaaggctcggctgaactacatgcttgtgcttctaaagcattggtttcagttggctcttaccttccggaggtatgccttcttaaatacttctttatccttttaatttctcccattttctatagcagttcaaatctcttttaagttaagcctctcaccttcctttttttctttgcgtgaagatggttgaactntacttctcccgaaaaattgtgtggctaagaagtctgcttagtcatacagacttgagtactcgtgaatctgtatcancgatacttcggaatggcatcctgtgctctgtctgatgctgaatcatg

SEQ ID NO: 26569 - DNA, 1378 bp, Arabidopsis thaliana landsberg
cgcatctcctaattgaaacaacaaaactacagcacttaggcgaagatagtctaacataccgtttgtaccattctattaaatcatttttggggatcaagcttagctgctgtcttttcttcggagtagaaatcaaatatgcaactgaaaataaatcaaacatagataagttagcgacttcaaacgttgtcatgttgcatgatttcgcatatagaaactatagtatcaaagtttgactaatataatccagggaagttaactctaaatttatgaaaaatattcaaatcattctcgagcgatgaattcattacctttctcgaacaatctcactccattttgtcttcccactatcatgtggcaacttcgaacttacaccatttttgaaatctttaaacattttgtcaaacaaaccttcctataaatataggaccaaataagtgaaatatgaaccaagctaaagaaacttaccaacaacattcatgaaattatagacaaacttaccaagcgaattccattcatgaacttgtagattcgccttaccaaatgacaaggattgtaatctgaagaaacaacgcatacatagaaaccaactccatgtatcaagcgagtttcacattcaactaagtaaccaagcttttcttcgatcctagtagcaaaatagatttgaaactctgtgagtttcagtgcccagcagttgcaagctagcataagtacaaattagactaaaacaaaataaactatttgctttcaacatttaccttagcttattatagacgctatcacttataatggagacaaagagatttaacaatgcagtttgccttgcttcttgggctttttcacacttgattcgaaagtatacctacataacaatgaatttcataagcatataattcatttgtatctttaacaggccaatagtagacaagtttatgttcgtacctttgctagagagttagattcgaacttatttttcacctttacatctgttttacgtttggcacaaggaaatatttccctttctctcaagctcatcggagatattggcagacactgaaagtcatgggtatcacaaaataatattagagtactaaggccagcagaatttccctacatacaaagatactatcacattgttgaatatcaatctgaaagattcaaaaagtctctcacaaggttaagatgcactcacgtggaatatgatatcgcttagctcatcttctagaagatttagaaacatttgaccattaaatgatttttcacaaactcatttttatcattaatatatgttgaagttggcatgtgccaaacctccaccagattaattgcaggtattgatagatataacccatagatgaagatgtggtacaaatttggtcga

SEQ ID NO: 26570 - DNA, 1077 bp, Arabidopsis thaliana landsberg
taaactgcttccaggccgtgggataaagcaagagatgggtttgttatgggtgaaggagctggtgttcttttatgtttcacaaattcttaatctctcattgatactatgaatctacatacatttggcttgctctgttttgaattgtatataagagcctgttttggtcttagtttatacaatctgatgaaacttgtgttccctagtctattagctctggaagtttccttgcacttgaattgtactacattttcaaagttggtttatctcaccatgagattggctcatacatgtgacattttgttttggagagacccactaattgttgtatgccctaataggtgatggaaagcttggaacatgcaatgaaacgtggtgctccaattgtagcagaatatcttggaggtgctgttaattgtgatgctcaccatatgactgatccaagagctgatggtcttggggtttcttcatgcattgaaagatgcctggaagatgctggtgtatcacctgaggaggtaaaaaacacaaccttttcatgcttcctaagttttaaggctatctgaaacaaatttcttcattagattcgtgttacttccctacttatattcattccacgtttttcaggtaaattacatcaatgcacatgcaacttccactcttgctggtgatcttgctgagattaatgccattaaaaaggtattcaagagcacttcagggatcaaaatcaacgccaccaaggttcgtccccaatgctctatgattgagtgttcttcttctcctctatttcaatgtatttgtttgctttgcatttcctgtgaatgacagtttctgttacagtctatgataggtcactgcctctgtgcagctggaggtctagaatccatctccaccgcgaaggctatcaacactggatggctgcatccttccatcaaccaattcgtgcgtatgaccggaagtcaagaaaaggcttttttgattccgctttcagattgaactgttgcaagatttgaacttggtcattggattagactctcacactctttgtgttctcattgcagaacccagaacaagctgtggact

SEQ ID NO: 26571 - DNA, 2994 bp, Arabidopsis thaliana landsberg
  unsure (1)..(2994): unsure at all n locations
atttcaattcttttggcccttaaggtctagtgagtttttattctgtttctttatgggtaaactttatggtatgtaattgataaaagttttgtgatggtgaaatttttgtttaggttcatgtattgagtttgaagatgatgatgaaatggcagtggattatccatgcccgttttgctcagatgattatgatttagttgaattgtgtcaccatatcgatgaggagcatcaactagacgccaacaatggggtaattgcaactcgtatccatctcccaaatcagttactgttctttaaactatacatttgagtttttacatgaagcagttagttgtaaatttagactatttatcgtgtgatgttcattgttgtactctaatggttactttagtaggcaggattgtgattctgtaaggagagttggtagggacttcttggattttagttcacttggattatttgcttgatgctatgaggaaccattttgtagttgtcaagtgtttggtgtgagaaatgaaaacagtcttttggtgatgatgaatgtaataacttctcacaaattcagctttggttgtgatgtagatatgtccggtttgtagcagacgagtgaagatgcatatggttgatcacattaccactcagcatagagatgtcttcaaggtatccttttttatttactcttcttgctttcgttaccatttagtagaaaacttgtaagtctttttgtgcttattctatatcttggtatgttttatatcggttatctgacatttgtgttccttgacgaatacttaccttgaacaaaagcagagactttacaaggatgagtcatattcagcattttctccagggactaggaaatacttacagtctctaatcgatgagccgttgtctactaatcatacatctaaaagtgttctggacccattattatcatttatatacaatccgccgtcaccaaagaagtccaagcttgtacaacctgattcatctagtgaagcaagcatggaagacaatagcttaataagggattcaacagaaaagtaagtaattctttgacattttcttgattctgcttgctttatctcatcttcttaaaccttgtctaaagatacatttcgtatttctgtgtgctcagagactgggaatcgccgtctcccttgtcagatacagagctactagagaaggcaaagaagagagagtttgtacaaggtttaatatcatcagccatatttgatcacatttacaacttctgagtaagaataagaaaagatgtaatacattgtttgaatctttgttgctcttagttaagtctttgtatatgaaactctcgcaaagtagtctgtactctgtagtataagccaatgagcttctgtttatcgtcaaacttctactttgcttctttacagctcataatcctcaagtcacttgaggtcggagtttccttaacaaccacttcttgcgtagtttcacatctagagccaagaaagttttcgccttgagtttatcttcaagcagatcacaagcatccaatataagttcatcgtccatgtctggtaacgcttgaatagcctcaaccgtgtcctctattgacatggtttgggtttcatcaactcgaggctttttcgggtttatagggcttgtatcagtattagcaagttgatctcttttgttcttggggtcaaacaaaagagagttgctatcttcttcctcagctgaaatagacaaatctgtagtaccactggacttaaattcttggaattcagtttcagggtcaaaccaatccatagctacaaagcattcgttttcttcgatcccagaatcgccacagagcacacacagatctttatagtacggaattggccgagtcataaattgccttgcatctctatgagcctgtgattaattcagacaagaacacacatcaaaacagagacgaaaacactgtaactaaccacacagcatagatcagagcgattaagttacctttatatagtcttgccatacattattatcagctgtaaccatttgacgctcattatcccaagcaaacccatctgatcgaagaatactcttgatcgcgttgaactgtcttctcagagacttatactggtttttcaagacatcgacatcaaagttagactcaaatttctcacagacatctcagtccagcttggcccaatatcatcaaatcaatgaaatttcagtccagctgagcagatatagttggaaatttattaaattaatgacagagagtttacaaaatttagacccaaatgaaagaagaagatagctagtatacaaaattagttaataaattaaataaatatgtgaaaacacccttagctcactggctaaagggttaaaggtttgtctaatttgtcgttgtaaatgttttaagtgctaagtttccaacattccacgtattatataacataaggattagtcttagtcaggactttagtttggtatcttcgattataaatttttttttttttgtcttgcataactcttagcttacgcaatgcaagtcaatcatctaaatatccaataattgtttactgtattttcttttattatttattatttatttgtaaagtactgtattatttttctgacgttgaccaaaaaccacacaaaaaaatgcttttaacaaagtaattttttatttttattttaaatactttaaacaaagaattgtgaataagactgtaggaattagcaactagctttaaagaaagaagagttatggttttattagcttttctttataacaaactgaaaacgaaatcacaactatcgacaatgactaattgatgagaagaaaagaaacaaaagaaaacaaatttcttcagactttgtattctaccaaacaagaaatctaagccaaaacattcaaagcgatttctcaagcaaaactagaagatgaaggtaagtattatatggttaagtnatgtgttttatggcttctttattgacgttccacatatatttttt

SEQ ID NO: 26572 - DNA, 745 bp, Arabidopsis thaliana landsberg
ctccatgtttcattattttaacgaaataatattacgtacaaaatttgctggagatgaggagctaggtaccaaattaaatcttataaacattggctctagagttgtcactcttacgtttgcatgtgtattgtttgatactaatcttttgacaatccaacttgatattcttattttgattattaagcccaattgaactgagtctaatgactaatgagtattacctatatagaagctcatgattgatttaattttagttggttgttctaagccttttcttgtgtaagtggaactcaaaccacgtgttcataggtttcacttgtgtatgcactcctgaaaggaggattagactagtagtcttccgtacgcagttctacttctgccattgccactgctacactggctgtcgtttcttctagcggacatagctcccagttcgaactcattcactcgttttttggtttatgttcaaactttctaggtacataatcttaaattttgatccacattcgaatagacacattagacaaggtcgttctcgagtaattcctattttttttccggttcgctaacactttgttctgggtttaaccataccggtttttatttgaaacgaattctattaattttggtttaagttccgggtcggtttcgaaagcactaggagaaactaaaatccctaaattttcatcgttccctctgcttctccgacggctcgataccttttcctctggtcgacgactcaaaa

SEQ ID NO: 26573 - DNA, 1354 bp, Arabidopsis thaliana landsberg
  unsure (1)..(1354): unsure at all n locations
ctttttagttatatatgaaaaacaatttgtctttagttttctatttggttcaaggcggcgattttgaataacggagaggggaatttataaatctacatcgaaagaggaaaaattctatttgactttggttttcaaaggatttttttatacaataaaccaaataagtattcaaaatgaatacgacgcccacctttttttctttatagataaccaaaaaccgtgtactacaatttaggctaattttcaaaacttgtgaaaaaacggtcgattaatatgacacatactttacataataacattcaacacttgcaatggttttactttatcttgtttgtttaaatctaagacctttgtctggagaaaatgatatataaagaaatgggtctaatagagtaattataaagtggaatattttcatactgttattaaccaaaactaaaacataattatactaatattttgtttgttaagtttcactacgactaaactagataagagaaatcaatatggactaatatccacaaacaaatattctttagcccaaaaagtctacaaacgaatatggaccgaagacaatactttgcttctgtttcaggctttgtataatgctttatttcacacaggaatacatacgtataaaaattggtgaatctgaagcatatactttcatagtagttgggttttaggacctaaaatctcaaatgctatcccaatgttaatccaaaattttacaaaatgaggctcaaagttttttggtcaacctttcaatgttcgatactctctgtattcttatcttcagtggaatcaagttctttaacaccactgaatcctagttcagccatatcctgctttgccatcaagttcctgcataataatatcactatcatgatctaaacccatccaacattcctcgatacgagtacgacccaagtaaacatgaactagagagaaactatgatggtgacaaaagtaagaaaaaagacgtacttagccattcgacactggagatatttcttagagagatgtctacattgttcagatttgtgagctgaagacttaagacaaccaagatattctttcttctcctgaaaacaaaaaatgaaagctaaaagtgaataaacagaaatataaccaaacaaaggtcataagaaaatcgtttgttgaagaataccgcatcacactcgtgcaagtgatccaaagggaaaatgcccttctctggtggtattggtcttaatcctctgtttcctccaaatgctccacctgccccccatgaacacgagtaacgattcagatcgaancttatagtgatcatcattaaaacctgtttttcctctcttctaactaaatcaatata

SEQ ID NO: 26574 - DNA, 872 bp, Arabidopsis thaliana landsberg
ggtctctggtgtcctcttcacgtaaatcatcttctttttttttacagcaaaactcatagcatatctagggggcataagatttggttaaaaatgataacccatcccaaaatccccacactcaagccatgaatgcttttttacttctctccgtaagttaagctgttttatttgagccaagcattaactttgacagaaataagacagagtggaggaaacagcaagctgctgagtgtattattttaatggtaaggatttagcacatatatttccgagagggaaaacaaaatggtcagaaagatccttacgtctttgctaggagtggtaaaagtcgtctttgatggcttggataatcaagaaggagaacttcaggaccattggctgcaactgagaaggctcttctcgatagtgagtatctaatagcaacagctaatccgagctgtcatagtaaaaatcttaatcaataacatttagtccagagataatcaagttgatatctgataaaagatgtatgtaaggatgtgaatatagaaataccaaaaattgtacctttgcagaataaattgcacttgaagcaattgtgacacgaccagatgtcaaaggggccaagaatgctccaaatctctgaaacaaatagaatacattgccacaaacatgagaaaatttatcctaagcatttgttccaagttccaaggtatagcatatacctgatcaggatctttaattgagctaacatacttgccatcagctaaaacatcagcaactgagttcaataaattctctcttggaattcgaagattgtcaaacctataaacatggtacaatcttgcatatgaagtgcacaccctttgtacaagataaaaactatgtaacat

SEQ ID NO: 26575 - DNA, 1039 bp, Arabidopsis thaliana landsberg
taagaagatataaacatatataattgaaaactagattgtatgaaaaacctggcgcaaatgtaacacatgtagctgtagagagcattttctgctcccgcataatatatgttaaaagtgcagccgttccaccacccaaagagtgccctacgatctgccaacaaaatgcaggagaattacaatgtatagggctagagacaatctttggtttctcacacaatgggttttaggaaaagttgaaataaagattagagaacgggcaacaaaagtaccttgattttgtaatctggatattgctcaagacccttgagaagacaaggggtggcaagtttagctatacaccgggcagcagcaaccataccacaatgagcataacctaagaccaaattgctgacccctctttcatttacaacagtatgatggaacggtacgattgctccagttgcagcagtcaaggtatctttgatgctatgcgttccacgaatcaataacagaaaatattttgtattgtgatcgacaagaaccgtaaaagctggcttcaatatctacatggtgcaaaattcaaaactaaacttctcaatttctatgttgaaaaagtgcctaagagttgagagttgttaaagtttaccccagctttgggttcatgaataaggacattttcctttgtaaagccggtctcttctaagaaaaacggaaacgacttcttggaaaaatgccaacacaatgtcaacaagtgcaaaagatatttgagttcagtggctacttctgatcctctaagttctacactatctttaccaccaaagacacgatcaacatgtagaagtccctacggttttaggtacacaattacaaaaagttcaattttgaccacaagataattagaaaaaaatccagaacttaagaccgttaaaacgatgttatacctgcctcttgatgagaaaattgatcccaaacgcaagatcaccaataggccacttttcaagagtctcagagtaagtaaaacgaagagtctcagaaagagtagaaatagtctccaaccaag

SEQ ID NO: 26576 - DNA, 1106 bp, Arabidopsis thaliana landsberg
  unsure (1)..(1106): unsure at all n locations
aaaatgtaagtctctgggataaggactaaaccaaacatattagaaccttacaaaacgaagagtagttccttttttaagtttcaaacaaaacaagaaaccttacttaacacctaacgccacaaaagattttctttgcttctgataacaacgtaaactagaacacgcaaaattttgaaactctcctcagacctcagttttcttcttcttcttcttctcactcttttccttcttcttaggaggcatttcagtttcctcttcctcgtgttttctcttcttcttcttctccttctttgcaggctcttcggcggtttcaggttctgcttctgtcttcttcgatttcttctttgaaggctcctcagttttggcttcttcctcatcatcagccttcttcttcttctttttggctttcttctctttcacaccgntctctgaatccactgtgggagtttgaagaagagaatctgcagcagtgttgtaagtctgcacataacaaaaaacagtcaagatcacttcatcataatcccaagaacaaagacaatatgtacacacatccaaaattagaagaaaagatgatgaatcaaaaacagagagaatgatcgtgaccttagcaggagtgataagaccgcctgatcccatctttttatccttgttatagacttcaatcttaggtttgcctttagatgaaccagacagacgacctaaatcttttccttcaagatttctcaaccgcgcttcaagctgtgagtttttaacacatatcagaaacatcatcagttaaggaggccaaagattgttcagagagataccaacaagaggaaagctattgaagaattttgttaccttagctcggttttcaaggcccatagtgttatcttggctatcaccaagagcatcaaccctaatagcaagaacagttttagcagctaaagaccgcgagatctttcccttgtgctttggtgctgcttgaccaaccagagatgcgtgaaaaatcaaaccgtacttgggtgtggcgtgttttgtcttaagagctataaaaagagctttttcggctccgagtatctgaaccgtgctcccaggttgcttggagaggttcaataaactacctc

SEQ ID NO: 26577 - DNA, 252 bp, Arabidopsis thaliana landsberg
atctttactagaaggacgtgatttacttaagaatggccttcgcattctcataggcaatggcaatgagacgaacacatggactgatccatggcttccaacacacccaccaagaccaccgcaaaggcgcaacgaatctatcaccactcatccaacggttcaacacttaatgcacgaaaacacaaggttatggaacaaagaagtcattgaggaactaatagtagaggaagacgccgcgatcatacaaaatatacg

SEQ ID NO: 26578 - DNA, 1253 bp, Arabidopsis thaliana landsberg
tttattatttaactccgtcggttggattcattttaaatttctcttcagggaagaaaaaaacaagagagagaaatagagaatgaagtcttttgcggctaaggtagcagagggagttaaaggaatagacggaaagccgtcggtaggtccggtgtaccggaatcttctgtcggaaaaaggttttcctccgattgattctgagatcaccactgcttgggacattttcaggtatatctctaagactctaaatatatttataaatagttttcttgttagatgttgaatatataaaaagaaaaaaaacaaattatagttagacatatatcaccttttgtgtataattattgcaattaataaactctcttttggggttttatttttagtaaatcagtggagaaattccctgacaataatatgcttggatggcgtcgaattgttgatgagaaggtgagtttcttgaatttttcttattgttacttaacaaaaagaagagaaaatatttatgggttaatacgtatatttgtatggatcggtttaggttggaccgtatttgtggaaaacgtacaaggaagtatacgaagaagttctcttgatcggctcagcgctacgagctggagagtgattcgtatgcgtttagtatattaggttacctcaagactttgtgacagattgtatgaaggattctctgtgataccaaatgggaaactggttatggcctttggcctggtgaacttaattacttagttggttattaggaaaatctgagattgtgtgttttcaagctcatattgaagtttgaatttgctttgactactagtgttagcattcagatggttgagaaaattactgcaaatctgttttttttgggaaccttttttgtttgataaaatacaaatgcaagtctgtttaccacagaattcacgaggtagcatgatgaattctattcttattgatgatctggcactaatgagggcagaggaaggagtgaactttgtaggacaaagacctctttcaggtgaaagcatatgatgtgtaatccttgatgatatttctctagtggtaacaaagttaaagtttgtatcagttgagacaagaaaaagatcatcattcactcattataaaacttgatggcgatatgcttgtttatatttctatttccggaaatttgaactagttctatgataggtgcataaaaatcaaccatttaatttaaattaatttgatggttacccaactgccatgggtcaattaaaaac

SEQ ID NO: 26579 - DNA, 1446 bp, Arabidopsis thaliana landsberg
tttcctgattttaaatgttgggtttgtttgtataatttcaaatgttggggtttaatttgcaatattcccgggtcccggcgactcattctaaaatataatcagaccttcgcgtcttctttaacagttagttccataccatcgtcgcaagctctcatcttcttcagctcaaaaagccatctcaaaggtaaaagtttctcgagtttgtcttctccgtttgattgcttcttcatccctatcgagattcgtatgatttacgttctaatttcgtcagatcgatgaaagatccattgacattctctagagatctgaataaaatattttctgttatcgttcacagttttgatgagatttttgtttggctctgtagatttctaagtttttaattggtttcaatttgccattatgatctatcattctcatagcttcagtaagagatctgatcgttcagtttttcagattgagaatcgaaatttgacttagaggttatgtagattctcttatttttaagatcttccctgatgatctaggactctgttcttagatcttggtgtattcagtgctagttttgtttcttagactaaatgtattagatagatttctcagtttttgttctgtgtgtttgtagtgtgtgggtataacacttaatttatcactattttcaggtatattttgaatcaaaaacaatggcagggactaatgtaagtacatctctaagctcattgcatactgttaagaatcattatattgttgtctgtaaatagtcttgtgatgctttatggtttgttacacttatgagattctttgcattgtggtgtaatataatctcctctgtttgtgtataagatcactatgttaagattgattttttcttgttttgtttgttgagtgggtaagtatgttttcagaaggtgtgacgaatcttaggttcatgcccctattgttctaagattgtttgcatctttcaatctggaagcataattaggctttgttactgtctaagtaacataagttctggtagatttttgtaaacgttcttttgctgctgagaaaattccaattgcttatgaatctgcttttgtgcaatatcatcatttgtttgttgatgcaaaataatttggattctatctgttggagctgccatttgtctggtgtgtcatgtttttgtatgtccttttgttggccaggttgaatttaactaaagcttgtattatcttttgtcctaagtgtttttagcaaatttatgtattagcatttagcaccataggtttgattggcctatctggtcaagccatagatgatgagtattgagtagctgatttagctttttagtttgattggtggcaacaaatactcaagaaacttaggctttgcaccctgtgtaattgtccatatgattggtaatagttggaatggtgatctttatctactttgctgttgtagaagttc

SEQ ID NO: 26580 - DNA, 1095 bp, Arabidopsis thaliana landsberg
cttttgattggttaataatgtttacttagggtatatcagactaaatgatttacccttagtagtaggcaatctaggttcattttgtgtttctttctcgctatcatcaataagatcttctcttttaaaaatattatctattactttcatttttataatatatgctatatgaagaatcaactgaccttttaatttcatagactctgcccacctaatccatatcttattctgtagatattaacctacaaatgaaaaaaacgattatattgcatcagtaaaatatatatatatacaaaatagagttaatcagttttcatgattagtgaaaaacaattctttaaactaagtagtttagtacaacttaagttagtatatttgattaataaactatcccttcttcggagttcaatcaggtaaacaagcccactgttgattaatacacatttgtacatttcggtgggggaaaaaactgtttcattggataatcaatagaaatttgctgaacaaccaaatcaagtataacttcagtgaatcaattcagtttgctatgtacttcgtctaaaaaaacgatattattatacctaataccggttacgatttcttaaaatcttataaacaaccaaatcatatatttagattcaatatcataactcatcttaatgtacttggcctaataaacgaggtttctacgttgggttagttacaattgatattttgtgagctatatttaagctagcaagttattatatcctaacaatatattctagccaacaactatatattctcaaaacattataaacgcgtcagccacagtcaagcaaatcttatgatcttttttctagattacggtgtcttcctaattcttacctgaatccttgaaagttaagaattcacaagcaatttataatatactacattcaattctttgtgattcttatttaaagagtttcgctagctttttcattattaacacaattccttttttgtatactgtaatgcaggatgaggaagataaaagatggtatgtcaaatgaggatccaaagaatgggtctaacaaacgttctatgcctgattttgataatgaaaattgcaatcct

SEQ ID NO: 26581 - DNA, 1685 bp, Arabidopsis thaliana landsberg
ataaatcgacgaggggctaaatgatatgatcttttttgttttctctcacacttttttaagatttttttcttcggctcggacgcagatgactaacagttacgctctgtcaccggcgattatcgccgccgttcgtcctccggcatctcaagactatctagttgctgcttctcttagtggacgcaaatcgatcaactcttcatcttcgtccattttcgtacctatctcattatctacttcctacggtcgaagcaaatgcgccttctcaatctcgcggaagaatccaaaatcgacgattcgttgcgatattgctgtgaaatcggcggcttctgtagacgcggacgctgatctatcgtcatctacgtcgttggagacggaggaagacgagaaagcgaaggagaagattggagctagggttagggttacggttccgttgaaagtttaccatgtggttcgtgtaccggaggttgaattgatgggaatggaaggttttatcaaagattacgtcgttctttggaaaggaaagaaaatctcagctaatctgccgtttaaggtacagttcgtgaaagagatcgaaggtcgtggtcctgtcaaattcttcacgcatcttaaggaagacgagttcgagttaattgatccgtgatgaaacaagaaaggcaatttttgttttcctttctcagtgttgtattttgtttgttgtgtttactggaacctgggaatggagaatgatttgtatgtagtgtgatgtgtattcaacctttagcaatcatatacataagggtttcttcactctctgtttatgttgatttgattcattggcttgatcttgttattggtttcttagtgttcgatagattggaagaaacgaaaagttggatctagatgtggtttcttgatgattaataagggcaattttaggctgcggttgtttcaaatgattccattagcaagatcaagatccaatttgggataacacctagtttactatgtttgctgtttaagactagtatcattgaagtatcttgaattgaaagggtggatcttggtcatgatggtaagggtgattagggagtggagctcagactctctactagattgagttagcacttgagatgttacatagtgtggatcgtacttgaggagtcttagagaaacagttccttaggtattcagatgattttcctatatgcaaatctgtgttgtctctgtttggttcatgtgtctttagcttataaaatatgtttgattttgaatcaaaggtaaactattgtcattctcctcttctgtcttttctagtatttgtgaattcagcagcttcgtggctgtggtattggtgatgatctttatgctacgtcgtatcgtggtcgcatttcgtcctagtgagacagaggagaaggcaatctagattcgtagtcgtcatcaatcgcatttttatctaggagatgattgagctgcgattgttagtctttgaaaccttgtgaatttcaagcttttgttgttgatagagtatataagcttaaagtctctaaaggaaagtgctccaaaatatgtcatccttatggttagttcgtgggtcagattaggcccgtttttcgttcgtgggtcagattctaggcccgtaacggtttagatattcctattctcataaactttaaaacaagatttttaggtaagaaagcaagtcgtct

SEQ ID NO: 26582 - DNA, 908 bp, Arabidopsis thaliana landsberg
gtctaatcagcatgaaatgaaaaccagtgtaaagtataacaaacacaagaaaggttaatctcacaatcgactgtagaggtattcctcgtttagcttcttcatatgccactgcacgtagttcttcatagctgatatcaccggtagcatcacatggaaaactagaagaaaaaaaagatagaaaaaatcagacacgtttataaagaatgaataaagatcaaggatgctgaaccaaatgaagtaatacatactatttccagtggccgtagcatgtgagcttccacatgggtctctcattcttaaaatcgtcttgcattacccgcttacacgcagcaggatctgtgcatctttgtatagtaaccaagagagaaacagtaaatttccaaagaaacaaacggctaaaaggttgataattgatagaacaagcatatgtaaacatatatacactcacttatgatctgccggctgcgtctgtttaccagtctgctgtgtagaagcagcagcaccaccaccagtaggtgtagaagccgttcgtgaccaagtattctgatttgcaaaagcatcatcatgtcaccattcattcaacaggcaaaatgctttcgtttcttaaagaagatgcaccatttttctcatccaaagccgaacgataacttgcattctatcaaagcaatacttgcatcttaaaagaggaaaaaaacaaattgacctggaactgattcggtctgctggaaccaccactttgtacaccaaatccaaaagggatcgaactattttgttgctgctgctgctgttgttgttgttggttttgtgtaccaaagccaaagggattatttggcttagcttgttgtggatgaagaaatctacagttttccccatacctacaactgcaaaaacagcacaaaggtcgatga

SEQ ID NO: 26583 - DNA, 1458 bp, Arabidopsis thaliana landsberg
tctagacttctatataatgacttcacatttcacatctgtcaatctttttcaaactaaaggaccttatcaattttcccctcttcaatcacatgatcctagaaaaaacagaaaatccaaagaaccacaacaatagagaaaattgcaaagacaaagcagtgagggaaaatgaaggaactaacagtaaaacccctagctggataacttaagacaatttcaatagaatccaatctagatcataatgacctcaaaacccgaaaacagcaatctataatcattctagattagcgattttgaaacacggaaagcaaaagaggactaactttgagctcctcccagaaacttctctctctcagtacattccccagatgccgaatcgccggacaggtctcgcttattctccgtcgcactcgaaacttcaccaccggcggtcccaaaattcgaaaccagaaagtgtctctgtcttcgcctccatctctttcgtccagtgctaatttaaattttcgacgatttgattaaaaatgtttgtgagcccaagcccattagacttgtgattagtctttttggcattttgtttacaacatgtggtgcatgcatggtgaatgattaatatgaacatggtgcgttattaactcaacaataaggaatcaaactgtaatattttcttgttagatatgcaatttagtgataatttatccatggtaagttaggtgaccgggtcaaaaccattattggatcaacatcttccatcttttttttctgatatcagctatcatcacacattgtaagaaataattcaacaacccttttctttttgtataatgattagttagacaactactttttatgcatatataaatataaactcatctggtactcaattatcaattcataatcataggtcatgttcaatgtattgaaatctctaatcagacttggatacatatcattgtgtttgtgtgcagtgactctaacaacttattgaccttttctcttaaggatgtcatttttgaccaacaatataggaacttaactcaattcatcattgttaggaaagagttctaattactcttcactcgtcacttgtctcttcgtatctatctcttcttggttgtctcttagaattcatgaactgtgttgtgtgtataagttaatcttgtttctcatgaatgataagtatctttctccataatcattacactacatattctgaatagtttcttacatattaatttactaccaaattttgtgttttttatttgcaactattacaaattttgaatctttccttttagataatattttatttattaacgtaatacaccttatccaaacaaatgtactatcttaaagtggtcttcacatcgatcttttattctttttttttttttatatgcattagatctttcttcttcttttttgacagcagatgttgtattagtttatacatttcttaataca

SEQ ID NO: 26584 - DNA, 1189 bp, Arabidopsis thaliana landsberg
  unsure (1)..(1189): unsure at all n locations
gggccgaaagtgaaagatgagcccaaaacaattggcaatatttgtaatccctaaattaattacgtacagctgggggtgggtatcgaaatcggcgacgacgatgatgatctctcgtcgatgggtttcaaaattccttaaaccctcgtcttatgcatctttccacgtctctcgccgccatctccaatcttccttatctctcataagaaaccatctgacccacggatcattaactaaggagcttggtctcttaacatccttttctgtttgacaatatcgaccaacttatatctgaaacatggtcaccgaggtttttctcgacaccaagcggagagaccgagcccaacaagccagaggaatcgaaggaannnnnnnnnnnnnnnnnnnnnnnnnnnnnnnncgaaggaccaactgtggaacgcgatttgtcagcgttaggaaatgagacgagacaagtgttggaagggatgatgaagaatatgtatagtctaagtggagctatgggtgctttgggtttaactcaattgattcttggagcggcgattttatacgccactcgagcagatccgatgaaggaaatgacaattcagagctgtatagctttcggattcccgtttgcgatggcgttgatggtgagaagatcgttgaagccaatgtacttcttcaagaagatggaagagttaggtaggctgcagattcttactttgacacttcaagttgctaagaatctcaatctgttgttcgttagagctcgtgttgtttccatcttgtgcgttgttgccttgtgtttcggtaacttgttcctcttgttatcaccatgagagcttgaaatacaatattttttgtctttcttttttcattaataaccaaacgattgaagaagcatgaaagtcaatacaagtgaaagtttggagtagctttatagagccaaaaaaaaaaacaattgagaataatatccgataaggtagatgataaaactcatcttcctttgttttacctaagctcttgcttctctttctaatcaatcaatcgttggcaactccgtctgattttgattctgctctgacatacgtgagactacgagcattgttgggagctacattgttgttgtttcctgtgtcagctgaatcacgcttccattgcatactcctgcctccacctcaaacaaaagaacgacccctaactgcaccac

SEQ ID NO: 26585 - DNA, 2261 bp, Arabidopsis thaliana landsberg
gcccgttcctaagctccagatttctaaattagctgcatcgccatagctttgtcgtaatagtgtaccgcgtattgcagcctaatcagattctctcaatgttcacaatctcattgtagcaaatagttgatgtcactgatttagatgccgaaaaagaaagagtgcaattgaaaaagattttcagaaacttacataacctttgcacttcttcccaactaacaaatgttggaggaccaacacgttttcttgcattctcatctatttcgtcactctcatcatcctcatcctcattatcctcatctttctccatgaagtactcattgtacaacttatcttcagccaacattttttcaaatgcacccctacacttgatcgcagctgtgagcataagataggtggaattccatctagtgacaacatcaagacataagcttcctctagttgcatttcctgactccaccctcgatttaaaagacttgagtctatcacccgatgacctcacgtacttgattgcattccgaatagccattatactatgcttagccttagctagcccatttttgactatcaaattcaagatgtgagcacaacaacgcatgtgaagatagtcaccatatttgactagtgcatcaggatctcgcaatatcaaattatctatgaacaaccgcaaagctttgtcattaccttttgcattatctactgtgactgtgaagaccttcttgatatcccattcatctaaacagccgatcaaatgtgtagctattgtatctcccttgtgatgaaggacgggtttgaagctgataatttgtttctgcaacttccaatcattatcaacctagtgagctgtcaccaccatgtaactacacgcagttgtcctagctacccatatatctgttgtcaatgagactctctgtttttgcttaccaaacaactctttcaaagcagctttctcttgcaaatacaatccataacaatctttagtagctgtcgtcctacaatgaagctgatacattgggagattgttagcacagaatctcctaaaccccaatgactccacgaatgcaaaaggcagctcacaaagcactaacatctcattaacagatcttctaaacaaccatttattatacttgattgctgtcattacaccactgctatcaccagctatgattttctgtttatcactctcttcatacatcttgaataacttgcaccttttgatgtgattggtcatttcacttgttccacttttaaccgagtcgcatccaatctctgttttacaatagcgacagttgcttaacgctagattgtttggcttttgatcaaaatgcttccacacaacagctctatgagctggccttttcctctgtttgactggaatactagagcttgatctctgagattttgttcttttacctctaactgaagagggaggtggaccatctttgtctccatcaatctcttcaccaagaatgtcttcattgttgttttcatatgatagagaatccatctgcaattaaagacatgacaacaaacaaacgcattagcaataaaaagaataacacatacaatggaaacaagttaaccatgataataaattcacccatcagcataagataaacaaagttatcaagctactagtactaaacatctttctattgtcgacaatttttttatttatccatctgtttttttttcttctctacctaatcaaatactatatgaactaaggactatataaaaacagtaatgttaaaattgatacttttcacattatagatggacaatagcaagtttagcaacacgtacggttacatgtttatacccaaaatatattctaaaaattattgagtctttaataaatgggatatattcaaaacgccatgcttgttttgacaagatgatgtatacaaaacaaacaacgcataatgtcacaattcaagacaagatgatgtgttgttgagacatttctttatttattcttcagcaaattgactttaaattaagattcaaaactagaaagatcattgtctttttgagtatccgtgcaacatgagaaagaagcagagagactaaagagagaaaaagatttagagatggagaattggccgatcaagtttctataaaaaccctaaatcttctaatcaagataatatatgtgtgtctatgcctccaacagagaaaaaaaatgatcttttatcattcaatttgataaacatactcctttgccctttcaaaaaaattattagatttcattagtgtaaaga

SEQ ID NO: 26586 - DNA, 644 bp, Arabidopsis thaliana landsberg
agcatttctgctccatagtacgctccccaacttgcaacctaacaaaacgtctcaatttagttccatcatgtaagtattgtagtttcaataagaaagtcaagaaagtataaaacattaccccacaaccagtgtccaaagcagtcctaacagttccgttctccataggtatcacggaagcaagctgatcgatatacttatcagcaccttgagggaactgagttccaccaccagggaatctaaaaacgtctccctcatactgaatccaattctgaatagccttctcaacagtcaatgctttatacggcgcattagcataaggcacatagtctcgactcttaggccaagagaaaggtgtcacatatcctttaggagccggtataagacaatggagcttctcattctcaggagcgcaatgcctttctcggtaaatcatactatctctcgggaaagtcatggcacgtctctgatcttgacaaggagtgtaatccgtgtaacgaccatcacagggctcgaaagccttgacctttgcagcttcagaagcaccaacaagacttgattcgccagcgtgatgagtctcgaaattcaagctaggaacaatgttgcaatcagctccactgttggtcatctcaagagcaatactgtct

SEQ ID NO: 26587 - DNA, 1909 bp, Arabidopsis thaliana landsberg
gggccccaaaaccactcaacatgacccggaggaaaccgtaaagtttgtggttcgctggctcaaacaaaaaacggggaagggggagaattaatgccctgaatctggagcagcacaacacagatccttggctgaggtccacactaccaaggataaatcattaacaaacagtatccctttagcttcaaacaatcaacctgggatcttctcaaacaatcaatcttccgatttttccagttttcagtctggtttcttttcaagccaatctggagcattctccagcagtccttctggtttaatatccaatagccagactggatcttttagcagtggccagtttggtacgacaaaaagcagccaaccaagcctattttccggcagtcaagccggagcaatctctaatagccaacctggaactttctccagcagtcattctggtataacatctagtagccagacgggatcttttagtagtggccaatttggtcagacaaaaagcagccaaccaagcctactttccggcagtcaagcaggagtaatctctagtagccaaccttcttttcaattttctaacagtcaatccccttttacatctgcaggtatctacttttctataagcagaatacatttattggacttgtcattgaccagctttgtatcttgagaacaattgtttaagagacctaacctctactttccttgtttgctggtatcagtacctccagtgtccataccggcaaagcaggatcactcagatgatgcggatggtggtgagttggtcatatctgttttcttcctattttggtttcgggtttctttgaaaggttatatttggatttggaaaaccacttcaatttttttcaaaccacgatcttgaatccttgaggaaataatatattacaaatcttgaggcataaaggcctagtaaacattaggttcgtttgacttggcaggagacgaacaatcttaaccgagcagcccatctgtcaaaaagacggaagaaaagggtattactgtggttcatgaagtcaaatgcaaactttatgtcaaggtattcatccttagagtcctcttaggtgtcatagtgcttgtgaagaagattctttttctctactttagttaccttgacattctgttattactgttgacgatgtaagctctgtatccatgatattgtgcagtcaagtgacccagcagataaagggtggaaagataaaggaactgggaatctctacataaaatgcaaagaaggagtcgacaaggggacaaaagaatcaaaacccacaattcttgtccgaaacgatgtatgactcagtagacacactttacattctacttgttctacagatttccaacattatgaaccccttttcttgccaggttggaaaactgcttctgaatgcactactgtacgctggaatgaagacaagcccacagaagaacgctcttgttgcaatatttcactcctcggtaaattaaacgcactaaagcttctttagcattttcatgttcgttttgtagtttcactgattttgcctacctgcaacaggatgattccaatgagaatgtaacaccgagaacctttctgataaggacaaagaacgcagaagctagagataatttagcaacggccatccaagaatacgccccttcttcatagattgcccaaagccaggttgagatcttcactgtaacttttaaaagccttatcgagtcgtcctctctctatatttttttcctgatttgtaatattaggaagggtcttaagagtaacgtaaagcttgataaagggcacaaaaatgttgtatgattgtgagagagagagagggccaaacgcagttcgtagcttattagagaatgttgagccaatattctttgtaacttaaaaaccagaaacaataaaatcagttct

SEQ ID NO: 26588 - DNA, 1686 bp, Arabidopsis thaliana landsberg
  unsure (1)..(1686): unsure at all n locations
tttagcagttatggcaagtgactttgcctcctttgcctccctcctagcttcttgcaacttcttggttatctctgtgcctttctcctctcttgtgtcttctctgtatctctgtttggtttccgataaatcttgcttctctctcgcgagttcggactgcaatgatccgacaattatcttcaaagttttcacctcggaatttgctttctctatgttggatataacttcttcaagctccttcctcgcggagtcaaccgctgcttgtatgtcactattgtttctctttcccatgtttgagtctttgtaagcagctatctcggctctcaaatcttgttgtagtgcagaagcagtctttagttttgttttgacatcatctgccgcatcaatatcttgtctaaacctcttaatctcatcttccaccattttgagttccttctcctggttataaacgtcctggtctcgagccatggctgcatcgagtttcttttcttgagcttcaagatgagtcgcatgagctgactccaataactgcttggttgcaatgacctccatagtcaaaccctccattcgtttctctacatctttagctttcaaaacagagtcctcttcttttttagcagccaaatctttctccgtcaaaagagattcatactcattggacaccatttctatctcttctcttatggttcctagctcagacaccgctgacaaatgcctcgctttagccacctcgagctgcgatttcgctgcaacacttacctcaccagctatcccttgctccatttcttccacacgcagcttcgcgagatcagaatcttgtttcgcttgttgctcttctttttcagccttttctagctccagttttagctcttcgacgacattccttgtcctctcaagctccatcaccacctgatgctttgcttcttccgctacaactgcttgtttcttgtagtcaggcatatcttcttgtatcttctcaagctcttgatccaccgtcttccgtctctagagacaattataaaacacaagactaagaacaagaccggcctgactaagaaatgaaaatgtaggaaaaaacactttttgtacctctattgtttggattttatgtgctttccaatctgtgattccaccaaacttagttaccacttccttgaccgattcaaacggtgcagcggtatcgatcaagacaggacttgtcggtgacacgaaacgcggggatccagatgatctcggatgcacaaaagctcttggtgagccaggaactttaagacgtgaaagaccaagatcttgaattcctccaggtgagccaggcaatatctttacatcttcgatatattcatcgtttcgagagtctagcgaaaacgagtcttgatggtttatcatgactcttggtgcaatatacacctttggagactctggttcaacaacaaaatgtgaatcttcttcttcttcttgaagtccatcgaaagaatcaaaaaacggattatggtcaggtataagatttggtgtatctccaccggtttccaagtttaggagatcacaaatcgatgaatcgaattcgatactagtaaaaggcgaggaagaatcgaaataagatcgggaagtaactaatgtcattggaaacttatgatcatcatccatcattgtcacagaatctcacanacagaactgcattaaaaaaaaaat

SEQ ID NO: 26589 - DNA, 1285 bp, Arabidopsis thaliana landsberg
ctccatcgccgatcttatttcttccattgtcttactaaatgtcaccggaaaaaagaacccaatttgaaattgcaagcggtggtaactaaaatactcacactccaagtaaccaaaaccctatcgcttcttcgattccagttctcaacttttctcgccaagatttttaacgagtttcttctgcgcttaaaagctctcgaagttgccaggaaaagaaaaaaatgtaatcaccaacttcccagaatacccttatagtttcatatttttacggtaatgccactgagataacatactaatatttcggattattcagagtaatatgattttccaggaacatctaaacttatactcaaaccaaacgatttgatcttcgatcaaagtcagttttaatgaaaggattctccgaaataataagacaaaaaatgagtttgagcgattccactcctttcctttatgaaaactctacataattactatgcttatgataaaaaaaatttatttgattattaacattctcaataatcgatatgggtggcagatagaagaattagtgaatagagatgttgagaaagaaagcaacttcaggatgtggatgttgttgtgggtcgttgcttcttacggaagatgtagtttaggagcatcccaagtaaagggaaacttgtaaccatgcctatgtaaccaagccaccataccgactgttttgtctgcctacacagctctttaaagcttttctttgttacatcttcctcaggctttcgccctctctgcttcagtgtggtcttattggtgtcttgctcatatttgactgctgccaccaacccgtcttctgcaatgtttaggtacgggccttggtttatcgatggctcttgtttccctgaccctgagcttcttttatctacaatctgcaaaaaaattgataatcttaggaagaaagaaatagagagaagagttaaattatctaaactgcaattctaataaacggaaacttactttctgtatatgcatataaggactgcagctaaggacgccaagaaactcgttggtggctcgaacccacctatacacaacaacatatataggcagtcaaaataggaagtactattattacttagttacaatctgaaatataccaaccataagctagatccagttaatccttcgaagaacgctagatgtcccccgtgatttgttgtagccaagacaatgtttttgttggcccttttcatagaaacttcatgttaatcgctgtacaggatttaagatttaaaagagatagaagcgtttacct

SEQ ID NO: 26590 - DNA, 988 bp, Arabidopsis thaliana landsberg
  unsure (1)..(988): unsure at all n locations
tagaatttgcaatacgtaaaccatgtgacctaaacgaattagctaattccgtacagaaactctttgaacctataattacgtaggaaaaaaggacacataataactaaaacgcatagagactctgtataactaatttactaaggtactggagtctagttggatagaagaatatcataaatttttgcaaaacttagatgttgatgtggcaaattaagcatcataattaaagttgttcggtaaaagaatctcatgtatgtaaggtaccgaccatatatatatgacccattaaggtcatgtaaactatagctctaagctatcttatagtgaaagagtttatgatcgatctatagacttttggtcgtaattgacacccctatttataagatacaatgatgtgctagatttagtaattttcatattttaatggtaatagaattgtgattatataaaagtcgtcgtagctgtttgatataagtcagacatattgaattggaacttagcacctcctatagggccattgggccaaaaactgggacaagaaccgagaaaaccaaaaagacataacgtgtaagctttaaggccgaaacaaagaacacacgagtgtcaaatgtgtttgaataacgattaacgactgattaaaggaaatgtttcaaaaggatatccactagaatcttctagttgactagcgacttaagtccatccacatggcagccttttggtctctcaacggtcaaaaaccgacgatttctccaattttcagtaaaaatcttattaaacaaaaggtcaaatcgaaagataaacgtaagcgactcgtcacaaatgtttcaacgttaccgacacgtaaccaaaactcaccgaacaccgtccttcacgtttgtttataaaatgagagatagataaatatagagagagtcgnctctttgtataatatatgatctgaaaaagaaaaaaaaactctttagctgtttatatttagaggtgagactaa

SEQ ID NO: 26591 - DNA, 1119 bp, Arabidopsis thaliana landsberg
  unsure (1)..(1119): unsure at all n locations
ttctcgtttacggtacatttttaggttatgttccatcattatatttaaatattcaaacgattatctgatcacgaatcagatccatcttaaatgatactatatcatttattattatttttttacacgatactaaatcatactaatgcatactatttttgtatagcaatttgtaaatcagttataagaatgaaaaaatctccactttgttgggaatgatatcgggttgtcagatgcagcagatgatgattcttcagttttcgatttcaacataaaattctttggttaaaaaagcaatttacaagagaaaaaaaaaggttgagaattttcataaaaactgaaaagcaccttcgccagaaggaaagtcagtgggggtaagcaacaaaagtatttaataaaatctactatatagaattatacataaaaacttccaaaaatgaataatacgaaatttaagatagtgagaaacaaaaaaacagtaaaataaaataaaaaaggaatgaagtcgttctcagatcggctttgagaagcgtgccatacgctaaggcttgatgtcaactgagatccaattaatcatcctgacttatttcttatctatctatatacgtttgttcctccaccatttgttatatatacacacacacacacatgtattaatgtattaaccgttctcgttatgagtctgtgttaatttaaatctgaccagaaaattttacagaataaaatactgctccctggattctgacatatctcatgtggatgtggggtaatcttataaatcatagtcctctctctctctcttattataatattttggttaagtaaccgtttttcttggattgaagaaaacactttcgttaattagtgcaacaaaaccagttgataatcttttactccagctattatatgaaacctaattgacctttttcacatacaaaagtgttgattatgaaatgaatacaataataatggtggaaaaaatggaatactcgttgttgtgcttgtgagacgaccggttcatgaaccttgctttgtcgcgtaacgcgttatgccttctttgcctttagtggatctgaacaccaatagatgtnagccacgtgtttacaacanacatgatctgga

SEQ ID NO: 26592 - DNA, 864 bp, Arabidopsis thaliana landsberg
cgcagcgatcaagtgcagcacgatgccatagattccgatccaaaacctagaaaggattcgtcccaaatttgctactttcctaataacttaaacgtctattcgaagcttttccatctcaaccttcaacgtcattctcaacaaaagtatcatacaatgtgattcatattatctcttcttaatgacatttctatacgcatcgaggatggttggcgccgatctgttttaaatgcaaagatctgtgtctaagaaacttacaaaatttccgatatctcgtaactactcaatgaaggagacaaaccaagagcgtttccggcgacaatggctacgtttctttgtgacgaaagcttcatgtccagctacggtcataaacacacaggtctgtttgccacatgtacactttgattccaaattccttgctgagattctacaaaagaaacggctcgctaaaagatgctcacaaggtgtttgacgaaatgcctgatccagatgtgatataatcagggaatgaagatattgaaattctggtttttacgttggaggaagaagaagactccctctgtttgtttcttctaaagaagctacagagatctgatgaatccaacggtagccattggatcgctcttcaagatgctttaagaaaccggttcttcatccgttaattaattaattagagcttcagatcggacgattaatcataaaacacgaattatcggcccaattattattaatggccagcccacataaaacaaaaacacaaatgaatcggcacatgccgataccagcggggttttttcttaaaaagtccgcgttcccggtccaaagagccacattttcggtcactaatgttataaaaaaaattgtgat

SEQ ID NO: 26593 - DNA, 1834 bp, Arabidopsis thaliana landsberg
ggtttattaagaaattttcgcagcttcatttggttccctttatgataatttaaacccaaagctaaggtaaggggttcggattccccatcttctcttttctttaatcaaaaaacaaggtaataaaggttccttaaatattgtcttaaaatactatcgtagtaactagtaaggtggaataatatagtgtaactttggagcttgaggtcgtcggtgatgtgctggtacgaagagacacgtggcgctcaatcatttgaaaataatttagtttttttctttcttttggaatatgggaaccaccaacggcaacattattaattccatagattcggagttaattgagcgggttgcacgaaccacaccacacaccagatgccgaataaaattttatgcataagctaagcgaataatcaatgcatagttaaactttataagactgatatttaacgactggattatcacaactaagaggcgttttatttgttttaaacattttaattaagttattaatggtttgcgactcaagacgataggaaacgaccatctttttctactcatgaatatttgaaagaatattgttcttgcgacaactgatcaagctactatctttgaaaagaacgttcttctgccagtctactgaagaataactcaaaaaatgcacttggggctcactgatttttaacaacatttctttttatatacatcctttgaaagaaaactgactcgtagcaaaaactagactaggaaactgaaaaaaaaaaaaaaaaaattaagaggaagactaggaaaactgaaaaagaaagctttgattaaaccagcatgcaacacaacttaatcatatgaattactttgtttttttccacattagttgccgtctgattaatttaacacatttgaaactatagtcatctttttgaagaaaaagttcactaataaaaacagagaaaatccatttaaaaaaaaaagacattttaaaagaatatcgagtaggatttttaatgtaaactttatataaattttataatataacatcaaatcgaaactaattttaaaaactaactttattttataaaagatacagtataatgaaagtgtataaacgaattttgttgtggatcaacatgaaaattaattagtttgtcaacagctattcatatagttaaatgatacaagtaatgataaacaaataaacgcatgttccccgttaacaatttttacgtctccatgcttagtggcgctaatcacctttttggttcgctcaagtcaaattattttgaccaagttgtcggtcgagctagctcgaaggtaacaaatagttaggcccactttgaaaatgtcggtgctcggaaaaaagataaaccgctaaattaaaccggtcatcatgaaactccggaaacctgaattactgccaaatttatggttgtaggcactgcacacgtgtaggtgtctcttagtccccattgtcatacccctcagtttttattggtggtgggcaaacttatattaagatgacccaggtccatctttcaaacccatttagatccatcctatatttttgaatgtttggtgtttttgctttagatatcaatagaggtgaataaattagtattcatactctgcagatttgagtttaacatttgtgatagtttttgtaaactttataatttgtaacagtgaacccagccaaaaccaaagttttgatttgagaaattagccttactattcacgattctctcgcctaacacagcagccttaacgacagaaacagaaacgaatctctgcctagcaatgacattctacggttccgaaaatttattagtattaattgggaccgttt

SEQ ID NO: 26594 - DNA, 2263 bp, Arabidopsis thaliana landsberg
gtcaccctttttacacatgaaatgaagattattaaaataaatagattacttagaaatcaccaaattaacattaagaaatattggtaggtaggaagtgaaaattgaacacaagaaaagtgtgagcaccctcttctcctttcagactgcttaaccaaaggaatgtagcactcttctaattcttctttttgttgaaataaaattattactctttaattttcatcttctttgcgtttttctctctatctcttttttttgttccattagatcattcataaagcggatcaagccaccttgattgtgactttcctcagttcttgatcactatatcttgaaggaattaagaagatgaatggtgaggcacggtctcgagtagtcgaccaagaagctggttcaactccatctactttgagagatgaagatcatccgtcgagacaaaggcttttcggatgtctcccttatgatatagatctcaatcccctacgcattgtaagcttcatatatacacaaaatcatagaatcaacaagattaatatctcacaatacttttgtgttaaactaaagaattggctatgtccataattacaaataatttttttgaaaatattaaaatgtttgtatagaaataaaatgctaattaatagtatcgccggactaatgtttaggtaatggcggaattggtggggacattcattctaatgttcagtgtgtgtggggtcataagcagtacccaattatccggcggccacgtgggattgctagagtacgccgtcaccgctggattatctgtggtggtcgtagtttactccatcggacacatctctggcgcccatcttaacccttccatcaccattgctttcgctgtctttggcggattcccgtggtctcaggtataatgcatccatctcaacacggcgtttgaccaactaagaattgtagttgaattatcttggtcttgatcgtttgtttttgtttatcttagcgtttagaccaagatcaaataatgtggttttttcatttatcaacgaagatgagacgagaaaacttaatcttttgtttggacgtttacaaattattttttatgaaaactgaaaattcttttttggaatgttgtgtcacatgccaggttccgttgtatataacggcgcaaacattgggggcaacggcggcaacattagttggggtgtcagtgtacggagtaaacgctgacattatggcaacaaaacctgctttaagctgcgtttctgcatttttcgttgaactcatagctacgagcatcgtcgtgtttctcgcctccgcgttgcattgtggtcctcatcaaaatgtaagtgaccaaatcgatcttcgttactcttctagtcggcttgttataaaaaaaaaagtatcttctaacaaaaataacgcctaaaatgtgacatttacatactatttcttatgaaattttctttcttaccaaaaggaaaataaaaaatcaaactctctgattagaaaacgtatatgcatataaattatatgttattttgtgcagttgggtaacttgacggggttcgtgattggaacagtcatttcccttggagtgcttattaccgggtacttaccttaaaactccattatcaccgtaaagtatggaaaatagttatttcatgtgatcgtataatgctaacgttttgtggaatatggtatgggttagaccgatttcaggaggatcgatgaacccagctcgatcacttggaccggcggtggtggcatgggattttgaagacttatggatttacatgacagctccggtgatcggagcccataatcggagttttgacatacagatcaattagcctaaaaaccaggccttgcccttctccagtttccccttccgtttcttcacttttacgttaatcacttcaaaacctaatatctattatacaaataaacacttatgatttttattcttggttaaggtttttaagtttttgtcattacgtcattagatgccgtgatgcgaaaacagagagctacttatcggattgaagatatagagggtaaagcaaatgaaacacagggggcattttgttctttttacacaatgaaatgaacgcaattaaaaatctttagtcacatatattttatagtgaagcgaaattcgtatgaatattcaaatcctttcattaggttataagaacccactaaaatactcatattactaaacgataccaacaaacataaattagagaaatgaaattaaatatcttaaattattaccccaactaaa

SEQ ID NO: 26595 - DNA, 211 bp, Arabidopsis thaliana landsberg
  unsure (1)..(211): unsure at all n locations
aggaagagggggggaacaagcacacccggagagcgcaggacaacggagagcagcacgccgcgcccgggaaggaagaaccgcacccgaaaaggaagccagggacacncgcccaaccggacggaccacaggagcgacgacacaccncacgggcgaggacccaggcacaaaaccaggacggcccagccgcgccaaggaaaagaacacaagaagg

SEQ ID NO: 26596 - DNA, 472 bp, Arabidopsis thaliana landsberg
actgaatgtgtccttggtcacgatgtctccaatataaactctttttgcgtaggttttgttgctttttgcagttccccgtcagagtaaaattattttcaaatacttgttcaaaaatatttacaaatgcttcttcaaacgctacgtcgatattatcacgcgaggatgatgccatttttttaggataaaagatgagccctagaatcaagtagaaaatatggttacttggattaagatagaaaagatggaattttgtattaagtatacagcttttgtttcatagagagagagtttgtggaataagaaatatgagagaaagagtttgtagaagaagcgagacttgtgcacggggcatacgaaatatgagatatagagtttgtggatgaagaaatatgagataaagagtttgtggaatcagagagaatgagattaagagtgtcacgcatggtcaaatatatagtaaaaaaaagcatta

SEQ ID NO: 26597 - DNA, 1476 bp, Arabidopsis thaliana landsberg
aatggatcgtaaatgagagattcgaaaatatagtgtgagcttccttctttggtttatgcattctccatgtggggggcaaggtttttgaagatttatacttttgtggcaaatctcttgtttgaatactccatgggagtctctcatcaaaactatgctgcaaaatatttgaaaatttataaatctattgtctttgagaaagtgttacaaaatttatgacctcaataatattgcatgaaaactttcatacatcatttggtatatgtatgtttaagaaaaggtaaaaccgtaattataaagagaaagaaaatacaatatcttaatacatatcaatctaattactcattaaccatattaagaaaatatttgtctttattttttccttttaacataaagcttaaaaagaagatttgtagccagaaaaattatttgtgttcatttcccttttaaaagaatttttcggcgcaacaaaatcgtgaaattgatataaataaactcgagattatttatataaccctttttcacttcacttctctttctctctaaaccctaaaagaagaacgatgccggctccgacgacggagatcgaacccatcgaagcacagtcactgaaaaagctcagtctcaaatccctcaaacgatcacttgaactcttctctcccgtccatggccaattccctcctcctgacccggaagcgttagtcttcttcgatccccaattttcgattcgaatcttcattttcttcactaagtttttatgatttcttcgttttttttttttttttgcagcaagcagattcgtctcagccataaggtaaaacattgagtctctcttaccagtctttagaaatttatttcagttattcgcttttaatgtctattgattggattttggtttaaagcttcgaactttaggtttattcaggtttttccataattgttctaaatcttcaggttttgttaccaataatagtaaagatggttgatttacttagactctctctctctctctgttgtgtatgttactgattttagaagttttctttgtacagatgaaagttgcgtttggaggtgtagaacctgttgtgagtcaacctccacgtcaacctgaccgcatcaatgagcagccaggaccttcaaatgctcttgccctcgcaggtgtttttcatatcactatgtcttggtgaaagataaaaacttgtttcttgtttgctatttgcattcttatttgtattggaagggataaaatcatctgcttgatgaattctgcagctcctgaagggtctaagagtacgcaaaagggtgcgacagagagtgctattgttgttggtccaactttactgcgtccaatactgcctaaaggcttgtaagtgttatcttttgttgttggtttcgttgatctgaatgctaattgatggttctactttatcgtgaggatgctcataaaagaattcggttctcgaattgaaggaactatac

SEQ ID NO: 26598 - DNA, 1036 bp, Arabidopsis thaliana landsberg
acccttctcagtcagcccaacacccaggccaaactatccccaattcggctttgtcaccatctcgtagtgtcgacacctcgctacatctctgaccatcattccgggtttttttttgggccatacctctcgtgggcttcctccctgcttacgtgacaatctttggttggttccggactacaggtgtgggatccgacaccaacagtgtctacccccacataatgattagtcttttaagatttatctaaaaaaagtagagaagagtaagaaagtgttctcgtcttttactattcccctgtttttcgtaacactagtgttaaaacggatcttttaacacggaacgtccgtgttgtattatgtatgcaaacaatatatttttcaattaggtttccaaatcctctatatgtatattaaaatagagtatatttgatgtttatatatcaagctcacaattattctcaatacagtatttttatttttctttatttaattataatatctttcttatcaaacattctcatttcctagtaatacatattttgattattctaacactaattgccaaacattcaagaatcctaaatttaccaaaattaattattttagatatttttatacgtacaccggagtttaatgttctaaactattctctctctttcacaaagagtgttattcttgttttttttttttcacaaagagtggcattctacattttcaatgtgatacactaagtttcttgatttacctttacccaaagctattttattgaacttcaatcactaatcatgtattaattagggcatacatatatagttcaaaatttcttaatttgtgtaaaatatatcaaaatgacactagttgtgaaacggaaagattacaaaaaatatttttctaaaattaaggaagtgtactggtttaaagattttagagaatttggtgaattttacatattttgagagattttgataggtatacggatgatttgctagatttcatatttaaaaataacaaaataattggtcatttggtgaaatttagc

SEQ ID NO: 26599 - DNA, 764 bp, Arabidopsis thaliana landsberg
tcatcccattccactcgccacgaaaactcaatttgttacattaacattatgtgtaaccttttcgagaatcgcgtttcacaaaaatatctattatttgaccagagtcaacggttacgtgaatctgattccaattgcgttccaacttccaagttccaacacttcacaaacaaaaacaaatatcttccctcaaatctcaatcttcaaaaaaaaaacaaatatctttcacaaaatatgatgacgtggaagaagcgagtggttgagtaggctagatattttctcggaatatcccctggtgacgtgttacaatcgaacaagagtagacttactttttttaaacatacccctgatatatccttttaattacgaaaattgccaccaactcctggcgcgaagacttcttgcctcgtcttaaatataaagggtatattcgtcaataagtcaccaactaagccaagatattttaaaagtttaaacagacacaaaaagaaataaaataccataaggctgacagcttatcagagaagaagaagatatttctgtaagcgagaaaaatggcgagagaacatgcgacacggagaagccaccggaaaacgaaagaaacgccggaagaggtgaagaagcagaagaatactgaaccaggaggaacttaataacaagtggaggaagagaagctaccgttagaggttgggatgttctattacccaaagactacggcatcgttcattgtgtctgacgctctagagccacattttcgttagagctat

SEQ ID NO: 26600 - DNA, 1780 bp, Arabidopsis thaliana landsberg
  unsure (1)..(1780): unsure at all n locations
gtctagtgggatggtttgtaccatcttagttgaatttgctaatctaatacaaattaatagttgggaaaaaaaggaaaagtattttctctttagttcatatgtaaaagaaaaggcaaaggttgagaaaagtttagaagctataacttttagcaacttttatttcagggaaaataaaaaatatataatcttggacagtctgaatgacttgtgacgactcattatgacaaagcccaatgaaagaattataaaagtttatttgttttgtattgttgtcttcacttagtcctctgtccaactccaaatagtttcttcatttcaaaattttcacacaatcgtacacagacatataattatgtacgtatatatatatatatatatatatcattccgtgaagattaattttgactgtgtctaggatcctaaaattgaacaccattaatataattagtgaaaagctaaataaatttaaaagtctagtatatgcagtgataaaatcatattcacaaagttttcaatgacagatgatctttcacattcaccaattacatgatggttattactaacattatttattttattgattattgagacatatagaaaataactgaatacaacaaatgttatgagttaaaattgtaattattttaaagaaaatatataccaactagcatttgttaatacataatttaagtttttttcttacacaactatttcacaagattagaccgacttgtttaatgatgtatagagacttttttttaaccttttcagattaaaaatgtctatttaaaaaatgatacaaaaaggggaaatcttcataaattatctccacgcacaattattttatttcaggatcatcaaattgctagtatgccatgcgacaatggtagacccaaatgattaaatttaatgaatatagcattggcccattttcttcatagttacagatcctagaggtttaggggacctggagtccaatcattttattttatttttgttaaaaagttttaaataaaatattgggattttggagttttgttgataaaaggtataaaacgcaaaagctccataaaacacaacctagctttggtctctttacgtcaactttaagtcaaagacttctgttcgtgggcccaattctaagcccattagtgcgatgcgcgctttatctcacaacggcaccgtttgaattaaaaaaggtcaactctaacgctcaacagaaccgatacggtttttttcccgctatatttatttggcgggaaccaattaaaaaaagctctgtttttcctttgttttattttctttctcttttttgctatttcctgccaacaaaaaattcttataattttatttgttcagtattaccaaagctataaacaaatcaaatattgaaattaatacacttttatttattttaaaatttttgctttgatttattgtcctcttttttcaacctctcatcagacatcatactgattataataatgtaagaaaaaaacagtttttttttctaagannnnnnnnnnnnnnnnnnnnnnnnnnnnnnnnnnnnaaagctgaaacaacaagccgatacttctaaaaccccattgggtgtttgtgaacataagtctgagccatcactctctatcatttcccctatcttcttcactctctcctgcaataaaaggaaccacaaagtttaaagcttgacacttttgtttttgtctcttggacacaaacacaaacacaacacacaaagatctcttcagctttttctggtgtagaaaaacaactaatg

SEQ ID NO: 26601 - DNA, 1132 bp, Arabidopsis thaliana landsberg
  unsure (1)..(1132): unsure at all n locations
aactcaatcgttttgatactgaatttgctgtgtagctgtcaagggatgaagtatctttcagaacggaaaggctttatgtcagcaaggtaaatatcatcctggttcaggtatcttcggggtttcctgctaataatacatatttgtattgagtccttcttttgtgttcactatctacttacttctgatgttttctctggtaaggcnnnnnnnnnnnnnnnnnnnnnnnnaagattttgctcctgccaatttattgaaattgtttgtttagtttttgggaataacatataatgttatctgtgtacagatcgtgaaacaggagtggccggcaaagtggaaaagctttattcctgatttagttatagctgctaagactagtgaaactatctgtgagaattgcatggctattttgaaagtaagttcagtcttaagtgcctttgcattaattaagttcatggtgtacttaaataacatttcttcttgtttagctcctaagtgaaaaggtctttgatttctcaaaaggagagatgactcagcaaaaagataaaagaactgaaacagtctctaaacaggcaagttagacttttcaagaagtttactttattagaatcaatacataaaaacgaactgctttactgatttatactgctttcttataagaaaaaagtttaaactcattcatgagttatgcctatatgtcctctcagcttctcaaagacaggatcttatacgtgcaacactgtctgcattgcatgcctatcttgcctggattccattgcgttacatttttgagtctactttggtgatagacttcaaataatttatagattgatgtaaattggtaccacaatatgttcttctgatagctgctctggttatttacagcttgagaccctccttaaattatttcctgtgccagcatatacgaacctcactattcaatgtctgaccgaggtacctcagtttttaagttcagtttttactgatgttagattgaatgtattatttatgtctctattggctcgaattttgtcgatcaggtcgcagctcttaatttcggggactgctacaatgatcaatatgtcaaaatgtgtaccatatttatagggcagctgcggggtaattaatcgccttt

SEQ ID NO: 26602 - DNA, 1130 bp, Arabidopsis thaliana landsberg
  unsure (1)..(1130): unsure at all n locations
ctctttcacaaaacgtcaggacaacttttcccagcatgctagaggtgtcggttttatagtgttcaatgtaaactaaaccagcagatacttccttacctgtatattgagcttgaccctgaaacagtttttaagggaaaagagtaagtttccaagagtagtgaaacccggtggtgaaaagacctgaaaaaacatttcacatacaattatggtaatgttatttccaaaagtcatgtctgcataaaaggtacggtctatgttagttgcagcgactgtgagcatccatgggaatacattagccacagtgtaagcttcggggcctgtattagaggcaccagctataaccggaatgcccttcatcaccgcatggaatgatccaagctccaaatctcccgtaatagagtcaattgggcgaaaaggagccgcagaggcgagagaaatcgacaatacatcaacgccatcgtttatggcctcatcaaatgccttgaccatagtcgcagtggatgacatcaaaagtgctctatcccagacaattttgtacatagctatacgagcctttggagcagcgcctctcatgacaccaggtgcaagaccaccatatgacacgttaggcacaaatgaagaggctgcaattgaagagaccatcgtcccatgtcctctataacctctaggggacataaagtcctcctcgctgattccagaattgttctcatcaaagccatcagtgaagtactttgctcctactaacttcttgttgcaatgctttgctgggtcaaaatcctctccggctacacacttccctttccaatgtttcggtattggtccaagcccttcgtcattataagccggagactctggccatactcctgagtcaagaaaaccaatgacaagatcacttcccatgttgctctcatggagaactcctgagggaaaactcggcgaaagacccaaataatcataaattctcgtgctctgcaactcaacttttcgatttggtgcgacactgaaaacatcaggacggtctggatataaacatgaaacaaacccatagaaaaccagaaaatgtgtcagaagatgtgtataacaaggcttcacangggctcttaatttacttggtgaatactaaaaacaaa

SEQ ID NO: 26603 - DNA, 1366 bp, Arabidopsis thaliana landsberg
tgtattttcacaagatatttctgtagaagcaacacataaaaaaatattattttatggaccgtcaaagatcttctcccttaagttcctaattgtttgcatgcacatatatgtgtgtgtttgcgcttatcctctagtcattcatcgaccaaactgtgttaactcttaagtctaatttataattaaggtctcttgagctataatacaaagatgacaacggtgagtaattatcttgattccccttatcattttccatgaaaactagctcatttatatataagttaattgaatttgtgtatgtgtacacaggtagtggaaatggaagtgccaatggactgtcccggttgcgagaacaaagttaggaaagctcttgaaaagatgaagggtaattaatcagtgaagatgggtttcaaatcctaaactaattaacatttactgagtaattagttttcgtgtcacccaagaaacctgataattacgtcttgtattgaacaggagtccacgatgttcagatagacataaaacagcagagagtaacggtgactggttcggccgagcagaagaaagttctgaaagttgcaaggaatgttacaaagagagatatatgcttatggtcgtacccttaccaccctgaatctaatggatataacgacaggtacttcaagaagaagtttcgcaaaagaatcaacatgtcggtgaacggtgagaaagtgagttcctataactaccacaagcatggctaccacggacacgagcatggatactatcaagaacggccttattcaggtcttatcaatccgagcgctagctccatgttcagtgaagaaaaccctcatttctgcagcatcatgtgatcgatcttcatatttcaacaactacgtgggtggaacaactttgcttcggttttggttgtgctcaatttgtatataaacatgcatgtaataaaagtgttttggttttagatttggtttaattagggaaagctcgggtctataatctatatcatcgtaagatatatgtatgtatgcataagtagatagctcttctgtaacttttttttttttttgtgtgtgtgcaaagctcttctgaacaactcaacgctcaaatcaatattgtaatatttagttaagaaattccgtcggaaataaaaaataaataatcgcaagataaaaagtaaagtttcgttctagtcaaacttgaaaagatgatttacgtcgtaatatgatgtatttaggctcttttgagcgaaaattaaagtaatggtacatatagttttcacaaaggaaatggaactagaattttggcaagagttttgattattttatcctaaaaaagggaataaaagtatttggtctgagcctttgaggtc

SEQ ID NO: 26604 - DNA, 903 bp, Arabidopsis thaliana landsberg
gtaaacaaccaaaatcaaaattgccttccttcatccattttctcaccactccatgcttgttttattgaaaccccaaacgttccaaaaaaagcctgacattcatgagttttttgagtttgacgtgttctcagattctttggattggggatcctagtgctatgtgttgtacttgtcgagatgaacttgtgactatctttcgaagctctaggaattggttgtctcagcatccctccagcttcttgatattcatttttatttcccgcatcgaccttacgttgtgtatcctcttctttcttatggtcatcgttctctgtttctatgtcattaacatcctcccctgtctctcccttatcactgagacatgaaaaagagtatgtcataatggagacctctccataccgtaactcattacttttccctggactccttataaccttcccttgtgtgctccaaagcctctccccatcttccaatgtgttctctgtctcgttttcccttacttgttttcctgttaaaattatgttcccctcaataggtagctcttttaacactatggcgtctccttctgctgattcttttctttctcctatttcccctgtttcccgagagacttcatgttctgttactatcttgccaatctcaaccccatgattctcctttttccttaacaagcagtccgattctacatgacctcatttaagtacagttgctgcatcttggcggtatcgaagggtacacaaattccactgttgaatctcactccattacatctgattatgaatagaattataacagttttagagtaactttgttaattaaatccacttctaccaatacttttgcttcttcaaacatcttacaggtttctgtgtctggatgtaacttattaggtattcccaaagg

SEQ ID NO: 26605 - DNA, 804 bp, Arabidopsis thaliana landsberg
agcagcttttacattctcaagagcttctggtgtaattgtctgtgcatctctttggaacaattgatgtgcctgccaataaatacaaccgaatcaaacaacaatgaagataccaactttctaccttaaacctaaacttggcagaaatttcacaaaacaagtaaaatcaaatccaaagaacaaatctttaactgtaaaacatgtgagatccatgagtgacaagcattacacaatcataacgagaaacttcaatatcaaaaacaacattaaacccctaaaatcaaaggagagagatttcgcaaaccctaattcgaacccagaatcataaatacacaacgccacgaatcaaactcctgatttttcaaatccaactaacctgttggtactgagggtaagcgtagacggcaggaaccggtccaacaggctgaggatagaccgtagctccgggaatggatgccacaggcgccggtacagcaggcgaaggcgccgccgcgtaaggctgtggaggctgatacggagcggaatagtaagaattagctgcgtatgtgtactgagacgaggaagatgaagaagaagaacctgaagatggtgggattgacatcggagaagcaaatcgccgaatcgcaaaatcgaaacctcaaattttgtttattctttttttttaatttgttttcccacttaaattggaaatttacggttttctaattattgggctgaggcccaatagtatcttcacaaaaagcctatgggttcctaaatcagacgagactacaccaatagtcgatcaattgagaacccggaaaaacc

SEQ ID NO: 26606 - DNA, 2350 bp, Arabidopsis thaliana landsberg
accgagctctgcagtgacataaagagtagacccatgtagtgaaccagcgacaggtcctgaggttaacactcaccgcaaaatgctttacagagtctcacatgcaatgcctctgcccatttatttattacccccacaacgctttctttttaatgtttcatttaattcttcttcatgtgattgtgatttgaatttttccatattatgtgtatttggctctagaataaatgttcttaaacaaacccaactaaatgcattcctagtctatagttatatgtatatcgtataaaatatgtaagaaaaaacaaaaaatagtttactcgatacattaaatacgaacatatccgtaggtattttcatgtatatcctatgttcggatatattccaatattgactcttgtcacagtaaacataattggttatcaaatatgttcgtgtgttatagagaaaatttaatcgtctataaaacagtttatagtaatcgtatacgtacacatataacatattacaaaaaaccaaacaattgaattaaaaatgatagcaatcgtgtgacgaatgaaactggaagtttatatattttgttaatcatcccataattcaactaaacgtagcatacaattttaaatcttttttttataaaatgcataaccataaatataataatgtctctaatgaaaaaactcaaattacatataaaaatcaatttttcaagcaagctcttaaaggtttaccacaaagacagtcgttaaacataaacgacgccgcttcaagatgatcaaacggtgaacctaccggaatcctcccacagagatggttatggctaagatccaaatgaccaataaacgacgcacctgagatcgatctcggtattggtcctttcagattattatacgacaaatcaagaactgtgaagtaagaccttggtccaaacccttcaggtatcttcccttgtagcaagttccggctcaaattcagattcatcaccgacgacgtcatcagagtttgaggtatctcgccggagattttgtttccgtcgaggttaagtgtggctagtaccgacatacgtcctagagacggtgggattgtaccgtagagttggttaccggagagatccacgtcagctaaccggtagatattggttaatgattctgggatccgaccggttattcggttaccggataataacgcacggctgagcatttttaatcttccgacgtccgacgggattacaccggagattaagttgttacggagatctaaatgcattaagctagagagattggttaatgattttggaattgaaccggagattcggttatcggctacgtttaaaacagctaaccggtttaatcttccgatgtcgtatggaatcccaccggagatttggtttccgattaagtcgagtgtacggagaaaaggaagacgagtgatacatttagggatttcgccggagattcccttccaatcagcgatgatgataccggagagacgagtgagcttacatatagagggcgaaatggagccggtcattagtccgctccgtttcgccttttggaaaagcgggtcttcggattcacctcggagtgtaatgccggcgactcgacgggtgttgggatcgcagctcacaccataccagcctttgcaacagtctagacctttccatgtgttgaaaactccaatgtagggctcgttgagctttgctcggaactctagaagcgccgctcggtcggacggtaagcaagaatggacagtcgtggagagaagcaagaagacgacgacgttagtcaataggatcactaaccatttcttagtatccatagtgtagagaatcttttgtgtgatgtgttttttttttagctttacataggttgaagcacgttgacatggaagtgtgacttaactatatggttttatttatagtcacatattgatgggagtaaagacgacgaaatacttctttttgttgcttcgttgaaccttctcattttttgccacgtcgtcacatactttgcatgctcatttgtttcattattatcagacttttctttgtgtgtggtcaagattggatcattataattcattacaaataacatggttttgtttgtctcggtcgcctggttgtactatctatgtcacaactcagaaggcctgagcatgttcttggttcgactctcccgagtctctccatacgtactggaatataagaattacagatttggctatatgagaccataatatttgaaaaatgagattaaagtaacaatcgtggcaagacatatattagaattagaacttttttcttgtctacattgaattttttggacataataatgagggacaacattcaagtggc

SEQ ID NO: 26607 - DNA, 1074 bp, Arabidopsis thaliana landsberg
tagtacaaatgaggtaaagcaaacgatgatctgatgtctggtcacctagaaaagacctgcttggtgtcgagggatggctgaactattaggtgagcagctaaccttctttgatggaagttgtgatgtctgttttccttgttgaagtaaaatgtttcaaacggaagagttaagacggtggctgcgttcgcggagggaactgcctacatacctggttaggggattaagccttatcgtagttcgattgaagtggtggctgcgcttttggggggctctgcctaggtaccttgccaagggatcaagccttatcgtagttcgattgtttttgagtacctattcgtggtatttcttgagatgcatggcattccaaggccgtaacttaggtactccgttgatgacttttatgagcttatagacgccgtcacgtaccaccttggttattcgatagggaccttcccagttagttcccagttttccagcgtttagctctctcgtgttgctgaacacttttcgcaaaacgagctctcccacttcgaatctctgaattttgatattggagttatagtagcgggcggcagcttgttgataattttgaactcggatcattgcctgatctctgcgttcatcgatgaagtccatgttgtcccgtaacatttgcgtgttcaggtctgagttagcaggactggtggtcattctcacgcttggtattattgtttcgacagggattactgcttctaaaccataggcgagagagaacgatgtttcttgcgtttatttgcgaggtgtagttcggtaggcccaaagaactccgtggagtacgtcggaccacattgattttttggaatcaagtcttttcttgatgttgctaagtatagctttgttggcggattctgcttgttcgttcccttgtggataacagggggtagatgtggaaagacggatctttcacttgtcgtagaatgctttgatttttcccgaggtcaggttagtctcgtcgtttggcgacgatctcatatgtaggcattctatattttttcacaggaaattctccgacttgattctttgtataccctgatg

SEQ ID NO: 26608 - DNA, 3681 bp, Arabidopsis thaliana landsberg
  unsure (1)..(3681): unsure at all n locations
attccttttttcttgacatgaaccacagaggaacccatctctgctttgaacaagtcctcctctgcttcattaagtgatccgctagtccacggacgatgctggccttgtcctcggtcgtcaacctcgccagatgtgagatcttatctcttcaaatggtaaaacatcattaatgaatcgtgtcgggaaacaaggaaacccgaagcaataatcatacttacttaccaacaaggaacgaatcagtttcttgccgccccactcatgctcgcttgcgtaaacaacatcaaccctaacctctaccatgaactgagcgtaagtaagtgtctcctcgaacagtaaacccatgtcaacatacgactgggagtagtgagacttcacggataaacccttaccaacccgttgagaatcgtatcgttttaaacccgcgcgggtcaaacatctctgttttgcgactttttcacacttccgatggctaatcataccgcaatgttcacaaaaatccccaagattcttgtacttgaactgaacaaactgaagccatacaacctctagcaatggttacgtaccattccgttcaccagcctagtcgtgtgaggtttgccagaagcactataagtcgcttgaatctgttcgggaacacattactatattttggatttctttcagtttacatatttctgttttgaggttaaaagatttcagtcatttattaatggttcgacctttggggaacgaaacctagcttataccaataccagaaaacttcgagacgataagaggcagactactgctaatttgtaagcttgaatggtgccttgacaatgtgggctatgaagtggtgaagttcgagaatgactctacaattacatcattcatgccatatcctcccctcaagaatggtcgagactccaaagttgctaactnttttttttttttttatgctaagcttgtaaatatcattagaaatgaaaatgaaggaattacagaaacaacacctaaagtagagtaatcttggaaaaaaaggagagtaaaaaacaaaattacaataaggctaaagtaataaggctaaagtaaagtatacaattatctaatccaaaggagcacgagcggacgccaacgcttcctatgtcgtcttccggaaatgatgttgcggacttgacgatcaacgagcttgaaagttccagaggcagtgatccaaaggttgttgtgaaggtagttattacgctggtgccaaatatgataagatacggcttgagaaaccaccttgcgaagcagagagggggcggaagaggttgaatggcgagtccaagaaagcagctcggcccaagttagcagctgctgatgagatggcgaaagtcttcgaaaaacctgagtccaaattgacgcagcaaactcgcaagtcaaaagaagatggtcccgtgattccggtagagtagagcaaagacaacaactagcatcagaaataactccccatgaaagcaggcgttgcctagtcgggaggcgattaagagtagtaagccacatgttgaaagcatgttttgggactgcacccttaaaccaaacagagcttgcccaccgtttaatctcctccctaggcctcagcgattcccaagtcttggaagaggaaaaacccaaacactcagaatcgtcaacaacccaagcataattatccttctcaagggttgagcttggaaggttaatagtggtcagatgagagtggaagattagagcattgtctgatcttggaggcgggataatccaacctatatcaccacaagcatcactaacctttgaagcagctgggatacacaaagaggaaggccccgctgttcctaggaacttgattaatggaacacaaggggtccaaatgtcgtaccaaaatgaaatcatttgaccatttccaactcttgcctttaggaacctttcaccaagaggtcttaaccgaagcagcgtcctccaggtccaagggtcccgggggctctcctctagttcccaaaacgacttatttttaatatggtgagatttatgccaattcgcccaaagaccgtcattatctgcaaacaagagccaaataaagcgaagatataaagttttgttccatggcgtgaacctgcgtaagccaacaccaccctcattctttggtaaacagacgcctgatcatgcaatctttgctcccttactagcatcaatgctgccagaccataaaaatctggaacaaagagactcaatctttttcacgcagccaagaggaagaacaaaagtcgacatccagaagttgacaagacccgtaatgacagaggcgatcagctgaacccgaccagcaaaagaaaggctcttaaccgcccaggatctaaaccttttaacaagcttatccatcagaggctcatactctgaaattttaagtttcctactcatcagcgggagcccaagataacgaattggcaaagtgctgattgggaagccgtagtgcgaaatggcaagagcctcaacctcatcagttccagccagatacaaatttgtcttatctttgttcacatgcagccccgaccaagaggcgaagtcatcaagagcttcactgatcccatgtagagaggagcttcccccatcgaaaaaaaccataacatcatctgcaaacattaggtgagagattgagagatcagcggttttaggatggtagtggatataacccgcatcaaacctagctttcagcaagctagagaacacctccatcgcaagaacaaataagtacggcgataaaggatcaccttgtctcaaccctttgttacttttaaaaaacccactgctggaaccattaaccatgactgaaaaatagggcgttgaaatgcactgattgatccagcaaacaaacttttcagggactgcgagagcacggagggctgagatgatgaaatcccatctgacgctatcaaacgctttccgaagatccactttaagcataccccgagagctgatattttaagtgttgtaaccatgcataatttcagtagctaacaagacgttttccgaaagtaaacgaccaggaaggaacgcagactgagacggagaaatcacctcatttaaaagcttctttagcctagaagtcagcagcttagctatcactttatacaaagtgtttaagcaaaagattggcctaaagtcagtcatctttgaagcgtttgtgatttttggaataaggaccaaagttgttgcgttccactgcttcaataactgacctgaacgaaaaaattcttggactgcttcagtcacctctggacccacaacagaccaaacacctttaaagaactcagaggaatagccgtcagggccgctagctttgttcctgggcaaagagaagaaagcctcttgaatatcaagatccgagaaactcctttccaagtcattaatctgatccacagaacatctgaaagaaagaagcagattcatatcactctgcgccaaagagttctcgccctctacaccacataggagggactcaaaataattacagctatgctcctttatgccctgctgggtctcaatcctttcaccaaaatcatcaatcaagaaatttattgtattaatcgatttacgcatgtcagccatcttatgaaagtaagcagtattactatcaccctcatataaccaagagatacttgacttctggcagaaaaagggatcctcttg

SEQ ID NO: 26609 - DNA, 1503 bp, Arabidopsis thaliana landsberg
  unsure (1)..(1503): unsure at all n locations
gcggtagtccagccaacaaattattccatggaacatatcagacgctggatgcaggaatagggacatttactacatgacctgggccagccaatgagcttaccccgaatagtcctgacaaatgatgattcagacgagattcagcatttttgaaccacgaaactcttggtttccattttggttgtcggtgtgaccatccccctattctagtttgggcgaaaagaattaataaacaaagaccctttgtgatacatattatattatggcggaaaccacactcatacccctactgatttccaatgcataccactttatgttcgtagatttattcagaaaacgtgtttggtatcaggataatgagagaaacattaatcaaatctcacgtgaagggaatgcagagttagtaaatgagatatacaagtacaattgcggaccacacatacacttatacatgttactcggtcaatgtcattaatatttaatttgaataagaaaataccaactacataaatgattagtggtaatagtatatacaattatgggaaggaagaatttggtagtagatacgatggaccaataagggaaaatctcataccgtatctccattaatgacacctttnnnnnnnnnnnnnnnnnnnnnnnnnnnnnnnnttgtttaatctataaaatttggcttcgataattaaacagaatcttaagaactcttttcgatatctcttactttatctaactataacttgaaagaagagaatgaggaagctcacgacaaggttcatgttggcattggaacatgtgccggcgacgttttttgtgcggtacacggctgatgtacggttttacgtattcctttgtatatgagtatcatgttgacaacaaataaaacgacaaaggaaatgaactttacttcaacataaatcttttagacatgttaaactagcttatatcaaacaatgaatagtaacgataggctctcaaaactctaatcgatctatcctgtcgttttcgatttacgtaagaatcttattagtatctttttgaatatccaaaataactgatttttgtatataaaaagtagtaataatattggcatacaggctggcttctttagtcagaaaagtctctgaagaatccaacaaaaaacctaaaccacttttaacgtcatccttatcttcgttttatatttcttttaatcagtaaatcaaaaacaaaaacagaagaaactggaatcactcaataagtatggatactttacttatacgtttctaatatgtatagatacgtcaattcaatacgcaaaatacaatttcgaaaaaagcgacgtttgtgtttcagtgcttttaaattgaaaacaaaatgtgttttcacacaacaaaataaaaaataaaaatattcttaaatttgttgtgaaaccaatacaaaatacaacgttcaaaaaagaaaaactaaaacgacacacgacatatatggttttataatcaaagtcgaaggaaaaccgtaattttctct

SEQ ID NO: 26610 - DNA, 1022 bp, Arabidopsis thaliana landsberg
gcaacaccaaaaaatgtcagaaatagctttgaatctgtattaatttcaacccaaggtaatgactgtcagggaaccttttcagcattcttttcttcgccttgaagggtgtcctccatattagtaagcttggataattcacgtgtcacttcattagacaatgaatcaactttgtcagacaaagcttttacttctcctcccatactagcttcccttgcttgagtcaaagctttaatctgtttctccagttccgatatttcaccctgtgtcttatctgtctgctcatcaataccagtcatttttatcttcatttcttcaacaacatgtatcgaattatctctaatcttctccgcttgcacatacccaaaagcgacacaaaacctctttaaccgatctaattccgcattaccattagcccactgcatatactgcgacttttctctcctcaacttctccaaagctggcaatatatctttctcaagaagcttattaatctcatcaaccttagtttgctttttgctccaacgtctttaacgcagcctctttcttattctcatacattctcgtaccagcagcttcttcaagcatagataaaatctccataggtttcatgtttaaaactttggtaatacgcccttgcataatcagaaaatgaggattgttcacattaagctgcaccgaatggaaaagattctgaacttgatttggttgtgcaagcttcccattgatcaaatacttgttctttccaccaactacaatctttttaacaccaaaagagacacaatgccaagttaaaggctccaattgtgtcaagcacatgaattgatgagtacaacaaaagagagacaaagaacatacttgtctagtcacagtaatctctggatgttcttcgtagacgagagggcttatgtgtgtctcggcattgtcaaaggtaaccgagacagtcgccttaataataccagcttggtcttgcttatagacgagattctgaagattagcagctcgaacttgatgaagattggtga

SEQ ID NO: 26611 - DNA, 1022 bp, Arabidopsis thaliana landsberg
ctccttcccaagagaccaaaactaagtcttatttacttcattcatagtgatttttctctattctaaattatttttatggtcaactctttgaaagattcaacacttactttcagtggcatcgtcgtatctaaactatacttaattctttggttgaaacaaaataaagaatgactagttcgtttatatattccaagatcttttaacattcataataatagggcttgtacaaatccttcatgagaggatgacactcttcgtcatttaatgaaagcaaatgtggcccattaagtataattgaagcccaatcaccttttacacaattaacaattaagtatttggtctcatcacaatgtttgcgttagctgcgaaacaagatgctgttacagtcatagaagtcttatgcgtacacgactccgatttcaaaatctgaacggaatataaactctcgacgacgaaaatctcaaaatacccaaaatctcctccgactccgagctatggctacgtgttccatcttgccgtcaccgtctttctctccccgccggcgattctgtagcttttctcacaatcgccggtctctaccttcaatattcagtttcaacaaagagcgtgtctcacgaagagtcttctgtagctccaaagagaacgatataaacagagatcggaaccagtctaccggaattcaagtctacggagaaatcgagaggtaaagccactcttgttttaccgatttttgtaactaacttcatctttaagctcactgtggtggattcattacgatttacaggttattaacagagactgttaaacactctcagagtagctccggtggatcctctgattggtcagaagttgaggtttgtttttgtgttatcttcaaatgttgatttgaatgtttaatggatgattcttagaatctaagtcaaatttaggagaattgtgtggttttagaataagttttttgtttcagatttttgttctcaacgattcggtgaacttgttttaagaagcttgggtgctgaaac

SEQ ID NO: 26612 - DNA, 1216 bp, Arabidopsis thaliana landsberg
ctttggtttgggttgtctttcttctcgagagagataagtgaccaaagggtttcgatttctggaaatagtttgaataaaaaagtaattttttatgtgattattggcaaagaaaagttttagttttttttagtttgtgagagatgtctggttctgtatctggttgtggttctggtggttgtagtattgcatggtttagaagagatcttagggttgaagataatccagctttagcagcagcagtaagagctggtccagtgattgctctgtttgtttgggcaccacaagaagaaggacactatcatccaggtagggtttctaggtggtggctcaagaacagtttggctcagcttgattcttctcttagaagtcttggtacttgtcttatcaccaagagatctactgatagcgttgcttctcttctgatgttgttaaatccactggtgcttctcagatcttcttcaaccatttgtatggtctgttgttcctcttctcttctctctttatcttatctttgaatttgcatgataaaaagatttgatttttgtgattggaatcatctttactcttatgggttatgttctgtttgatgtatttgtggaataagatgatctggaaatgataaagttttgatctttttcagatccattgtctttggtgcgtgatcaccgtgctaaggatgttttgacggcgcaaggcatagcggttcgatcattcaacgcagatttgctttatgagccatgggaagtgactgatgaattaggccgtcctttctctatgtttgctgcgttttgggagagatgtcttagtatgccttatgaccctgagtctcctcttcttccacctaagaagatcatttcaggtttgtttctttgtcactctctcttgtgggttttggtttcctaatctgtatcattcaatattgtttcttttatgttgcaggggatgtgtctaaatgtgttgcggatacattggtgtttgaagatgactctgagaaaggaagcaatgcacttctggctcgtgcttggtctcctggatggagtaatggtgataaagctctcacaacgttcataaacggtccattgcttgaatactctaagaaccgcagaaaagccgatagtgctacaacctcgtttctttctccacacttgcattttggggaagtgagtgtgagaaacgttttccatcttgttcggattaaacaggttgcgtgggcaaa

SEQ ID NO: 26613 - DNA, 2125 bp, Arabidopsis thaliana landsberg
tatgtcttttaatacaggaagttgggcagttaaagctgctgggatcaccagttttgtcaaaagtggagtgtgaagaatcttttatgtctgaacaggcttctctctttcaatcatctatccggcttttaggagagtactgtcctatatctaggaaaaagtccactcataaagttggtggtttgcgttttgaggaggacatcacgagctgtattggatttcagtttatgcaactgagtgattatcactgcctcttctgacatcccttggttgtttacgtttgttgaatcaagatggctttgcaaaacattggtgcttccaaccgcgatgatgccttttataggtacaagatgcctaagatgatgaccaaaaccgaaggcaaaggtaatggcattaagaccaacattatcaccaatgttgagattgccaaagccttggctagaccgccttcttatacgaccaagtactttggttgtgagcttggagcgcagtctaagtttgatgagaagactgggccgtcgcttgtgaatggagctcacaacacgtctaagcttgctgggcttttggagaattttattaagaagtttgttcagtgttatggatgtggtaacccggagactgagattattattacgaagacgcagatggtgaatctcaagtgtgctgcttgtgggtttatctctgaggtcgacatgagggataagttgactaatttcattctcaagaacccacctgagcagaagaaggtgtcaaaggataagaaagcaatgaggaaagctgagaaggagaggcttaaagaaggcgagctagctgatgaggagcagagaaagctgaaagctaagaagaaagcattgtctaacggcaaggattctaagacgtctaagaaccattcttctgatgaggatataagcccgaagcatgatgagaatgctctagaggtggatgaggatgaagatgatgatgatggtgtcgagtggcaaactgatacttcccgagaagctgctgagaaaagaatgatggaacagttgagtgctaaaactgccgaaatggtgatgctctctgcaatggaagtagaagagaaaaaggcgcccaaaagcaaatctaacgggaacgttgtgaaaactgagaatcctcctccgcaagagaagaatctcgtgcaggatatgaaagagtatctgaagaaagggtcaccaataagcgcgctcaaaagtttcatctcgtctctctctgaacctcctcaagacatcatggacgcactcttcaatgctctctttgatggtgtgggaaagggattcgccaaagaagtgactaagaagaagaattacttagcggctgctgcaacaatgcaagaggatggatcacacatgcatctgctcaattcgatcgggacattctgtggaattaatgtaaacgaagaagctttgaaagaggtggctctggttcttaaagcattgtacgaccaagacatcattgaggaagaggtagtgttggattggtacgaaaagggtctcaccggagctgacaaaagctcgccggtttggaagaatgttaagccttttgtggagtggcttcagagcgctgagtctgagtccgaagaggaggattgagtcacttttttcttccctcctaacttttctttgcggcatttcttataatacttcgtcagttttcagaattcttaaatctttttgctgtgttcttataaagaaacatcatctattaaagttgtcttcgtttggatttggttttgacgactttgggaaatatttatgtttaagaaggtttcattggtcattgacttttatatattatatcgtaaccatgatgtgatagtgggccttagatcaacaaacatgcgaaaaacagaagcagaggcccgtttcaacggagcataataaattgcattctctgtcttttgtttttaggttttttttttaactgatagatgtgccgtcgaaaataatattgatatttaaaaattcacaacaaacattcttaactgacccacccatctatctgctattcccacgcgccaaggaaaataataataatagcgaaattgatttttacatttatttattgatagataatttgtgtattgttaagattaacagattttaagggatta

SEQ ID NO: 26614 - DNA, 3935 bp, Arabidopsis thaliana landsberg
agtgtcatacttcgaagaactgtactttgcttgagctccaagtccggcgaaaggttcaatgcaaatgataatgtttttcattttatcatctattgggcctaattgacagaaatcaaagcccacgactgtttcgatataaaatttcacgcgctgacggaagcgcatgttattcacttactaatggtacaaaagaatttttcaataataactgatctagtgtaagagcaccgcatattttaacgttagaacgccggcaaaatatcatctgaagtaaagagaagacaaatgatgagtcagtttctgctgttctctgtgagatctgacagagaattctctgtgctcattctggttcttcaccagtttctagtggctagtcgctagtgtgtaactctgcaagaaaacagagattttaatccaagatgttttttttcctaacgaacatgagtacatttgttcagggctcaggctatttagatctgtatgtggtgtggaacaacaaacccggatctttatattagttcatcgataattagccttcacgccacctcaacttctccttctgtaaaggcagcacagagttggttagttttctgtattattttgatccgacattgtcaaatgcagagaaaagaggagactaggttgtctaaccgggaagacggacagccaagtttgcctgctcatccgcatcagcatttaaattctacaaagaaaaatgccaataatggcagaaacttgcattagtatctttctcacaactcacaagcatgagacgagaaatatgtgatatcattcatttacacagacagagacacacatagacatacccttagtacatgactgatctcaaaagagacacatttgttgcaaagtagttttgcttccttgtggagctttgcgagtacctcatggtttaccttccattgacctttaatctgttgtttctcagaaagtgttgagaaagtgagaagataaaagcgtatatgattcattaaacttacctagttgcacaaaaatatataacgttttaattgacgaacctgcatacagaccagcttggagtcacctttcactttaatattcttgtaacctttctaatagcatacttcaatcctaggattaacgcatggtattcttttgcattgtttgtggcaattcccaaaccttgacgcactctacaaatctatgttgaaaattgatacttagatacatcactgcattctttaattagtaacagtgattcaaaaggatacataccaagctcccgtcctcagttttcagtaccgctgctgcgccggagagaccgggatttccctttgatgcaccgtcaaactcgataaagcaagtttcctaacacatgaggagataagagaaacagaccaacttgagcacaaaattttgcatccagtccattgaaactatgagtaacggtatatacaaacataatcacaactcacgtctgatatataagcagatggctccacctttgaaagcttttccaaaggatcataagatatagaagctgaaggaagttgatcctgcgaaaaatgaatacttaagcaacgagcttaatcgctttgtctcataatcattaaaattcagctaagcaactcaataagattccaaagaaacttgttcttatagcttacttttttgtcatcttttgacttcgtctctgaggtagtctcatcttcagatactttgactgtacaaggagctggctcctagtgaagaaatttaaagagagatagttactatttcagtttaaaatcccacatcacaaatcatggcagatgcagatattctccaagaatgcatcataggagagaagagaaatacagtgaaggccattttatgatcttacctggaaaagacatggtgtaagagcaccaaacatatcatctttcaaatctgaagctcttaaactatatagtggtttcttcaacccaacagaagagagatattcctcagtgtctttaggcaaagagtatcccttataaacactaaccggaagatcaaacacctacaccattattaagaaagctcttatattcccatcataaagagagtatctattatacacaacagactcttaaggccaaaacataattaccgaagatccaacttgagcctgacaatcactcaaatccttataaattccaataacatcacccttccgaacaacgaaaaaggcgtccttttctttatccacagccgaaacatcggttgatgataacatctttgatttaacagcctttgatcttgaggaataagaatgaacactacagattccaaacacactactcacagctacaggctttaaacatgattttgaaggcatatagaagaaacattcattccacggaatagaactgacatagcttgatctcttaagcagtcccaaggcaatgtatgaacgcgcatgagacagacagttcattacaatgtaagtcaccacacactgagatttatcacacaaaaaaaaacacacgcacaactttagataagcttcagagattcaagaacaaatgtcaaattacaaacatgaaatcaaagctgaaaagtttaacactttcgcagaattcgtaatctgggtatctatgattgaagcggataaagtgaaatttctcgacggcgaaacaaaacagaaaatgaaaaccagaggactgatgaaaatgagtaaaaaactgattagtagagtcaaattaaaatcttacgaagcacagagacgtgaatctctcgattaatttgtgagaactttccggtgaagaaggaagacgaactcactcggtgggtttaagctgggttttggtctcaatcctcaaaagttagggtcaatgggagttttgaagtactatcaatttctaatataggtttaagtattttgtaatgttatctatgttcagacaaggtttcgtggtgtagttggttatcacgtcagtccaacacactgaaggtctccggttcgaacccgggcgaagccatatctttcgttttttatcttatattttttacaataatcaaaatgggcttttaatggacctaaaatattgacccaataaaaatgcaaatgcatgagacacgtacgtttttagtatctaaaatccatggtcattgttgttatcattgtcgacgttgacaaaaaccagtacaattgcaaaattcatcacgtgataattacggatgaaaaatacagtgagaggagttaacaaaacttttttgttcttttttgacaatgatttgaaaaatgaaaacactttttttttgggttctttttctcttttgtgtggttggtttaaagttgtgatatactgctcgtgagtcatcagcatcttctccaaacaatcagcaacgtacactacactattaacgacaagtcgagaaccaaccaaactaaagaaaaccaacaaaaggtctcaactaaaaaaaacaaaaaaaaaataaaaataaaatcaatgtgctagcttaaagatgcaaatgcaccattcaatcagagtctctcttgaagttagtcactgatgagcttaaactagacaaaaagaaaatgactacgtttctgaagtcactcatcttcttacaagattcatgtcttgccttcctctctctaatggtaattaacaccagcatatctttctttctctatcactcgctctgtttctctgctttacggataatttctaattttgtctatttatttatgcatgagaagttccatcgagggagttctgaggatgcagctgaagctctcaagaagcttgaagcatccataaatggtgcgaggataagcatcgacactacatggacacgagaatttaggagcttatttatagttcccttattcaagtgtttggtggctttttgtttgataatctccctcttagtttataataataggtatatacatgaaccttgtagtactctacgtcaaggggttt

SEQ ID NO: 26615 - DNA, 944 bp, Arabidopsis thaliana landsberg
atattaagaaattgtcaaggatgtgaatggaatttgtctctctcaagtttatataggtttggtaacaaattaaccaccagaaagttaagcattagcaagacatgttccaggcttatcatctatccataaactgcattgaaacaagatttctcgtttctttcaagacttgtttgtcgcatgcaatttcaaacacagctgaacaattacaaaaacaattatacacacctttgcccacaataattgaataaattattggcaattttgattcaaaatccaaatttgtgtttgtatattttgtatgtcttattacaaatagtctacagcaaaagctttgtcatacagacaacaaactggtcgctttgatccattcaccgtatgtcccaaactccttgactctgtcagatacaaaggttaattagtttcacgaatagcaacaccacagaaaataaattatgagtgtatttaacttacatatggagattggttggatcaatctcgggaaacaggttgaaatagaatcgaagcccatctgggctcatgtctctacatagcaaacctgtttcaacaaatgggaacgtgagcatcatataaatctaatagatccatgtttcgtcgggcaagcttttattggagtagggaaaaaaggcacctttggtctctgcagatagtagatgttccttagccatggcaggagcaatctttagcgtcaaagctgcatcactagcagtaactccaactctaagagtttcagtttttgtcacaagcattctgattctactcataacctaaatggccagaaagatatttgatcaggtaattggaaacaaaagtaagaagcacatcgagagagagagagagagtactcaatgcagttacagtggaataaataatcttaagaatacctcttcgtcgctgtgagacttgtattggatgaccatcacacc

SEQ ID NO: 26616 - DNA, 1303 bp, Arabidopsis thaliana landsberg
ctgttatttgtattttttctcacatcttgcaatcctttataagtcaaacaactttcgatttcaacttttcagatgaaagctctggcaatgttccagaacgatgctgattgcatggcacttttgatggatggaagtggggcccttggtcttgatttgagttttgtaacacatgttttcctgatggaaccaatctgggataaaaggtacgactttgagcaattttacattcagcaaacacagacaaaaaatcagtaacaaataaaaacttgatgatcttctgtttttcacttcattttgttttaaacttttttggagtttctggagtgaatcatttggccgttctatatacttatctcgtatggataaaactaaaagctaaattgagtggttcacaatttggtgtctcacggcaacgccttttatattaatattccatatctggtcaaatatttttccattacatggtgttgctgactcctacaatgtttacaaatgagcagcttggaagagcaagtcatcagtcgtgctcatcggatgggcgcaaagcgccctatttttgtagaaaccttaaccatgcgtggcacgattgaagaacaaatgatgagattcctagaggtacggttgttttgttttgttttttcctcattgctctgtaattatttagtcatcagactataaaagcttggtatgcatttggtgaaagtctgaacatcgtttgcatgtcaaatgtcccatgtgtattgttttaagcaggatgcagaaaagagtgatagattattgagtggagattacatagaagcgaagcaggagacaacacggagccgccgaacgctacatgatttggtagaaagcaattacctgtctcatcttagctttgtccgatccgatggcaaaatggaatttgcagcttcgcagcttgcaggtttaaaagatcaccaattagcttaagaaaagtaggtttattttgtaatcacaacagttcattgttacatatttttttggatataaactaggataaatataaagccgatcatttcaaacaaaacatttttgatcaaacttatctttcgctttcaacatcatcatctttgtcttgcagtttcttgtagagaaaatggttagctataaacagataaaagcagaggctcacagcatttagcgatgcgattatccaatagtagtaatcaagatgtgctctgttaaggtttgtgacgagccattcttcaccgtggcttttgctgattgtttgaacggtagtattaatctctgttcttaacaaactcccgcttcaacgtcgtttatt

SEQ ID NO: 26617 - DNA, 1398 bp, Arabidopsis thaliana landsberg
gtttgaagggtggttatcaatccaatttcgagtgtggatctatatcaacatattagggctataaatttcaactttcgagcgtggatccacatcatgaagacacggttttgaacttgtcatggcacgttcatctatatctataaataatccacgatctagcgtttagatgctaggtatatttgaacgcgaataaaaacaatgatcgagaggtttatgacactacaagtttacgagcgtaattatatcttaaaacaaactactacactacatattatgttccttgtgtttcctttttttcttttttttctagatatggaatgagagctaaaaaaaatataagatcgttgtttcaaaatcatgatgagacaaaccaattctattcttcatctaattatgattttttttcccattgggtgaaatgtatttggatccgaagatattataatttcaataatatgttggcataatctcttcctaaatcatattatgtggtcgggattacaaatctaatgggctccatcctgaatttcatagtggtatgacttgtggggaaatattttttttttttgataaagtatcttgtaaagttataattgtatatcttaaagttagaacttcaaatttcatagccaaatggttgcagtctattggtttagtaatacaagtcaaatcaatagatacatctattttcataccagataattgacataataaatttcaaaattactcgaaactttgattactagctaataataataactggtttgaagaaagtatgaaaaagtagccaaatggttgcagtctattggtttagtaatactattaaaatcttttgagcaaatttgatatctacatagatatctctaacatggtactggaaaaaatcacacgttttgaacacaattttatgtatttaaaattgcctaaaatctctgtttgataaattaggtatatcttaaaccaaagataacatgtaacagaaattacacgtcttgtcagtaaaaatctaaaaagtatttaagtccacctctttgctattttcttaattttcattgtcaatactaacaagtatatgaaaactttgacacttatgtgcggcaactagtcatgaaggggtatatgaaaacaacaactgagtttttatttagtaatatatatcacatgtggcagacactttccctttcataagtttgaattttggatacaaagtaaagggggaaaaaaggtttgaaagggaaacgaaggccaaggccaagtgatccccttagattagtgacaatgaccatcttctgcatgcgcagcttcaagatttgagaaactcttacatcactaagaaagctacatctctacacagttagagagtcttcttcaacaactcaagaactgttttaatgtctt

SEQ ID NO: 26618 - DNA, 1996 bp, Arabidopsis thaliana landsberg
gaggtcgaatatccgtagaactgacaaacatgagcttgggcgagattacatcttccgggctcagtgacagatctcgaggaaaggatttgatgacactggtgatctggtcattggtgaagccatggtccttgaagagagcaagaacagagtctggtttcttggacgaaaccaatttgacgaatctggaattcgatttagcagattccaaagacagtccacaagaatccacgagataagaaactgtaaaagattccaaacatggtttttgcttttcgagattctctgatttcacttgtgacactgaacacaacgttcttattctacccactaaaaaccctaaattgacaatgcgacgaacagtggaagaagtaaacgcacaatctacgacatttctacagtgtaataagctcgacatgaatacgaatcctaagccagtatctcttctaaatctcaaaaattctccaactttgcaataatcaaaattcgccggaaaaatcaggttctcaatagagaatagagctaaaagaccgtcgtgaatacctttgagagccgaagaatttcgtagagactcctggagatgttgtcatattccggaggagtggctcatacacgagtgtaggtaaaataatcgattcaaaatcaaaatgcgacgatgttgtctgaatctgtgaataggtcctttatttctctttattcatagattcgcctcaaatgttattaagttacacaataagccagtctgggtattatcttgtaaattatatgtatatcaaaatattttgtaaaatattggtagccaaaaacaaaagacaattgcttccataaagtatttaggggcattaaaggagttgtttgtctatattattaaaaacgaaaaaaaaataaaaaaatcagcacttcaaaaaaagaaaaaaaatacataagtttaagtccctcactctcaaatctcaaaaatcttcattgtatcttgaatatccttttaagtctcaaaacaagatccttctcgtcgttagataactcattctgcaatcaggtttcgaatatcagtttaagctttactaaaacacaagctaatgttaaaacaacatttttgacaacccagggcatgaaagactgtatacaacttacccagtaattagttctgattacgtccacggatcgactagaaatgtgactgataagcctgtcgtgtacaccaaagtgcctcccaaacattttctgttcttctgggttagaagcaatgatctaatacgaaaacaaacattagtttttaaggaaaggcagtaaaaactagaaaaatgatgacaaaaagagggatctcataccttaatagccacctactgtcctttccttgcataatcaactggcatgttgttgctattcttaattgatgcgacgcgcccaatgtccataaacactcttacattctcaatccttttaacaatgcaaatgggagttccaacctaaatcaacaagacgtattgttagatctttgtgatccagcagaaaagtgtactcagatcctgaatgagaaaataccatatacctttagtattccatcattgactttaactccaaggataattgggtccctctgattgtagatatggtttggtaaaatctgaaggatacatgggaaaactgcttcacaagcttcacaagctaccatatacctaaaagaggaatgagacaaacctgcactttgtcaacatatgtaagtttctccaccatcgttttctgagcccattgaaccaagaacagtaaaagatctggaatcccttccccactgaaatatcaatatccaacattaatcaattagttagttagcatggttgacctctatgttagactaaaatttggagatagcaaaaacatttcagacctaatagcgctagcaggtaggatactgatagtttctcccatttctctgttcttggtataaagcatactggtgagtccttggtcttgggactggtttttgacctggacacaaatg

SEQ ID NO: 26619 - DNA, 1289 bp, Arabidopsis thaliana landsberg
tcgcacaatgctgacgcagcaatcggaaactcccttgtcgaggaatcggaggagaaagacgatctgaagagcaggattttcagattgagacttccgaaacgtagcgcgactactgttctcgagaaatggattggagaagggaatcaaatgactatcaatgaactccgagagatctctaaagagcttaggagaactcgccgttacaagcacgctcttgaggtactaacatcgatcatttcctttttcattggtttttcttcgtagctcctagtttctagattgattgcacaatttatgatttgttatgtgttgctgcacaaaactgcattcttctgggagctaattcaagtattattaacaggttacagagtggatggtacagcatgaagaatcaaagatctcagatgctgattacgcctcacgcatagatctgatttcaaaagttttcgggatcgatgcagctgaacgctactttgaaggtctgcatatagattcaaagacagctgaaacctatacttctctccttcatgcttatgctgcctccaaacaaaccgaacgagccgaggccttgttcaagagaatcattgagagtgatagtctcacttttggtgccatcacatacaacgagatgatgactttatacatgtcagttgggcaagttgagaaagtacctgaggttattgaagtgttaaagcagaaaaaggtttctccggatatttttacttataatttgtggctaagttcatgtgctgcaacctttaatatagatgagcttagaaagattcttgaagagatgaggcatgatgctagttccaatgagggttgggttcggtatatcgatcttactagcatttacataaacagtagtagagtaactaatgcagagtctactttgcctgtcgaagctgagaaatctatttcgcaaagagaatggatcacatatgacttccttatgattctgcacactggtctagggaacaaggttatgatagatcagatttggaagtctttgagaaacaccaaccagatattgagtagtagaagctacatttgtgttctttcatcttatctaatgcttggtcatttgagagaagccgaggagattatccatcagtggaaagagtcataaacgacagagtttgatgcttctgcttgcttgaggatcttgaatgcttttcgagatgttgttttagagggaatagccagcggctctcacttgatcttggggcataacaaacgcagcttggagaaagaaagatcatcttaagatggagaaacaagtaggggaa

SEQ ID NO: 26620 - DNA, 2361 bp, Arabidopsis thaliana landsberg
  unsure (1)..(2361): unsure at all n locations
tgattaggtggactatacggtggccctcgctatcattggttatttggagcccttcggggctcggaccggctggcgtgccgatggtgtgaaagaatacgtcggagggcaggggctcgccctggcggcggccttggctaatgcatcggcctcctcattcttggccctgtccacatgctgtagggtgaatcccttgaactgcctctcgagacttcggatagccgnnnnnnnnnnnnnnnnnnnnnnnnnnnnnnnngcatagtctttttcgacctgaccggcgactatcttggagtctgttttgatgatgcatgtggtgactccgagggcccttagcttgcggagaccgaggatgactgcttcatactctgctatattgtttgtacatctgtcggattctagagcgaacgtgaggcgtgctgcatatctgtgtttgactccggctggtgaggtgacgactgcagcgacgcctgcccccgcatggcaccatgcgccgtcgcaatggatggtccaaaccttctctgtggacgggtccggctgtgttattggcccagtccagtcgacgacgaagtctgccaggacatgtgacttgatggctgtcctgggctcgaagctgatgtggtagccggagagttcggctgcccacttggcaatcctcaccgatgcctccgggtttctgaatagttcgccgagccccctgtctgaggtgactcggaccttgannnnnnnnnnnnnnnnnnnnnnnnnnnnnnnnnncataacaactgcctaggcgatcttctccagctctgtcatgttgcatttggacggtgtcaggacttcggagacatagtaaacagggcactgtctgaccgcgccctcaactgtctgctcctgcactagtggcgcgctgaacgcgtgcggcgacgacnatttagagcaatagggggagcgaggagtcggggcttgtgaggatggccagctccgacaggtactgttttagtgaggcgaaggccgctgcttgctccggtcccaggcgaagtctctcgcactgcggagtgttttgaggaaggggagacttcgctcggcggacctggagatgaatctgttgagagcggccaatctgcctgtcagacgctggacgtccctggcggactgcggaggcgacatgtcgacgatggcctggatcttggttgggttggcctcgatgccgcggtgtgacaccaggtagcccaatatcttgccctggcgaacaccgaagacgcacttttccgggtttaggcggagtcgtgcatctcgcatgttcgcgaatgtctcggccaggtcggcgagatggtcctccttattcttgctggcgacgacgatgtcgtccacatatgtaaatatatttctgtcgacctgcccttcgagtactgttttggtgagtctggagaaggtggacccggcattcttgagtcctccggcatcctgatgaagcaataagtgccgaagggtgttataaagctggtgctagccttgttttcctccttcatgtatatctggtgatagccggagaagcagtcgaggagtgacatgacctcgcatccggccgcgctatcgactattttgtcgatccgcggcaacgggaaattgtccttcgggcaggccttattgagactggtgaagtctatgcacattcgccatttcccgcttttttctgcaccattacgacattggagagccacgtggggtaagccactggctcgatgaatttagcttctaggaggcggtgcacttccgccttggcggcctctgtcttttcgtcggacattttgcggagcctttgcttttttggtcgcaccgaagggtcaattcccaagctgtgctcaattatggatcggctgactccgaccaggtctagggcggaccaggcgaagacatctttattcttggccaggcagcagagaagcttctcttcttcatgtgacgtaaggtcttcgctgatagtgactgtctgcttgggggtggcctgatcaaggggaacagtcttggttccatcttggctctgcaactgtgccttctcgtgcttcttatcggttgggctggcgggcgcagggacctcgcactgggtcgtgagacagtgtacgttcctttgtccaggcacgaagtcccgctctatgttgcgcgccgtctgctggttgccgtagatcgtgatagcgcctagcggacctggtatcttcatacataggtacagtccgtggatggcagcttcgaacttattgatggagccccggcccatgatggcgttgtacggatataccatgtcgacaatgtcgaaggttacttgctcacttcgggcattgggtgctacaccgaaggagaggggaagctctattttgccaacgg

SEQ ID NO: 26621 - DNA, 979 bp, Arabidopsis thaliana landsberg
gagcaatatttccgtagagttttgtggagagataccagggtggaaataaggacaattcatatcagaaagcagagagaaccgatgataataaccgttcaagaacaagaaatcaaagaagtggcaagaaaagttgcttaactgcagaggtcaacaaaactatgagtattgaattgaatgtataagtatgtttagcaacaaaaatggtgaaaactatattccatagtattaactgtaaagacaaagtactggttactaatactactaacccgatgattctgcataaccagacaatctgtaccgagttttttcaacagctctggaggaaatctgcactatgagacattacaaattacatatgaaatatttgactaatatttttggtatctgtatatacacatcctcatgaaaagctggattacctttggaatatggttccttggatattaacattttcaacgaactgaagacttgatgcagaatttcttgcatccattttttcaaaaatgtctctgttctgtttacaaggccacatattagaaattttcaaatggtgttaaactacacaacatctggtatggcttaactttacagcttagcaaacacatatgataagcaagaagaaagggtcacctggcttatgatcattgtcaagagctcaaatccgaggcaaatagcgtatataggaaaatgctctccagcatcatttctttccaaaactttctgagaggatatcatagagatatcaacaaaaaaaagcattgtataggaattatataaatcaaccaggaaaaaaagttgagcttacattgaagattttcttgacgatttcaaaatacaatccttctttagcccaaccaccagttagtatcacaccgttgaccaattctagcttctgcagttccaaatgtaaatcaattttggaagcaatcaaattctcaagctagcccagattacagaatcggctgagcaaaatatcaaa

SEQ ID NO: 26622 - DNA, 843 bp, Arabidopsis thaliana landsberg
actaccaaagtcaaagtatcttagtctaaatcttttaattgattatttgtagagaaaaaaaaaatatgaccacaaaagattatgtccaaaaatattgtaatatttgacctattccaattttaatttgttttaaaatcatttcccaaaaatttcactacaattttttttctaagaaaattcttacatgatgtatctaaaaatcgataacggctaatttattttagggaaaattggataaaaaaataaataattgaaatattgtccatctaacgcatgcaatatcattgataatttttattcaaatacgaagtgacgaagcactcactttacttaggatcctttacttaatatcataatataaataaaatcttatctactgactacatttaaaggaaaaaccttatctaaaactgctacaattcatagaatgagactttgaaaaactttctctcccaggcacggtacccaaggaggatattagaagtatgtctcccgcttttaaccagatctatgtttccttttgcatcccaaaagtggaaacttccaacggttattaaccaaccctaatgagctccgacgagattttgggtgattccgacgtctcctcctccgcttatcccctctgtttcaagctctaatttggttttacatcttactcccactctcctcaagagttctctcaggtagttttctggtttctcactatgtctggtctgcctgtgtactcttgtctcttaacctcttaaacctgtgcaagcttttaacccttttaaaccttactgcttctccgagagcatttatttgagtcctgaagagctatctccccaacctcttaacccacac

SEQ ID NO: 26623 - DNA, 2239 bp, Arabidopsis thaliana landsberg
gaatgattctgacgacaagaaggagatgatagaatgtgaagatcaaaggtaactttcggttaaataaactcaatgcatgattctccatctgaggtactaaaccagctctaatgacattggttatcttgaacctatttgtcctaatgaatctatctgttgtatgaaagttaaggctaagtgtttctcctaataatatcacacattagaggaattttatcagctagcttgtgccagaggaaacagaacttaatgctaatatatatgtgtttaatgagccaaaagaaataaagcaaatcaacattagctctataagcaaaactttgtagtcatggaatttaagaggaaatgagatgatgagttttaaagtattgatgctcctgagtgctgaatctaaacagatcatgttcgttgtagttcaatgcacaagctcccattttaccactttacagatctgtgtaatgacgtttcaagttcctttactagagcaaacctagctaaaatatattgtcaatgacaagaacagagcagcaaaaaaaacagagaaattaagctcaatttccagattctatttgcatgtcatggctatctttaaactacctagcagcgccttgacacacaatggagcagaaaaggcgagattttgctgttcccagcttaagctacttggctaacaagatgactaagtacccaacaactgctgtagatattccaagcattccaccagcaataacctgatgacaataaaacgatagatagtctcaggtactaaccacaatcattctcttacttggtgtgatctgacacaatgagacttacctgcggaggagtatgacctagaagttcacgcaaaggtctggtttcagccagaggatgctctgcaggaagctcatacacaatctgatttagaacctcagcttggcgtccagcatgtaaccttacaccagttgcatcatacataacctaccaaaccaaacaatcttaatcatcccctgaagtgataatcaagaacaggtgattaagtgattagctataaaacatacaatggtagtgagaaccaaagcgatagcgaaatgtgaaccaccaaaaccttcttgtaaaccaacagctaaagctaaagctgtaaccgttgctgaatgtgatgaaggcatacctccagacccaacaagccgtttcaaatcccatctcctttctttatacctacaccaagtagttgtaaaatcaaaattctacaaactagtctgtttctttaacctagacagatatgaaaacgtaccaggaggtgaagaatttgatgaattgtgcgatggtgaaagctaaaacggcggaaatcagagggtaatttgtgaaaattgagatatagtgcgaggaagatgaagccaccgattcctccattgaattatggtgatcgattgatctcgtatcgtaaggctctaatcgtgtgataggtcttctacaggataaagaacatacagagaagacgtaaagttgcgtgtagaaatcaccttgagactctaatggcttcttcttattcttcttcctcaaattttattttcctagttttctcgctttttcttcggcaacaaacaacagcttttatttattgttttttactaacaagtctacacgacctaagattaagtacagatgagattattacctcttttttttatcaccgttattattataatgacaaacagctacaatatcaaaaaacaattgacatctgaaaaattgcatattatctgaaattatataatagaaatattttattttataaattctgttgatatgttaaaaaaaaattcgatattaatatacgtatagagctttttattgttttaagtttttatccagaaaaaagtttaaaattctgctagttggtttaaaaatgcacattcacaaaaatatagcatgcgatattagaatactgaatacacacgttaaattaatttcgatcaatctatgattgatcaggttatcagaatatgcttctctgtttgctagagaatatgctttttaggctttaagtgaaaaacaacttgttctttaagccaagagaatatccaaaatatgttctagaatttaagtatttaacaacatgagtttacatatatatagagactctacactagggcttaactactgactagttacaattatagccttaacctgtacttgtctttcgcaagtctttggctttgttttggtgagttttggctgtttcatggttacaggttta

SEQ ID NO: 26624 - DNA, 1171 bp, Arabidopsis thaliana landsberg
  unsure (1)..(1171): unsure at all n locations
aaactcctaaactttctaaaacgcatcaagtctgaaagggattatggttttgatgtcgtttccagagcagtgggcgagtagcttgagttctactcgagttaaagaaaaggttgactttgaccctcagttttcattgctgcttctggatagaagactgcttaaaagcaataatgctccaatcaatgatgaaggaacaatcaatgtttttgatcccaatgtctaccccaaggcaccagctcagggagatgatatcatatcctggttaactgactacaattcagtagagaagacttttcccnnnnnnnnnnnnnnnnnnnnnnnngatatttgggtggctgttctgagagctgttcagttcacgtgtaggactttgagaaccaaatatgaaaagaaattgcggatgatatgttatgatgcagctcttattgacgccaataacttatgtatacgtgaagatgaaaggagaaggaatattccggaagatcagtggaccttatatgcatctcttctatgcgataaatgtgaagagaatataaggagagacgctggagattctctaactacaaaactatctttgtgtgcagtacgagatgttctcggaggagcatcgcagccgacatttgatttcaccgatctagtagattgcaggaatcttataaatgggcataaacatatcagtgatgatatagtattgaagtccattaatcttctcaaatctgtggtcacctacaaggtttaatcctgttctgagttttagttaacaacataataacagaaattgtcttaaattagtaatgttatctattgacttgcaggttccgctagtcgattcaaagattttgttggttgagaattcgaggattagtttgctaaaggaccttgtcagcctttctgtttttgactaccgctcttatatccttcaaccggtgaaactttacttagaggttagttggtaactttggctttatacaaagatctttcatcttccctttgattttctgttttaacatgttcctttcattataatgtatgtatcttcttctaggaagagttagaagatgcagcaccaccataacttttatcatagaaaaaacaagagatggagaggaagtcagggtcaaagaagagaaaccatataagcacgaaggtctttgatggtctaaactctatg

SEQ ID NO: 26625 - DNA, 1547 bp, Arabidopsis thaliana landsberg
aatattcgttaattaacaaaataaaaagttatgggaaatagttttatgttctaaatcaaaattcagaaattattacttatgttttttcagtgagcaaaggaaaattacatatcttagattctgaaacttaaattctaaaattaaaactcctaagctttcatagattttaaaatcttaagatctttttgtttttgttttttgggcaaacaaaatcttaagatctaaatcttaaaatactttccacaagccgttccactagagaaaaatctatatatatatttttttaaactatatttttgtattaaagaaaagtggaagagaaaattcaacacaatctgattattgcacaatttcttagtcaccataacgtgtgcaatgcacgtgaggcccgtctaaaaagacttttattcctctgtaaaagagacatgtagaaaacaaaccaagatcccacagcttttgacttttaaattataattttaaaccaaaaaaaaatgtatagttttttttaaaaaatttttgacagcaattataaatttcttttgaagattcttttgagaaaattcgaagaagtagcatataaaactaggagaacacagacttgattcattctacaacaactcctcaaacatgacccaaaccaaatcagagtttcatcagtttaacaaaagcccaaaagaacgcagtgaaaatttggaaacatcttcggtttgattcaatataccactccggtttaccataaccaatttaccggacctgaacaattccggcactaaccagcttctgaatcttgttcattaccattgggttcttcatatgctcttgtgcagctttcggattctcttgaaagtccactagtacctacaaaattcattcaatagacatcatcacacaagtctcacagacagcttacgagttagaacacaatgcttgccactgcttttacctgtctcatcactggatccgataatatgttctgaacttcaggatcttgcattgcctttgcttgtctctccttcaattcttctggagtcagatcaccacggctcgctttgtttatctgttccacacatctgaaaacaacaacactttcactagaccgatctttgcaaggttaaacaacaaagagagaatgccaaaatttgcaaaccttctaacaccatcaagcaactcctggttcttaggatcatgttttagcccttcttgatacgtttccatagctttatcgtattccttcatgaaaaattgaatagctccttttctactgtatcctttcgtgaaacttgggtccagctcaatgcatttttcagcatctttcaatccctctggtaatgctcctaactttgtgtaacaagcagctctgttgctatatgccctcacgtcgttcgggtttcttttgattgcttctgaataatgcttcactgcctctggatacttttgttctttaaagaatccattacctgcatcaatgaagaagtgtcagatgcttaatcctaaaatcaaatcacgtttcaagatagtaagtgtaactgaagatcagtatatatacc

SEQ ID NO: 26626 - DNA, 1024 bp, Arabidopsis thaliana landsberg
acctatgcgtctcaccaacaatgcaccacgttttattgcttctcaaccaatcctaggtttgatctgtcttcgaaatggtagtgaggttgtcattcacaatccgggtacaaaaaatattcagactttaccgaagatcaaagctccatcattaagtttcaaaaaaacttttttcggatacgatggagttacggaagtattcaaggtgttatgtataacagggccccgcgggtttaagccctctaggaaatgccatgtttacacgatggggcccggtaaaaattcttggagacggttcaaatgtaggaaacgtcattatccatctactgaagtactatgtaaagaaggaaatttgtactatggagctcagtccattagtcgcaaatctctattaatgaggtttaatgtgaggtcagaagagtttagtgtcattaaattacctaatcagcaagttaacttttgtcgtggttggaacttggttaattacaatggtaaaattgccgtagcgaagaatgttgacgtcgacactggagatttgcaaatgtgggttctagatgacatgggagaatggttaagcgaaatcattacgattcctcgttggaaagaaactaccaataattgcacgtatcatttcaaaggtaccattggaacaggagaacttgttttcgctcaagactctgtgattgagggatcattctatgtggtttattataatacagtcactcaaaatctcagaagatttacgattgaaggtgaagctagagatcagcttcatgatgttcgaaccttcttggatcatgttgatagtacttggcttatgtgaagaacaagagttaggttgttatgcatgtatatgggagaatcagatcttgagtgttcgtaaaatctgttcacatttggagatttttagttcttttttctcgacaatatctatgaagaaagataaaacaagacagccgtttgttggtatcaccagaaaagtatagacttccatagattgctccgtcattaccttttttcttttcaa

SEQ ID NO: 26627 - DNA, 1838 bp, Arabidopsis thaliana landsberg
gagagagagaaatagtgacatgtccttgcaagagacaggagcaaaaggtgaaagaaacagtagtttggggtaaaattcataaaaacacaaattgatggagacatagtgtttctgcttcttctccttcttcttagtcactgatgcagagaagaaaggtagtcactgatgcagagaagaaagggtccccaagaacacagagactactactaactggttctctctttgtattacattattaaccatttctaaatcactcagacttgaaacaatcacgatcacgggttcatcataaagatagggaatacaactgaacaacaatctgtttcttgtgaaggaaaatgaagtgttttgtagttcataaagctactagatatcttattgaataatcaaacaagggagatattttttgtcggtagagatgtgtcacgcgcagtctttcccccatcagtacgttacaagagaaagacgagatgagcaaaaaacctgcaaagaaggataaatattcatactcagtctggataaatggaaactcaaataatactagccatttaaatgggtttttggagacagagatttccccgcgtttttgcagtaagtaaagtgaatgcaaggcgataccaaacaagaatatttgaattactaaaacagatgcagcagttttaacttgtagcaagctaaaactggtcaggactcagaagctagctaaatctcttcatacaaacaatctatctacctgagcatcacaaagttcatctagtcaagaccaaaatgaaaactcacactctctggaaagttacagcaacagggagaaatagaaaaaacctacaataaacatgacagtaagcacagaatgccctaactctaaatctattgcagctaatagtgcaggacaaaaggtccaaacaattccccccctgatgccatcatgttcttcctccacctaagagctttaatttagaactgctcatcaatgtttggattctaacctcacagagagaaaaatacttcaaaaacgaccataaaacctagaaaaagcttactatactgtaaatttagtagaatcgaattggtataacgatggctcactcttgagcataagtttaagttatgacctagcccactagcttatgaccccaatttcactaagtgacatccccaattcccaatcgaaacgttattcagtcactcggaaagaacttggtaagaaagtgtacaactttagaaatcgaaccagaagccaataatgcacttagccatataacaaagcttgattcctaattcctaaattcaaaagcattcacctagagccttacacgaatcggtaatcacaacatcactcatgctatattacttgggaaaacactaaagcctaaaatttcaaccttgcagaaatcaagattcattttccaattaagaaactttaactacaacaaatctagaatccagaattccccacagttatctagtcagccttgagattagatacgaaccctaaaactaaagtcgaaaattccaatgccattacgaagaaactaaatcaatatatccaccacaaggtccaaaacctgattacatcagctcataatccaataatcaaatgaatccgaacacaagaaaaaaaaaactcaaatttgataatcacctgattatttctcgtagcctccaccacgcgtatccaaatcctcctcgactgtggtggtcaagtaaaccttagggaagtccgagacgtcaaaactcttcttctcgttcatcatctgaaccacgttgtccttcttcaatacgtatcgccggatcggtgggcggtttctgcgctgatctctgccgtggtatacgatgtt

SEQ ID NO: 26628 - DNA, 1845 bp, Arabidopsis thaliana landsberg
gtaaagcacgaaacttaatccgataccctcatgggccacctgttaaacatactcatttgtctattatattatggacacaaattaaatcatatagttcagactttgaaagatgctctaaatttatcatcaccatccataaactaatactaaactctttgtatgtactacttctctatttttgtagctcgatccttacaaaagtgtggtaggttagtggttagcacttgaagttagttccattgtacccctatcttgatctttcttgggatgagtagtgtttccaaagagaagaaactaaatactgacttcggatccacataaattaggtctagttctgaacttcgtggtaataaataaaaagaaattgtaagatatgggagcaagtaaagtaacaacatacgatgggccctaacttgaaatagctaggcatcattccatccattaaaatttatctatcttcttaggaccgaagaaaatcgggtaccgaacatgaaatcggtaaaaggacttgtgatcttcaagggacatgaagaagttgaaggagtaagtaactcttgatgattattactattttcattataatgatgatctaccatcactttgtggagtccttgatcgtgaagaatccctctgaaaacatgtcctccaatgttcaccgtggtctgataagcatattgctcttttccatcatcgattgaactcacttttacgcatcggaaatctgctagggaactcaactctgccggaaaatgtccaggagtagtgtggatttgtacacctaaaataggaaagaatgtttcaacacgataagtctgtttgtctaataattttattagcatcaattatttttcttaagtaagccattaaagtaattagtgaaaaaacaagattcctacatttctcaatttgtcaaagatcataactagagacgtttgtttatatatttactacgtaatccacttcaaaaatcaagaattcaaaaaataataccaaaaatctaaaatcaaaagcaggattgtgatcattttacatgatcaaatagtaacatcgagaatagaggagaagaaaaaacctaattcctatcgattgatataaaaatagacatagatcactaaacatcatcacaacacacaaggatacatcaatatgtagtgtacttatttgcacttactagcaagtcttgtttaaagttcatgagatccgaaaatctcatttctctatctttaggacatatacaattaactcagaaatgaaatgaaatttgaaagaccccaaaaattcagatgttttatggtgagagaaaaaaattaacatgagcataaataagagtaggagataagaacctgatgaaggacaaaaatttgaaagttgttgttgctctctcataccttttgggatactagtagagagcggttgcgattggtgtttgtgatgagatgttctataggcaggaacccaagtgctctcgatgtgagtttggcaatggaaggctttggatttgcagcaagttctgcatctcatgtacacacaatctttcttcgcttgattcccacaatcttcacattttctccccattatcatcatcatcattacctctgccttcccattatatacatgtgtatatatatataagcatgatatgtgtgaatatataatttagtataaataattgttagaagatgtcgaccattttggctctctttgtttgcttcctctttatgtacaaaaagagaaagagaataagtctttttttatagttctttgcttttccttctatgaataactggaaagttcttgttattctttttaaacatcctaatgacatttgacttgggacgctacaag

SEQ ID NO: 26629 - DNA, 1417 bp, Arabidopsis thaliana landsberg
gcataacatcactgctcttcgacacagtttaatatatctggagatttcatttttaaaatgagagctcaactacacctaataagcatacacatatacagactgagctaacctggactctccgatctcaatcacattagtaacatcaactcataaaaagaatcttaaaggtttcaacaagaacaaggaacctccatttttaacctaaagctatgacagtcagatccagaaaccaagttttgcagaattcaagtaacatctccatctctaggaaatatgcaaataggaattaaccctctatgaacctttttcttctcacaaatactaatgagtgtgcttctaatccctaatccaattcttaaaaccccccaagataaaatcatccaaaatatagattccccaagaacattagagttcaagaacactgatcaaattctcatccacgataaagaactgtgatgattttgctatccctaacacatcacgttagatcttcaaattcaaaatttcaaagtataaatgaagaagcaggtaaaccctaaaccctagaagttcatcacattcacaaaattgaatctcacctactacacaagaaactggataatcttagctttataccgaagttctaaatcaatttcacaatgaagaatcaagtataaaccctagagttacaatgaatctcacctccgacgagaaaagcgtaaccaagagtcaacttctgcgacatagacagaggcgtgctcttcttcccgtcactctcctccttatcgtcttcccctccgtcgtcatttccatcgccgcctccaccaccgccgccaaatttatcacctccaattccaccaccacctccgtaatcgttcgtaggctcgacttcaacagctttgactcccgaatcaacgcagttagcagtaatcgtactggtgatcgtcttagtggagtcagagggaactactgcaccgagaggaagtcgtcggtgaccagatgcgaacgccagaggatgaaaaccgttggaattttggaatctgacacttcggatcggtgaagcagtggaggtattgagtagatagagattaggtctgacgtgaaggagagaggattgtgcagaggaggaactcaaaatcaaatccgccattttcttcttcttcttcttcgcaagctttttgtttaacgactaattttagtgattgattgattttggagaaaatcaacaacaaaaaacgttaatcaaataatgaaccttaaccggctaaattggtcttatctgcaaaccggttttcattaggtcttactttattaggcattgcaatcggtacttcggtccgggtcagttcggaaattcggtttgtttgattaataaaaaatctaaccaaattaaccgaatttgaactacggttttcctcagttctgaagtgatgtattt

SEQ ID NO: 26630 - DNA, 1191 bp, Arabidopsis thaliana landsberg
ttaaataaattgaggtagactaaagttcattcttttcaggtttactcaattttaaagtatagaaatttaagattcatatctaacttttgttgtatttgatatgaaaagtcatcggtttgtattttaccgaatttagataactatttacaaattattattttgaactaattatagaaaacaaatacaatgcgtgtccagtaaatcaaagttgagagatttctttctcgtttttaagcattcaacacaattttttctatttgttatttcggaggcctgagtccacattttatatgaagcataacatggaaaataataataattattatttttcgaaagcgatcttttccaaacaaagaagcctcaaacactatatacgctacaaaataacatctcgaccttgtaacaaagaatgcattagatatttttttttttaatcaaaattgttgagatgagcaaaagcacagaacgtattcaacttttcaaaagggttgtggcagctgaatattatttgttctatgatggtaactaacaatttgtttattttttgttctttatagtgaaatcttttgatttgatttttctttttgttgttgttagttttgttggaagccgtcaaagacatacaaaaattgaaagttgatctaacgatagaagagaagaaatgcttagaaatggtaaatgagaatctatttaacgagacagtaaagatactaaaaccgctcgaagatatgggtatgaggtctgaagaaacaatcattatagatgataatcaaaagatgattaaagagtatttggaggacaccttcatagtttgtcataaaatatgtaaggagattcaaaagttgggtatttgccctttgtgagttaagtactcttatcgtcctttttctctagagatttggagggtttttcaatatgaattagatatgtaaaccaatattattcaaacatgaggtataatctaaaaaatgtgaaaggaaagatggaagggatgaggagagcaaccttttttattaatgataaaatttcattggaaatgataaacaaattaaattatggaataaaaataaaattattcaaaaaaaaaaagttgagttgattttggttcatttagaaaaccataatattaattcgattttcttttgttaaatatgggccaatttgaaagatcttatttgtaaaatatatggg

SEQ ID NO: 26631 - DNA, 957 bp, Arabidopsis thaliana landsberg
gggtcccaaagcccgttcatcccattcctaaaccccgaagcagtggaaattaaaacatttattttggttaattttggttttaaaaaatgattttaatttagaagaaaaaataattcaaatcaatttcaaaagatatataattttaatccatttaaaagatatataattcaacagatatcgtaaagtagaaatctcggaaaatgtatattgggagtaattagttgatgaaaaaaatctcggattatagatatgtgaatacacccatgtagaattttttggagagatttttggaaacgtttgttgagcgcaatataaaatttttgaattttcaaatctgaataattaataccaattaaatatactgagagatttttggcaactattattgaatatgatatcttgtatttaattatcaaaataaaatatttaatgccagtggcatgccattgtaaataagtgtcaattacaaattttttttgctaaaatggctgcaaaaatgtatatgtagattccaacaggtcggatcgcgtgttcacccgttccagaagcccaggatccgcgtgttatccgaatttgactggatatagatctgacccatatatccaggatccatgtgtcagagtgtgtcaaattgcccattttaccccttgatgaaatctcttagtttgctttagtttgaatggcattttatgtaatattttactttttattgggttatttatttttaagtgattcccaattaatattatagatcaaactgtttctaactattaagttagtgagttttgttatctattcctaaccttaagttaaataagacatgctttgtacactgttctcttggtgaatacagaggaaaattcactttagtcattttgatatggattaagttttgtgtgttaaatctgtgtgaaggtatatgatactcctcagttggaaagttgtagttcaaaaaca

SEQ ID NO: 26632 - DNA, 1347 bp, Arabidopsis thaliana landsberg
  unsure (1)..(1347): unsure at all n locations
tgattgggtcatggattatgtcgtttccaattgatacccgtctcctttctcctccagacactcctctgtggccttcatcaccaatcacggtattgcagcgctctttaggcctaattggtcaatcagagcttgaacccttgctttcttcttcttcttggagagtgaacgagggagcctgaactctgcagagaacattagagtttcctccacggtaagcatcgggaagagaaggtcgtcttgcatcacgtaagccgatatgactttctgcatgcttgattcaagaacttctccgtttaaggtaatggatcccctgaggctatcttttgcgatccggttggctaatgcatcgatcagtnnnnnnnnnnnnnnnnnacttgctccaagaaccgccatcatctccccttcgcgggcttcacctgaaataccattcaatagtatcttagtgttcaccgaggaatcatttcctgaccttctgcagcaagcgaggggattaaacttcttctggatcttcacgctgtaggtcaagtcagtgaatgaaagaacaaacggggaagaagatatagaagaagcaggagcagaggcccatgaattgaaagaggatgcagcagaattgataggtgaggcaattcccagagcccggctacttgcactttcatcattccttgcatcctccacgttcataagatgctcggcgaatgtgacagagactctagtcgtgtcgcttggacgtccttgaggctccacggacatcgggtttacataatacataggaagatcattgttgccatcaacccgtttggccggagatgattttccgagcaagccagacattttctatgtatttttgtcttaatcttctcaggttatgtgggttatatagctcatacccacaaagaagacacgaataggatataggaggaatgagagaagagactactataaagtaaagagatatttttttattataagaatgaaagagatacgaaatggtcaatatagtaggtaatctctaagtatctaacgatagcttctgggttttgtatgttttgatgtaatgtagaaacctaaaagtaaatgggtaggtgagaggaagttgtacaaaaacccttctcgatttttcttcctcattatgtttatatctatttcttggggcttaaggtagtttgaaaattcgctattttctagagttttaagtaactatttgggtttagttacacgggtcttaagggattgaaatcattataggcgtaattagtgttgcgaataacgtacgtgcaaaattagatttgactgttagtgagcagctagctgtccaaatcgtgccaaagcggcaaactcggagctatc

SEQ ID NO: 26633 - DNA, 1921 bp, Arabidopsis thaliana landsberg
agtgtaattatgaaggtttctttcttctaccttgatatgtagaacatatgctttctggtcaatagagtgccaagcctcatctggagctatctgtgcatcaattgaatcatttcagtcacatctgaaccaaattatgaatcacatcgctatatctcaatatctcatactggatgcattatcgcagcataggctaataattttcatgccctattctggatgatacaggacacgcaacagatacctttggagataaggtagctttagaatcatcttggggagttgcttttgattttgcatgtggagggaagttcacagataagaagttcagaacctgcaaagtttgtgaaaagacccaaatccgatacacggagctggtcaacatgttgacttgtgggtccggcccaaaacatatttaatttcaaaaccgcaaactaacaatgcaaaacaaactcttggcttgacaaacctgcaaaagagagagagggatgagcaatctaagattactcagtgaaggtaagccttagggctcacgaattctccatacacaaacatatctagaatcacaaatgggactacttcccataaccgcattaatggcgggtccgatacaacgtggcaacacacgcttatcttcgtgctacggatcacatgtacatgttcctgacactattcactcgtgctacggatcacatcatgcctcttgcacttgttcctagcacttcacactcgtcggctcgtcagccatcctgatctatctgcaaacccgcatcaatagaccaccacataactacaaggattccttcttataggattctctgcagctcaccgcatctttgtgccattgacacattctctcatcacataacaattattttatcacaaaatagcatgtatttctcaatatcacatcatccacaaacacatttattttctattccatttaatactagatagtgtcctacaataatatatttataaaatatatatatacataaaagaaaatttcacgtttggacacctttgtgactttttctttcacaaagaggcaaagtgggctgggccaaccacgttttagccattaggtccaaaatggacgaatttgccttggaacgaaaaactgacggagccggttcagtttcgtccattttatttttctggttacaaaaataattttaaattatttaaaaaaacgtaaataattttaaaacttaaaataaaatcaaaacttttattgcaaaacaaataactaaaactcaaatagtgttgaacggttagtagaatctcgattgagacttttattgcacaacaaagaactaaaacccagatcgtgttaaacgtttaattagattaagggatttccagataattggagaaaaggataaaaaatggtgaacaatatgtgttcttgagtaattgagttaacaactagacaattaaacaaaactcaaattctttaactttgtaaacttaaaatatggtagatatacaatatttatatgtaagaagcattcaaaatgtaaataaataaaaatcaagattttttgagataactgttaacaacagctgcaaaattagggttgtaggggttgaagacgacttcaaaattacaattttacccttatttaaatttcttatgtgtacgtatatgtaatttatggtgtacgtatatgtggacatgtaaatatgttagattatgttttattgtaaagactgcgtacacaattatttattgagcttgtacattagaaactattggttatttggattagagggttttcccataaaatcaatgcatatataaaaattaaacaaaaacatatggtcaaagtataattgttcttcatacttttgaaaaatgttaagtacgtacatgtataataatgtacgtatatatttattagtgagttcaaattgttaaata

SEQ ID NO: 26634 - DNA, 2158 bp, Arabidopsis thaliana landsberg
tattaatcctatacagttattatcacgaaaagataagctttttttaagacgtttctatttgtctcttccccattggcacctacttggcatggtatttccacagttccacaccatcagatattcatattacacattaatttgatctagttgtttctcaaaataaaacaaaaaaatttcgaatgtggtttagaatatttattgtccattcggaaaatatggaataatagagttctataattctatcaacaattccaaaattggtggaaaaaagtcttcttgtctgataaagtcactactataaattactttttctatcgttaaaaaccaaattactgtgtttgattctcatgtatcataaattgattagagatgcagtaacggtaataatctaaaaagcaggacaaaacttaattcattcgttaaagaaaataaaataaaaataataaattcattcgttaataaaatagatcttcgtttgaatattacgatggtatgaaaacaaagaaaaactttgtgaacgtgacaccatactgataatctaacataaaaagtcctaattaattgtaatatatcaaaaaattaatgtcacacgcggcaagtcgaggagcttgcaaatacaaacaagccaagccatcgtttatttagtaataaattaaaattatactttttaaaaaaagaaatgaagaatttgtcttctcctacggctcttctcagaaattgcgatatactagttaaccacgacacgtgtgtactttgctgggccaaaatattcaggcaccaccacagatcaactgccatgtcatctcttctatcaactttgatgtcccaaagcattgaactctctcatctctgattataacacttggctagttttcgatggctgattttgatactttttgattgccactttctgataagttcaataagactttagaaattgatctcttacgttaaattttagttggtacttctttttggtttaattttagttgatacttgatagatataatttcgaattatgtttttttttacaaatatcagatttaattattaaaaaaagaatattagggtttgaaaatatcttatctagatggccgaatttaatttgttgtttgtatttaataagtcaaaagagatttccgagaagcaaggtgaacgtaaccttaaactaatcattagaacattaattatataagttgcgtttatcattaatattgttgcttaaaattacaaactttcaaaatcccatggttaagataattagtgtttcagagcctaagacggaacggaacttgtgtaattttgtaagaataaacatattaacttcgtgtctaaaaaaaaacatactacactaacttcgttttctaataagtaattgttgtagaattttaatttatttctgtttatgtaaactgttattttgtatgtttaatgcatatattttagacaagatacttctatccataatagttagcttattaatagaggtataataatctttttagatttcatattatatttagtactattggttttagaaaatggaaaaaggtcaaataaataataggaacaccactggtttatatttcttttctggattgtgtatactttttagaagaaaactaaaacggcatgttgaaaaggaaaccaagaggatagtaattaggtcagattacttgtttagttacaagaaagtcaagaaatctcataattgagtttaaaactttaaacatttgcatggaagtcaataaatctataatccttactcgtgatcatcttattgtttccgtgtaacgaaattaaacgcgtaaaacatcgcgtaaactatagtacggtatgtgatatgcaaatatatcttaatttattttttattttttatttttcttgggcaatgaattgaagagttgcaaaattatttgccagcttaccacatgcggccacaattttaaccatgattaatcttcttttggaatttagcgagataaatcaagagtaggtttattttagaacatagtatataatacactaatgaaaagtctcgttaaaacgtgtttcacgtaaccgacctctaacgtatggcgtgcgagtaacgacaaatgaaatcacaaatgaaaatggagattattttaatcttaattataacacaccgattaacgcc

SEQ ID NO: 26635 - DNA, 1561 bp, Arabidopsis thaliana landsberg
ttatagttattgtggattgactttattttacatattttaggttttgtttatcatcacaaattattttaacaatcaccatctccaatcttttacgccattaatattaatattttcataatatattttagcagtcagatttataaattgtacctatttattttgttttaaacagtaggttaatgataataatattaacaatttacaaaaaattatgtattaaaataacatgattattttttttttgtcgtttttgttacgctgaaaaattacatacccaatttaaatctcacttccaaaagacataaaaggattgttttttactttgtgaaaattacatattgacagtcctattttgatgggcctaaaaatggcccaatagtaattagtttgggcagcagcatttcacctctgcgacggtcggagctcatcttcaatcataacttcatcttcttcaagcaaatcaactaaactctgatcaatccagaaggagcgaaagagaactatagatcggatgactaaattcccaacaaaccatagtttatccaaaattttccttggactaaaccggaatttccaccggttcagaattaaaccggtacggtacacccaattcagcaacaacaaacaaaaataaaccagaatctcccgatcaccgcactggttacattcccggcgccggaaaccgcctctactaccgcgtcgcagcgagtaagcatgtcttctgtcttcttcctcttatacttttcactagcgttgaaattaaggtttgaatatactcgaaataagattggataaatcttctgcaattcgaagaaattcaacgagagagagattgctgaaaaaaaactaacctaaaaagcacgtcacaaggccggcgagatatcttcaacaatggtcttcttctctttcgataaacaacaaataaaaaaattccaaaaggaagtaagaatagtcgtctctctgacttctctttaaaatgataagtcaaagtaaacaaattgatgccacggtgcttcctctttagcttgtgaatggtgtataataaaaactcttccttgctctgactttgtctttcccattttaccaagtctttctttttgtccccaccatagttgcaattcttgattttctctcaggttttgaatcttttgggtcatttggtctctcttctgctgttttcctctgaagattagagctttaccagagagataacttgttggagaagacaaatgggaggtgtttgttcttgtgtattcaaagatgatgataagaagaagaagttgagatcaaacgatgatgataagtcaagagggttttctgggaaacttaagtctatgagaagaagtaaaacctctgattcttattattcagataattacggaggctcaagacggaaaagttctaagcctgatgaggttgtttcaacttttctggcgagcttggtccgatgcctccattaaggaacgattccccaaggtttttgtttcaaaggcttctttaggatatgcacttctctagctaaagatttcactttgtattgatgagaatttggtcttgtttt

SEQ ID NO: 26636 - DNA, 1716 bp, Arabidopsis thaliana landsberg
  unsure (1)..(1716): unsure at all n locations
agggcttttgatatcattttgtaacaaagattttgtattgattgttattgctaagatcagggtatttttaatgcgtatctagtatttaatttaattagaaaagaaaaattgtggtataattaaatttttactaactagtatattaattttgaatagaacacattaatgttatagtttgtgcaagtttctttgttacgtcactacgaattttgcgagaataaaatagagttaagacataaattttgttttaatggatttatagtagtaaaaatacttctataaagacacttatattagcgaaattttaatcagcaaaccgaaactactgctaaagtttcagttgtacgccttcaattgctgctgcaaacttgaagaagataggcggctctggttcgaacctgttcacgaccacgaaccaaaaccgtttagtcagatgaactcagtaattaaaaacatgaatcgaagttaaaaaagagaataaaaggtttagatttgatatgctttttactcacttttgatgcataagaccgaagatcggtgctgttgatctgacaagaacagtttctgagaaacacagcccacatgtccctcagtacaggctttgcttctaccaatgtactagagaagagccagttctcagccaataccacgaaaatgtacattttgaaaaggttacaacttctctccttcacattgatagacatcagcgagctcagcaaattttcgtcgctgtcctgttaataatagataatcaataacagagaatgtataaatgccatgtttgctacaaacttaacttgttggtattatcttataatttagttcatggttggttaccttatgatcaagtaaaacaacaagcatttgatgtgcaatggaacttctcagatgcttgcttcgnnnnnnnnnnnnnnnnnnnnattccactaccctcaaacaatttatgtcttgaggtactctgcagatgcatcaaaccagaaagacaaactacgtaagtcaattaacagataagacaaaacagtccaaggttgctacaataacatacgaggtcgaacctggaagcaagagagttagctattttcttgcagcttgaaatccattcttcctctttgaaggatccaataacagatattaagcactcttgtaagagaattgaaagaccgagaagactgcgatctaagagcaacgatacaaggatttcggctatctgttcaacttgtgaagtggtaaaaataggttttttacacctgaatcatgaagcaacagagaaggtaggagttatcaaaatgtatgaagtagcactgaaaaggcagaagaatgttattgataatctgtaaaagagaagtttttgcgccacaaacctaaattgacaacaagttgtaaccaatgttaaccaagctctaatattctgtggaggaccttgacactcagaatcttcaaagccaaaagttagcggactccagtagtattataaaacctaaagaaaaaataaccgccaattaaagaacagggagaaacaggacaactacccgcttctgctagttcaacgtcttgtgagtgtgacagactaattctgaacccatatgattcaagagcttctttaagttcctgatagttaggaagccagtaaatctcaacagaagcttcattaacctgatttaaaaccaaagagtcagcttcaatcaaaacataatgtaataatctcaggaaagaaag

SEQ ID NO: 26637 - DNA, 1691 bp, Arabidopsis thaliana landsberg
  unsure (1)..(1691): unsure at all n locations
tttgaattcttattaactaaatttatttggtctacgggactgactagtgcaatatccttaatttcggtcccttttatctagtggctttgtctccaatggtgtctctgaaaaatttgaggggagttaaaaaattaaaaaaaaccttaaaagcaatcatcaagcaaaaataaatgaaaacattgacaaattttttaatcgagggctcttaagaaaccatgatgtggcatccatccaatggcgaaatccgacggttaatttttaactgaaaaaatttgtgtttctctctcatggttgatctcaacatctaaagcaacttatgttttgagtgctatttgtggatttttttgctatttttggaagacttttttttttgggtgctatttttgtctccccatttatttaagtgatgtaaattttgttttcatcaattatgctcatagcaaagatgagtgtcacacctggtgggccaatcatgatcgacgacaaggcggtgacgggaaagccagtttcgcaggatccaatagtgaagaagaaggatccagtaaagacgggaaagccagtttcgcagatttatgtagatatgatggacttagttgattatgatcaaatactttattacttatttgtgacaccactgatgctattaataaacccctcgatctatgtattacttattagtaaagataccacctacatttcttcctccattgaagcctgatccatgggcgagtacaaactcggtgtatctgtatccatgcagacgaaacctcggccgataccaaatatgagcaccgacaatggtggacccataatgatcgacggaaagccggtgacggggccgttagatccaccggcaccggtggtgaaagatgcggagaataagtagaagacatgattacgaaatcatgaagctaatgaagttatagaagtaataatattaagatgcatatatagtttatacttattatagtttcttatttattttttaaaacagacgttatttttgtaaatattataaactacgcctgtaagtaaaataataaataaacgagtttttaatagaagtgttctctctcgtctctcgtctctcgtctctcgtctatcgtctctcgtctaaggcgaaatccgatgagtttcgtatgaatttttagttctctcgtctctccaaggcgaaatccgatgagtttcgtatgaatttttagttctctcgtctctatctctctcgtttcatatggatccgttgttttttactaataaatttggtttctttttgatggttgggattacgaaaatatgctaaacatgtagaacacaaaaatattcaaagaaaaacaaaaacaaaaagttttttaccaaagaaagacaatggttgtaaatggtaacattgttcttgagcaattcttgaggaattcttgaggaattctctaagaatttaaattggtaacatcatttgcatgttgaggaatacttgaggattttgtgaggaattgttgatgtttcaaatttttagatttgcttgtaagttgtttactaaattaatcaatttaatcattagcgagtaaaactaaataattattaaaactacaatatttaatttaatagtaggagacttctactagagaatngttagtaagtaaactcataaactagacaaaacagatagtttaatttaacaattactactttatttt

SEQ ID NO: 26638 - DNA, 1288 bp, Arabidopsis thaliana landsberg
  unsure (1)..(1288): unsure at all n locations
ataccaaataacaaaattatttaaaggttttcaatttttacaagataatgtatattaaaaatgataaaatagaataatgggtgactttgttaacatcttggaaaaaatagaaaatttaatatgaagttgtgtctacgaattctatttatgttctagttattgtacatattcaaattaacgatgctaaatcattcttctgatattgagttgtgtcacatgttaagtatatttattttaattttcttagcatcataatgttttctttcttgtatgattaggtgcacatggaatatatgtcatactattttaaaattcatattttattaattcttttgtcatagctagccatcatatataggtagaccagtatataatagaaaaaaagaacacattcaaatgattttgatttcttctaacactagattaatcttaacttcacctttttttttgtcacagttaacatcttatataacttcatttcaaatgtctatattttttaatgtctacataaatatacatttcatcacacgatttacaatatgaatacatgtttataagcttttagatcatggaatataaaatagtgcactttttaattatgtcgatatagtctttgatttttaaaaaattaaagatgaaaaattagaaaattatgtgatgcattaggactcaataatagagactatacataataacaattgcagttagttcttagttggatataataggtcagtaaaatatattattacaaacatcaactctgcactacgcaagatgtagtaaattacgaaaatatatgataaacaaattcgcatactacattatgactacaatagccaccttccctatacattatgacttctaacattgaaatttttgcaaacatttggtgtaaattaacaaattaaaaacatttggtctaatgtatgaagaaaaaactagatattccgctaatttaaacaaacatttggccttataagaaattttaggtaagaaaaaattctgagaagtcttttttattcacatcacatagtcaatattcaattcaatgcatataaatttcatgtaaagcttcttttttcctcggatcccattcattattttacttaccattgaatactttcaccgtgtagtctttttttagaaatcgttgaatatcaaaaacaagaagaagaaaaaganaccgtgttttcaatgtgctgtcatatgattcatgaccctttatgaatctaatacagagtttgaaacataaactaaactgggaagtttgccaaaaaaaaaaaaaaaa

SEQ ID NO: 26639 - DNA, 809 bp, Arabidopsis thaliana landsberg
ttctatataaatttaaaatctatatacaattatttgtaatcagtttctgttctctttgataatccttataggtctaaatatatcttattttaagttgtatgaacaataatttttatttttggtaccacctagaaagctattttcattatatttttttaagagtatatatttttgttttaaaataatttgggacttataattctctttaatggcataagcattattcagaaacacacatgaatatgtggcaaccttatcaagaattcactcgtattcgtttctatcaaatgcatataaagtaaataatttttaatttccttttccaaatgattatatcaaattaacaaaaaagttacatatttatatccaaaaacaaaattaagcagaaaataattaactactaaagtgggccagagaaaattaattacataccactcaaaaaatttagatttgatctgaggaagttgttaaccagacacaacgtatatgaattcgattcatttcctcattaactcttttcattttaaaaatcaccaaaaatctttacccaaaaacaaaaattgttttattaattataatatatatctttatccattctaattccagtatagtcagcaacttaataagacctgtctccttctgtattccttcaaagcaacaactaaaaaaaaaagaaaccgtaatttataattttaaattaggaaacaaaataaaataaaataaacaacgaaaatccaagtcggctttagcctctctttggtcactataaattcgcctttggcttctctctatctctatcacgagaactc

SEQ ID NO: 26640 - DNA, 1143 bp, Arabidopsis thaliana landsberg
gacatgttagctttgtgccatcatcatgattatgtacagagataagaagggaagagctcacaacttagaaattcaactgaacagagactatcctaattcaccaccttctgtttctgcggtttgttaatgtcaaatccttaagcttttttcattctccgtagcgaattaacttttgcttcgatgtaggatgtgccatatatgtttacactagaatggtcaacaagttcaagattgaaggatgtaatgcaccaattccaaaaggtagatctaagactttgctacattctctctttgtaatcactaatcagcttgtttttgttgttaacagcatttggactatcttcaagaattttggtctgtcttggacaatatcgataaatctctatgtgttgttgatgtcaagcaaccagctcgtgcctctgctattcgccggattgatgctggtttaatacctttacctcaattccatttgtctccatactcttttatttctgtcttgacgaaattcacttttatctatctctacttggttcatttttttctcagggaatgattgtatcatcattgttcatatcgacttcaaagaccctaaatccctaccagagtatgtttctagacaaacacacactctcaataacctacttgtcgacattttttaatagttataagtgcttagacaggtcccggtttattggtcctgtgccttcagctacgcatatgaacaacttgcatatgttatggagaagaaattgcaaaagatggtaaaattattttgtctctactctcccattttaaatctctttccagagggtggatatatagcatggagttatatggattgttgaaagcaggaatgacgggttcatgataattatacagggccaaatgaaaagatcatttcctgagaaccttgaatgtattctaggtactgagctttcaaagccctttcgtcttcaaagggaatgccgatcacaaccaggttgattgtgggattgcctttgcgcagtttctacccaccggtgatttcttaacccgaaaaagcaatgcttaagaatagtaatttgctttgatggttcgataacttctcatttactttaatctaaaatgaggagctcggagctagaattgggacccgaacagatt

SEQ ID NO: 26641 - DNA, 757 bp, Arabidopsis thaliana landsberg
taagaagaatgttagaatcgtggaattgagacgatttaacggcttttgtagaaaaggaagacgtgagaagagattacggaatcgaaggtattgttcgcgtccatgacgttttccgcatctaacgaagcttcctggtgaaaaaaaaaaaaaaacggaggccgctaaaaactcagaaactattttgaaaaaggaaaactagaatcatggaaaatcacagccattacatacaaaatcacaaaaactattctacaattgaaagatcacaagctatatataccttgagatgttgatacaacgacggcaacgatatacagtgaggcggcgacaacgagctccgatgaaggattggagggaagagaactgtgtaatttggaagacgaagattgaagaaggaaaaagagacaagaattaaacgacaacgtataaaagtaaaatttggtgaaataataagcccaacccattaagactcagcccatagaatgccacgttgtcaattgtcatgttgtttggtttgatctctcagacgcgcttcatttagctcatttcctcaaatgatttaaaatcctgcgattttcgtggtctataacctacccgaattgatgaaacgcgctatacgcgctgttcatgcgcgtgggggtagtcttcaattgtcatgttgtttggtttgatctctcagacgcgccttagttagctcattttcccaaataatttaaaatcctgcgatttacgtggtaaataaccaacccgaattgatgaa

SEQ ID NO: 26642 - DNA, 1358 bp, Arabidopsis thaliana landsberg
gtacccacgttccaacttctacgttggacatctgcgtttagctattttctatatgacccattcgaattcatctggatatatttttctttggcaaattactaaagtcatagtgaatccattaagaaatatgtacattttccttgttttatcatttttttttcccaactggacctacatagagattcatatcatccatttcatcacattcaatgtagaccctaaaatataagagaaatgacaaaaatatggactcttttgtagaatacaatatatcgcaagttacaattattatatgaacccacttaactaccaaatcaaaatcaccaaaaaacaatcacctgttacaattcataaatctcaaaacacgaaccactatatatacaccaattttataccctttatgtcaggcactcagcagtagtagtggtctatctcagagacactcctcttgaccatattcaccttcaagccatgcttcatgtacatagttagagccatctttggctcaaccttatgaccacccttatcatcaaccctaaccttataccggtaaataatggcggccgctacatatctcatttggtaatacgcaaaatccttgcctagacatagccgaggaccaccattgaaggccgtgaacttataggccgactcactcatgtacctgccgtctaataaccacctttctggcttgaactcacgacagtctttcccccaaattgtttccatacgtcccatcgcgtatattgcatatataaccttttcttctttttttaatttcgtcccatctggaaatacatcgtcttcaagtacctacaaattattttactcttgtaaacctcatgaaaactatatgtcaataaccgaaatcgaataaaagagaatcttatgtaacccaagcagtcaaccacaccaatatatcaaatattcctaacaaattcacttttaactatatatcagaactaggttttactatattgattaaaactaattatttacttatggataatagttcgtctcaaaattcgaattgtacctaaaaggctaaaactagaagcgagccaaaattttcacaaaaaggactaaaaaaaattccggatagctgaaaaaaaaagaaccaaaaatcatattcttaatgacttcttgggagacaagtaaatgaaacagagcagatacctctttgtgatcgactggaacagagggatacaatctaagagtctcagacaaagcagcttgtagataatccattttcttgatctcttctggtctgaagatgggctcatattccatgttcttctttgtatctgcatgaacaaccctttgctcaagaatcttgccaaatcccatcataatttttt

SEQ ID NO: 26643 - DNA, 1209 bp, Arabidopsis thaliana landsberg
attctctttgagttcttcacagagctcatagcatgagcttcctcatcaaatatttgcaaaatgtgagctccttctccactccctctacctaacaaatccgctctctctttagcttccaacatcttcctctgattcctcgacatgtacttctctagacttagattcaaatactcagcttcttctccaacttgttcagtcttcctacagcaaaaaaatccaaatgctcaagagtttaaccactacttcagtctattttgatgatctaaacttactcaccttctccaaagatcacgctgggatttgacagggatcgaacgccagagaccgtccatattggaacaaagagattgaacctcggtaatgtctcgtttcacggaggaagcgaggtcggtaggatcagagtcgaacctctccaacttctcgattccatcccgagctcttagtagaatcctttttgcactactatatacctgagacaaccctcccactgtcccagacgccattatacaaaccacaaagtgaccattaaaactgcagaatcttcttctctttgctgaactatatcaatgtcaacttctaatctggaacatatatacaaaaacatatttaaaccagtttactcaagaattaatagtaatctacatgacattgacctataatttggctcttaagtaaaacttgaatcaaaagttaagcacctttcaacaagatttgcataaaacttaaaatctaatccagacaaatcactcgatcacgaaccagcaattcgatcaaaatcctagaaattatgttaagaaaacatctaatcggcaattcatttgattcgatcgactgaaaccaagaaattcaacaaaatcgcattgagagaaatctaagaaaagctttagaaaaaatttatccgtgtaccagttcaatggaggcttgcttgggtttggaatttgaatttgttacacaaagcaattcgtgaccagatccgaggaaagtttgtgaaaatcggatgagaaattctgcgagggattaaaaaagaatagcaaggagttggtttacttaaaccgggaacaaatcccaattaagcagacgcgcttggctggttctgtttacaattcggttttgtaaacaaacacaagaaatgtaacaaattaatcaaagaaaaaaaatgttctaaaaatcacgatattttttttgtttctagtaatcacaatggtttct

SEQ ID NO: 26644 - DNA, 1143 bp, Arabidopsis thaliana landsberg
  unsure (1)..(1143): unsure at all n locations
tttgttctttgtcctgttcggatgaagacatattgataagttcttctatccccttaagctctggggcgagatctttcattgtaagcacgtcttgtcctggccagaatctgatacatctcaaagcaagcccaaaaaacgtttccacttgcacagcagatgcttcactctcaccgttccatatgtttgaatctatgacatacatgaactgatccgctaattcttcaccacaaccaggaaatgggaatccaaactccccaatgatagcagataaccaggtgaggccaagctctccgcctagaagaaacagcattgtaactattaaggatatacccatatcatcgattgatactcatatcaatgattccttacatcatgcatctatatatgtatagtagtatatttaacattaactcttaatgtaataccctagactcatagttctgtatatatatgttcctctgtgaatcaataatattatcacttctataaacatcttcagtaactccaaagctatagacatcaaacttttcggaaactaaacctgttccattatactccggatcaacggataccccataaactactttatcatcatacacagatgattctccctcaggaatcgatatgctcaaacagaaagaagagagcttcgcagtcccatcttcgtcgaagaatatgttttgaggtcttacatccctgttgattatgactcgaggaaaagctgtgtgaagataagctaccgcatttgcaatatccttcccgatctttaaccttgcactccaaggtaacggagtaccgtccatgtcctcgagttttagaggtcctttctctgctaactcacaaaccagaaccggtttataaaactccacacagcaacccaacagcttcaaaacgttcttgtgactgctcatcatcgacaaaaccgctatatcgcggtaaacattttcaggagaagaaaaaaggacataatctccttcccattttgttgatgagtactctccgttcttctatagtacccttgtaccatataaatctatcttttgctatgatatgatctgcgtcgaaagtgtttgttgctttaagattttgatcagacgaanacattcggattggattgatttaccatctgaacacgcgattagc

SEQ ID NO: 26645 - DNA, 1326 bp, Arabidopsis thaliana landsberg
  unsure (1)..(1326): unsure at all n locations
tgctactgatacagggaaatcaggatggcacaatacatctcctgccattacttgatttgcatcgatcccttgcaacgctaacgctacgttatctccagctcttgcaatggtgcaagcctgagagtcacgctctagtgatcgtatggttccttgatctcctgatggcataaccattacctagcagaaagttccagtaatttaagtaatcagttgaagcagtttcattaaccaagagaacagcaagaaaataatttgatcgaaagctactgataacaaagggaatttaatactgtgaaaccttccaacacccaaacagatattgtaaacaatatagtaattgtgggcatttgatgttaaaagttcaatcatgggtttaggtcgagcgactcagatatgggatgggaatggaaaggtaaaatcaccagaaaagcgtatcctaaggttaattcaggtagacagatataaaatcatcaatcacgcaaccaaacgagaagaaaacttnccatagtgaaatttgtaccttagatcctggccggacagctccagcttcaagttttccacatgcagatacctgcccttgcgaagttgatcttacagcgtcacatataggcatgagtagaggctttgagacgtctctatcaggagacttgacagagtcgacggcatccaataaacatggaccttgatacctgaattagcaaaaaattaaaccatttcatggcctattttcgagcatgctaagtaaattaccagctatctgtaccagaaatgccagttcagaaaggaaaacaggagcataccatgaggataggcggttgtcagagggagctgccaccaagttttggttttccatggcacttaatggaatccatgtcagagaagaatccttaaaacgacaggattgcagaaaagatccaacatgctgcttaatcaaatcaaacctttccttcgaatagccaacaatgtccattttgttgactgcaactatgacttgctccacgccaaaacctttcagaacccgtgcatgctcccttgtctgccctttcaaattatcaaaaccagcttcaaaagcacctacagatgcatctatgacaagaatcgcagcatctgcttgtgttgctcctgctatcatgtttggaacaaaatctttgtgtccaggagagtcgagcaaaacaacatgatgtcttttggaattgaaataagcaacagccacagtcattgttattccttgtttttctcttcagcacttctcattcaatgcccaggcatatgcaatgaccctttggcctgatcagaacaaaaagacatggcaagccaacatagcag

SEQ ID NO: 26646 - DNA, 1727 bp, Arabidopsis thaliana landsberg
taagaaaattgagtatcatagttaacaatttatgtagcacttagtgcatttgcgagaataaaaatctaccacagtgctctgaatgcaatttgaatttgaattgatcatggctcacaagctcttggatgcaggagaaaacagccatgctacaggagaatgaatcaattgaaaaaggagattgagaggctaagtaaagaaaaggacggactacttaagagcaaagaaaatctcgaagagcaaataggtgcttttaacaagtctacagaatcacttcaaaaggatctgcgggacagacaaaagcaggtagtcttttttatagactggatttcttaaagaaacgggctctttcatatctgataatgtaaatacctgaaatgacactgatagtattcaggtgcaaagtttgaagcaatcctcagagcatcagaggaggaacctcaatgactgtagggctgagatcacttctcttaaaatgcatattgaagggtctcgcgctggtcaatatgtgtcattgaatgaaggtgatcctgtaaaattacaatccaaggaagtcgaggaacagataagcactctgtcagaggaagttgtaaatccaacagtggaaaaggatggtggtttgatttctaaagtttctatatcggctgagaaagggcacatacaaacagaaggcgatatggtggtggaagaggttaagaatattattgctgatcaaagagaggtggcaggagaggccggcaatatatcttatgccaacaatggtacgttggagaaccagaaagaagtctcaaactatttgttaagtccatcaaacggtaatttctcacccagagaccttggaagcatcttgaaagtggatcctggaattggtcgtgattctaactcaaaatcagacaatgcaaatggtgaagctgcttctgaggaaatggcaagtacttcctttgatatcgtgaatgtctgctattttcaccttttcttaatgattttgagtactctacaagctcatcttttgtcatcagaaacatggtagcagccaatgtagctgtctgctttcctttcgctatacttatgctaatgttgtgtccacaaaatgttatatgggatgtttgaattttcctttttttcattcttttacagggtttaggaacgattcagatacttgcagatgctttgccgaatattgttccatatgttctgataaaccatcgagaggtttaaattcttttttctattttaccagctaagacagttgtctaaatattaattatcttgtttctttgactgataggaactccttcccctgatgatgtgtgcaattgagcggcatccagttagcagtacaagagattccttgactcatacactgttcaacctgatcaaacgtccagatgaacagcagaggcggattattatggatgtaggttactgtataaactttgaagctttcataacgtataataagactgtttaaggttttgagctgactccttttactgtttatctcaggcatgtgttagcctatcgaggaatgttggggaaatgagaacagaaacagaattgcttccacagtgctgggaacaggtgaatgctactcttgcttttacaacttgttgtctacgctttaaacaatttgtgatatttcttaaaatgagtgattacatgcttgttgtgtctatttcagataaatcatacatatgaagaacgcaggctgctagttgctcaatcatgtg

SEQ ID NO: 26647 - DNA, 1440 bp, Arabidopsis thaliana landsberg
atttgttattcaatttgtgagtagagactcttttcatatacaaaacaaatgtgtttgtgaggatactttcatttatataaaattgttaaactcaagattgcttgagaagatgaagatttctttatgtaagttgagacttccctttcacatattatctatcgtctcataaaaaacatctttatttaatttatctttcgatgcatatcctctcaagaacattatttaccgtcacgtttaagcatacgtggcaacataagcatcacgccacgtcactatcgcaaccctcttccctcttatattatacaccagaagccctctctcgcattgatcaaatcacaaaaccacaaaaaacaaaatctcatcaaaaggaagaaaaaaaaagtttcttaaggattgcagagatttaaaaagaaaatggagggtttgattccatttttgtacaaagccattgttatgtataaaagagaaggaagcttttcgtcggttttgctcagcgatcatcactctaattctaaagccggatattacatgcgacttcctggcgactcgtctagtaggtttcgaacgtccgatctccgacgatttgggacggaccgttttggaatgctcgaaacgacgccgtcatcttcgccttctcgtgtttccactaggaacatcaccaaacgtacgtaaggacgactgatgatcgatatacatacgtaaagatatgattgtggtaattgtaaattaaatattgttatatacgtacggtccaccttaaattattatacttgctagtaaaactaaggtttgttaaaatcatcgaaattatggttaaactgtaaatataatttgtccataattttgatgaagaaattaaacaaatatgtaatttactgtttttttttgaatttacggtggatcgatcatatatgtattgattagtggctttgttcattgtgtaattgtaaaaccaaaaaagaaagtcaagtgtgttatcttatggattttcttttttctttgcaaaaatcatatcataatggatttcttgtcatttacgcattctttttcgtcaacgacgaagttgctttgtcgcagtcaatacagtgattaaacctataaaaaaaaaatgctaaacattttcatgactaaaactatattttaatctagagaatacgtgtttgacttgaacagggtgcaaattatgataatactttcaaattatttcgttccaatccattaactaaaagattgaacgctaaatattttaattcgtgaatttttgggtgatttacctatttataaattcaaacatttcaaaatgtgttaaattctaaaagatctaacaacaaatctgaaatattgtttaaattatggttaaacttaatcaccactcatacacataacaagatgctctatgaccctattttatgtggaggaaagatttaaacttttaattgc

SEQ ID NO: 26648 - DNA, 1199 bp, Arabidopsis thaliana landsberg
atgtagataataccgatatctccattcggaacttatttatctgatctataaggacaattaattttatcattttgaacacaattcatataaatgttagttttacataaaattttagagaatatatgaaaggcgccaaactcaattttaaacttaataaagaggagttttgcacagatagttgcaagacagccaagtcaatgattagcagcatgtgaaatgtgtgcaatccagtaatctgaaatagaataacaaaatcggactggatatattattattgaagaagatgccatataattaactattatgaaaaaaagatgccatattaattctaaaagagagcatgtcatataggttcgtatagtatcatatgtaaatgtttcttgttttttgtgcaaaccgcatcaaatcattattaaatgaatatcagtatataacctttgatttctctctaaaaaatgttaatagccacaagaaaaacttaagaaagcgccatttctgcttcttcttacttcaatcctttgcgagagagagagagagagagataaagtttcttcctttttcccacgtttcacgttcctcctcttacctctttctccttcgcttcaatcccttcaagtttcagtctttagatcaaaccaaaaaaaaaaacgatctttttccgataattcagttaacttcaatcggaaaaccatttccagttttccggcgagatggccaacgaaggaagtgaccctttacttcaatacatgattagcccgagattgaaaaaacctccacagctgctgtttccattaccagaagacaacgaagttgcgattccgatgccgatgacaccgtcggagttcaaagagcgtttaatcttcggacccttttcatgttcgccgcgagattcgtctcacttcatcgattccatgaaacaaccgtcaccgtcgtcttcttcaaccgccgttaataatcctttctccgattcctcaaccctagatcctctgcttccaccaccaccaccacaaccagagccatggttgtccgatcaaacttcgagtcactgtcaaggccacgctcttcaccgatccaaaacagcaccagcaatggctgtaatcaatgatcttcatcacccaattcgtcaaaaagatcctacagagacgtcacgatctgtagtaagacaagcttttggctctctcgttgtgtatctctctcta

SEQ ID NO: 26649 - DNA, 3758 bp, Arabidopsis thaliana landsberg
  unsure (1)..(3758): unsure at all n locations
acatccatgtgtaatcatcgtgattgtttcaggtggatatatatgattcgaggacattcattggtggcaaagtgggttcttttgtagatagacgtgggaaccatattgaaatgggattacatgttttcttcggatgctacaacaatctcttccgtttgatgaaaaaggtttttgtttctcaaagcttctgctcaaatttactgatgattgaaactcatactcatgtatggttttttttgtggtgatgtatgtgggtgctgagaaaaaccttctagtcaaagaccatactcatacatttataaacaaagacggcacaattggaggtatggctcagttcattattctcttgctattgtgattttatcgtactgagatgtgcatattatttgtagagcttgattttcggtttcctgttggagctccaatccatggtattcgcgcatttttggtcacaaatcaactcaaggtataaatcaaacttttaaattgatttatcttttaaatctttggattcatatcaatgcacttttccgccgtggaaaatcggcaacagttttctcaaatgttcatagcaaaagattagtaatttcttgctttatgtaccaatatcgagcttgctaactgcttattcttgttttgaccgaacagccctatgacaaactaaggaattcactggctcttgcattaagccctgttgttaaagctcttgtcgaccccgatggagcaatgagagacattcgcaaccttgacagcgtaaagaatgataacctgttcttcttctcatctgtactactatttgtgttctctaaattttctgaaatactttttgcagataagtttctcggattggttcctgtcaaaaggtgggacacgggcaagtatccagagaatgtgggatcctgttgcttatgctctaggtttcatagactgcgataacatgagtgcgcgatgcatgcttaccatattctcattattcgctaccaaaacagaagcttctctgttgcgtatgctcaagggctctcctgatgtttacttgagtggtcctatcaaacaatatatcacagatagaggtggcaggtgtgtatctgctataactacaagaactgattctcgcatttattatgtcattggcttatcgggtatttataatattgtcttcaaacagaatccatctaaggtggggttgcagggagatactttatgataaatcagcagatggagaaacttatgtcactggactagcaatttctaaggtgaaatttagcttcagacgtaggattttagtggactgcgaaaatgtctacatacattctgaaggttgcagcttctgggtagagaaaaagcacaaaactttgatatgaaagtaaaggactttttttgttttttggtttgctttcaggctacgaacaagaagattgtgaaagctgatgtatatgttgcagcatgtgatgtgccgggaatcaaaaggttacttccaaaagaatggagggaatctcggtttttcaacgatatatatgaactcgagggagtacctgtggttacagtacagctcagatacaatggttgggtcacggagttacaagacattgaactggctaggttggcaatctagaatcctatgttttgggatgatcgtgatggatcgattctgttttggttttaagtctttgtttttgtgttttggaaaatcgtaggcagttgaaacgagcggttggcttagataatcttctctacactcctgatgctgatttctcgtgctttgcggatcttgcactagcttcgcctgcagattattacatcgaaggacaaggcactttacttcagtaagaaagaataacgtttttctttgtttacaaaatcgcatgcaggtctctcagtgtcttgaaactgaattctgttttcacaggtgcgttctaacaccaggagatccgtatatgcgaatgccaaatgataagatcatagagaaagtagcgatgcaggtaaagaacatggctaaattcaactcttgagaaaacttttgtctagctggtttgttgttgattctcaaatcttgttcaggtcactgagttgtttccatcgtcacgaggcctagaagtcacttggtcgtcggttgtaaaaatcgctcagtctctgtaccgtgaagcacccggaaaagatccattcagacccgatcagaagacgcccataaagaatttcttcctcgccggttcatacacaaagcaggtaacatttttcacttactatctttcagccagatccccgatagctacaaatgcaagcaagaacagcctccaaattgtgtctgagaaatccgaaagatcagtgagaattttgtttctggacttgttacaggattacatagatagtatggaaggagcaacattatcagggagacaagcttcgtcatacatctgtgatgctggtgaagaactagcagagctaaacaagaagctttcttcttctgcaactgcagttcctgatgagctaagtctggtctaatgatgaaaaatgtttgaaagtagttaccaatggctaattgatgaagatttgagacactatgggtacatgaagaagaagcatatgtagaaaccctttatatagtgttcataagagaaagtatttgtaatattacaccatcttttgaaatcaaagattcttacaaagtacatcaatttaagaaagtttactctcagaacttacaacattcaaaagaagagagtactacacaaagtttacaccttcaagcttcttcttcgatggctttctttgcagnnnnnnnnnnnnnnnnnnnnnatatgtcccaatggccatcccaagtgatgaagaactcagtgtcttcgtgatatttgactcggtgaacatcaccggcgggagtgaataggtaatcgccgtcaacgagatcagctctctccttcttgctcagattccacacacttttctttccctttatgactacaaggtcatggccgaatgtgtggtgatgcgccggttccacacttcccgctttgaatcttacaatcgccgacgtcggcgtctctctaacgatcttcatcgagcctcccggcatgatgtccactggagtgaactctctgttcttcgccaagcagcaaattacgcaagacgcggttgtttcatcgatcttcttggttgttgaatcgccggcggttgactttccaatctgagacatctcggagagagaattgtcgaggaaggaagagataactgagctccagggttcggatccggacgcaggacaaggagatttaaaaggagttttgatacaagcgtcgaagatttccacggcggtttccggggatgttttgataccggagaatgcgaggacattgcaagtgcttattgatcgagcgttgacggcgtcttcgacggagagacaagtggctgcgtagacgcccgggaacttgttggcgaacatcgcaactccgacgccggtgccgnnnnnnnnnnnnnnnnnnnnnnnnnnnnnnnnnnnnnnnnnnncgcggcgaccgacttcagatccagcagagtagtaagaggacactccggtatcctccacgtctatgccgagagagcggaggtgtgttaccatcgcgtccttgaggctcgctccaaagtcatcagctccggtgatgattttcaacggttgatagacggcagaaacagctccggccatcttttcagagctttggagccttagaatgtgaccagaagaatcttaaattggaaattttcggaaaaaagagaaagacatgagttca

SEQ ID NO: 26650 - DNA, 391 bp, Arabidopsis thaliana landsberg
  unsure (1)..(391): unsure at all n locations
gtgcactctcttttaacagctgcattggttccagctgcggctaagttgtattataaggccttccccaccataaatcacaggggagatggttataagatgtggtgaaccatacatattgattcagaaattgtagccttgtaggcaaattgccttacagttataaccatggcgtagctaagaatctcaatgagctcttgatgcatgaaacccatatttctagttccaaagaagccaattgatcttggtcctnnnnnnnnnnnnnnnnnnnnnnnnnnnnnnnnnncatatgttcacaacctaaaagactaataaaacatttgatctttcattgtactggcaatgaaaattagtcgaacttacttgtatataatctacatcagggactctgtgt

SEQ ID NO: 26651 - DNA, 531 bp, Arabidopsis thaliana landsberg
atagtaactaacgatgtagactagaaaaagtcaacaattcatattgttgaagagtgaggcaacctctgcttcgagatggtatgtatgaacaagctcatcaagcgaaggtaccagccgagcataagcagtagtaggactgacagcactagaaaggaagtccacgtattggagaagaattccatgacatctgtcgaactgttcagtgaccatcttaatataaggcgcatccgcattcaccacaactctgcatatcaggaagcttacattataatagaataaatcatgaacatcatggtttgttgactaaatgaatgtgtacagcacaatactcaatttagagacaggaacattgtccatagtcacaccaaaatatataacaatgtatataaagtttttagacatcgatttctttttccgtgccaatttatgtttccaggtataatgatgtgcatcctgctccagtaaagacgtgtatgctctatgcaaaccattaatgcacacttctaaaatgtcaaacaattttgagtgttc

SEQ ID NO: 26652 - DNA, 1306 bp, Arabidopsis thaliana landsberg
ggagactttgcctacataaaggtaaaccatgcttatcatgaatatggtattttttagctcagtatccctgcgctgcttttcactttttcattggaccaaacaactttttcattcaagagccttggattttctagaatgtaatgcgtttgtgagaagaacatatatagctaattacatgttcatctccaatatggtacagggtgaagaagaagaaacccatgttggccagatagtagagttttttaagacaacagatggagaaagctacttccgagttcagtggttttacagagcaacggatacagtgtgtatacaagttcttctcttttgtttgtctaattgtttgcgctgcaacaactagttactcatttgtctaatgtttgtagataatggaacggcaggctactaatcatgacaaaaggcgtctcttctattctaccgtaatgaatgacaatccagtagattgtcttatttctaaagatactgttttacaagcttcacctagggtatgctgagtcaagctcattctctttctctctctctctctctctctttgttttgggtacaatctcaacagagttgatcagtttgttacaatctgcatttcaagtgattttgtttcatgactttgcaggccggattgaagcccaattctataaaatctgactactattttgatatggagtattgtgtggagtattcaacatttcaaaccttgagaaatcgtaagcgctcatgtaatatgtttatgagttatcaattggaaacggatatagctgttttctctttatttctttaagcagaacagatgccacagtttatgagcaggtcgacacagtctttatataagatcctaggtacagaagcttgagcattcttttttcttcttttttttggtctcagctaaaacgtccaaaaacaagcttgagtgttgtgccgatgtggtacctacagaatccactgaatctattttgaaaaagaaaagttttagcggagagcttcctgtgcttgatctttacagtggttgtggtggaatgtcaactgggttaagtcttggagccaaaatatctggtgttgatgtcgtgacggtacttgatttaagtaattaatctttatctctttaacttaggatggaaagctctttcttcactcagtttcatttaatatctggattcgtttttatttttctctttcagaaatgggctgtggaccagaataaggctgcctgtaagagcttgaaattgaaccatccaaacacgcaggtcagaatactttcggcgacaacagctagatcatttttgaaaat

SEQ ID NO: 26653 - DNA, 2792 bp, Arabidopsis thaliana landsberg
atcgctatagattttattttattttattatatataaatcatatcatttttttctataactaaaagtagagtcatctattttattggtaaaagtcacgttgaaaattttaattttagtttgttaagtaccctatggctaatataatttgcataccaaacatgtttttttcttaatgataatctagtccatttgtaaaagtaaccgttttatcatcaatttttttgattaagctaagctttcgccgacttaatagaacattggcattcggcagccaataaagcaaatcaagttgcagaatttcaaatgtgacatatcgtgaaacaaaagaaaagcagaacaatagtaaacaaaaagacaaattgttgaatgttgacaaactgtgaagatgataacaaacgaaggaaaagaaaaatactaaaatagtttgtcctaaaaagccttatctgcgaaggcattttaacgaaaacgggcctattgttggcccaatatgatatataggctcgaaactcgtcacgtgtattcaacagttgcttgagtttttcccacacgtgcgctgttactacgtggacgcgcgcgaataactctagttttgtggatttttttcactatcttctcagaacaacacagagccaaaggttttttgctcgcagtaaagaagaatcacactgtgaagaagaagaagaagcgaaacacaaaatcctcaggaaagaaatgctaagtttgaatctctcggagtcgcttcgcattccattccaaaaccctaggcctcccaaatccgatttttcttctacttcttcttctccttcctcatcgtcgaggagatgcgtctccgcttatccaattccgatcgggttttcggttcgtaatcaatacttttctaggtaaatttgataattgattgttcatcggcttttgaatttgctatgcgaatggaatgtagccatgtaggagtttacgtcttttcacaattctgtgcagatgtttgactcaattgcgtcgaaatgaatctcagcagctaggttttcgatgcttccaacgaaacgatgcggcttgttacctcgaggtgattctgatttttgttaccttccaccaatctttttttggtagatttttgaatttttttagatgagattctgttaaggcctacaggagatttttgaattgcttgttctgtgtggatttacctaaaatggtaatgtaggtttattataatgatgattgattttaaggttgaacaatagtggagagaatgtgtttaaatgcataagctgaataagttgttgtgtttgctttgttcagaaagctgagtctgaagagcatgatagaaatcttgatgttctggttgagtcatcgatagctcactcaagaagagagattcagagagttcttatgttcttggcggtatcaggttcggttgcattactaggcactgatccagcttttgcagcttcgtcaattcccaatgtgacacagtcacttgtcacttcttttggagaccttggagatattagctcaggttttgcttcggttagagaatcttccttttgcacagaaccgggaactatctcttcttcaattccagtacttttaaattttattttttgctctgtctatgtctgtgtaggctttcttgcttatctttttctctgaacttggagacaagactttcttcattgcggtatgatcttgagatgttaatctacgctttagaaactctctttgtcatcaatgattctgttgattgtgataagttttcatgtttgttggttaggcccttttagcagcaaggaactctgctgctaccgtattcgtggggacttttggcgctctagggtatgctttctttctcaaacagaggcgttattatggtccgtgaatcttgtctgaaaccaaatgttactttgaaatctgtagagcaacgttataaaacttggtaattttgcaggataatgacgataatatctgtagtgcttggacgcactttccactatgtcgatgaagttcttccattcaggtttgagtattctggcaaaaattattaagcaggtttaagttccatgatgatgctgaacgtcaatgcttgagaacacaggtttggtggaaccgatttgcctatagatgatattgcagcagtttgtcttctggtaaatctctttattcacctttcttagcagagtcgtactaaccacgggtgcttggtttggacctttcttatgtctagcaagtatatcttcctaagtatatgatgtctaccaagtgaaaccaaatgtagctgtaacccttttgttatgagttttgttttggttttggttcagttttcgattcgaagggtcttaaaattgtcatgaagtttataagtttcaggctctattgggtttggatttttatgtagaaaaagttactggtctaacaatgaagatgttgattggttttcaagcctggtttatggttcattttgggttggatcatattgtacagagcatagtcttaaccatgaaacagtattaaccacttttgttacatttaggtgtacttcggtgtttcaacgttattagatgctgtttcagacgagggtaaagctgacgaagaacagaaagaagtaaaacctctttagcctttcgttcactctttgtatatttccatgcaaccttcaagaagtcaatatttatttacttattatctacaggcagaactagcggtttcagagctttcaggtaatggagccgggatagtagcagccgcgaacaccatcatcagcactttcgcattggtttttgttgcggaatggggtg

SEQ ID NO: 26654 - DNA, 989 bp, Arabidopsis thaliana landsberg
gccccacctggtccaaaggttgtttataaaattataagtaactcattattgtttgttagtacatagaacgtggtggatttattattatttcctgtcttttcagctgataatagaactagattttttcctattatatgttgtagtgactaaatctcataatataggttgttcttgcttccatggctagtctcgaagccggttttgctcgagagatattcgtggagtgggcaaatgatcccagaaatttagtcctctttactgaaacaggccaggtatgtttttagaacccacatacgttgaggaacgaaaatttattagcattgctataaagacctgatggtagattcttttcctagtgctgatcagctagttaagtggatatatgagaatcttttttgtcttctgatctgaataagagttcccccatttatgtgtggatatttacccccaatatgtacacaataggcagagattgagtaccttaaagcagcattataattaccaccaaagcctggctggctcctttaggataatctccagagctttcagtcttgaatttatcaattagttacatccagtacaaaataaagggtcttagtagactatcatattaatggaattgacaccactatgcacaaactgtctaattggccatatcattcatctcaattgaacataatttttttttgtaaccgcgtactttgtttatttttcttctagcgagacatcatcctgttccctgaaatatcatacttttaattgaaattcaatctagacaaaaataaatttattcaaataaatagttcggaaacaaatggaagctttggttaattattcacgcctttctcagttctgtgtgactatgatttcttgtccatgtcaatctatccagaaaacagagcattacggaattattaagtttgaaataccagtaacaccgtaaatccaagtgaaattatcgaagttcttcatccaatttgttacctttg

SEQ ID NO: 26655 - DNA, 1231 bp, Arabidopsis thaliana landsberg
atcgaataagtttgtaccagtggaagggtttagaggattatcatcaaagctttatatctacagattatatgaagctaatgatcgtcttccattgtctcatacttgcttttaccgtctctgtataccaagatacccgacgattactctcatggaacaacgcctccgactcatcgctcaagatcatgtcagctccagtttcggtaaatggtgaaataattatcaaagtaatttctatcttctctctctctctcttctcagtctatccgtctcctcagtctgatctttagggttcgtagattggtgcttttggtgtatagatttagtgttatggtcatgcctctgtttatgaccagaagagaaaggtgaaacctttcttaacttctgtttttaacttatggataaattaagtcccatcaattaattataaacttatgccgatgagcacaaggtatgttaaaatcgtttttcactttttttgtgtttggatttatcgaatcatgtaaataactctaaacattaagagtaattaacttcgatttgcaaatagcaaaaataggagtctgtgtttgaatagtttgtgtttgtgtttttgttaatgatttgtgttaagactttgtattatatgaaattagattacagagcttttttattctttagcaacaaatatcaaactctcttaagaccacctcaatggtctcatcatagaaaaagaaacccatattggagactcatcaccttatataggatttaagaagaaacaaaatgttcttataagtaaaaaaaaaaaaaaaaaaaaagctttattacactgccttgccgtcaacaggcttctcctccttagccggagattctacggccggtttagcatctttctcccccacaactgctgtaatttcaactggtttcccctctttaaccggagctatctcggttttttcagtttcattatctacctttggtacttcttctcctttgatttcaacttcaatcacagtggctgaatcatctccatgaacggttttcttaggcgtctcggttgttgtcttctcttctgtgtttgatactatcttctcaacctgtggtaaaaaatcgattgagctttgcgtcatgaattagcttttatagaggatttatagatcaaagctaatggtgatgaactactaacaaaatctacaaaaactgagctttcgaaaacaaactaaagattatcaccatggagatagtattacac

SEQ ID NO: 26656 - DNA, 1739 bp, Arabidopsis thaliana landsberg
cactctttttcttatctcttctagcatctccagtattggtttggttcttgcaatccgaattgtaacattgaatgactctcctagattgttttcctcaacactacattttgagaactcggtgaagaaacccatgaataagaaaacatcaaacatctatgaactgagaaatctataaagctaataatgttactataaaattataagagtcatacctggaccatggaaagaagacaaatatcttcaagtcattataagcatcaagtgaataagtcttcaactcttccatatttctatcaaactgaacagtataataacaatatgcagcagcccaaaacaagtcttcaaactctactccggaatgtattttcttccagtttgcatgaatatgtctggcacacattctatgttcagcaaacggcagaacatccttcactgctgcaatcaatcctttctagtgatcactacctaattgtaacccatctccaacctctaaatctaagtcatatattaaatgctcaagaaaccactgccaatttggactattctcacaatcaactatcccccaagctataggaaacatctgatcattaggatctcttccacaagccactaacaaacattcctatcattctccacttcaaaaatggaccgccaagatgtataatcttcatacaagctgcctttcatccatcttttagagcagcaaagcaacaattgaatctatgaatttttcttcttttaactacaatgacgttgtagatccctcattgcttcttttcaacttagctacataattaaaaagccttgaaaaagactccgcttgctcatcataaaaaatctgcaagcatctcacgcgtgtcctctcgcagattatctaaggaataatgatattatgtctcaaaagcttattctgcaactgagttgatgagaaatccggattaagtctgaactcttcaagataaagatcagcaatgcgagcattagagagaagtgacactttaccttgccaagtgcaatcatgttcatcattcaaagctctaataaccactatactactgctagtatttatagatgcagaaatcctccaaggacacttcttcgctgaacatatagctacaacacgcttgctatccgacttatcatatttaatgtccctcctcttctttactgaatacttgttaatagcatccttaaaagactcaattgtgttgtactcatcaccaatactaaatttcggatacttgctctcatcaacagcttgattgccaccatcgtcaccatcactctctttgctgctgtcaccattttgctcttcattttttttttcatcttttggattagcaccttcatcaccttcattagcaatggctaactcaccatcataatcttcatctgctaagtaaccgagattactatctacaagtcgacctaagtacgaataatcttctcggacaacatacaaggttaaggcgcctactccaacaccgaaatgaacaggctcctttaacacttcctcgctatcaaagtgagtgaaagaaatcccaagcgaaatgaatcccaatcaaagtgaatcctgatcgatccactcatcaatcccaatcgaaccactctccaaccccaatcgaaccactttctaattgaaacaacccgacccattttttttttaaacataattaaatattcccataaatatctatatagacaaaccaataaagtaacaattaaaccgcaagtcaaaa

SEQ ID NO: 26657 - DNA, 1955 bp, Arabidopsis thaliana landsberg
  unsure (1)..(1955): unsure at all n locations
gaaagagcgcttctacacttatgtgaaaggaactggctctattaaagatgacgtaaacgcttcatgttttttccttgaaatcaattgaatcatgtgagagtagaatgctttttattattaagttccctcgtgtccaaatcctaaataaacggtataaagaccacttgaatcatgtgaaagttaaatgatttttaatctactcttgtatttgctaagctaccatttttaaatcatacccaaacattttgatatatactactctcagatatattaatatttcagtaacttacctctggttttgtatttcagggttcttgataagtaggtatcggcacacctgaatcctctgtcagtttcttgtaagcgttttgcagtgttctcgttaccggtccaactttgccgtcaccaatcacacgcccatcgattttcacaacctgtaaccaaagaacaggatattactatgctcaaagatttagtgttttcatatggtttaagtaagatcccctgaagatttcatcacgaactttagatataagttccatttattcaaagttttaattagtgaatgttatacattcaggtggagaacgattgaggatgttttattcacaagctactagagactgttctgtacttaccgggcttagttctcccatagttcctgttgtccatacctttaaaaaaacaaaactattattgttagatacttgtagagaaagagagaggcacagataattcgatttgaccccttaaaaactgataagttgtaagctgaaagaacctcattagctgtatggaattcggagagactgattcttctttcttctaagatgaagttctctttcaccacaagttccattaccttttaaaaattgaaggagaaaagcaataaaaaaacctgtttatagaaattctcaataaaagaaagtgaaaatttctcttacagttgctctggttatgccagggagacagtaatctgcgtgaggagtaagtacacagcctttcttcaccatgaactgtcaaacataaagtaaatttgttgacaatattagcttctatatatagtctcttaataatctatcgaaataaaatcctgcggataaatcatcaaagggttacttacaatgttggttgcattggtttcagacacataaccatctttgtcaagcataatggcgtcagcagcattcgtgttgttactttcaatctgtttgttccatttgcagagaaaattaatctcatagtaaaaacacaatgtcaatttcttgaactctcttattttgaatacagtacctttgctagtatgttattgagaaggttgttgtgatgaatcttggaatccaaattctgacaaaacaaaaagaattttagaaaccaacaattttacagacaaggattttttatgttgtaacatgaagagaatgtggaaccaaattcatacattaggcgaattgcggcgtgtggttgcagtcaccagcacaattccaccttcattgtcatataccggaggnnnnnnnnnnnnnnnnnnnnnnttatttgaaagaaagaacacaaatctttcatgtaaaccaaactccaaggtaatcatattagcacaactggttgctctcataaagctgaaaggtttaccaataagagtgcacccatnnnnnnnnnnnnnnnnnnncattccagaagtaaccttaaagaaacaagttgcacaattttctttagactaatcaatggtctaaatgaaaacagaagtttcttaaatcggtgtcgaagaaagttgaaatacctttttgcctcgagttagagacaacctgatatgtgtattgtcaaacataccattggttataagagttctgaagattgcttcttttacctgcatgttatgccacaataaaaagctatcgtggtaacgtcgttttaacagaacaaaacatagcactacgatcatcagatgcttacctctt

SEQ ID NO: 26658 - DNA, 1370 bp, Arabidopsis thaliana landsberg
atttcattgacagaattagagtgatttatgaatatacgtgttttaatttaggcaagagtgtgatgattttccaccctaaataattgtgaaaacaaaacaacaatggattagccgtcggggaattctgattggtcgactcacgtcaaatgcatgagacacagccaatcagagcacggcacgtcagcattacacgtggctactacttctcaagccggcggcttggctccgaagaccttttccatttttttttttttttttttttatctcacctaaatttaaaactttcctaggattgcattttaatcctttaagattgagacaaaaatgtttaaaaatatttgtatgcacattttggaaataaagtatagccaattcattttgatgtataattacaacgatgcctttgtttggaagtcataatcatcacgcattttccaaatataggggggagatttccattgctctaaaattcaacagttttaaacaacatgcagattctgtatatgatacaaataaatgcaaaatgccaaaactattgttcaaccaaacaaacaattaaaattaaaggctaagcaatagtaatatttactccgaattggataatgctaactaataaaattttatccaccaactcaactaatagttaccaaaagattagaagagaatctacacaatttgaataataaggcagaaatttgtagaaagaagaaaagagaatctccaaagatatttttattttatctattttgtctgaatggatatttttttattttattttgtaaaatgaagaataatgttttttaatttgaaaggtttgaaggataatgtgagtgagggagaatcattttctcgtggtgtgttagaaggacaaaagctggcccgccatttgtcttcggtttctgcatcatctcagttcctcactttgcctttactccgaagacatgcttttctccattattactctttagggttattctcgttatttcaccttaatccagattcacactgcttagtgctgcttacaataaaaatactttagtgttggggacatttaacttttttattctaaataaagcgttttaacttaaagatgtgaaatcaaaaaccaatgagcgggaagtattaatttcccaagatgagcggcgaccaatgcggtcaagggcaaattaggaaagacacgtaactttttatttttatttttaaaaccaaatctttgaaaaataaaagaaaacgagtgaatatgattttaattcgacgctttaggaaagaaatactctgatgatgactgatgaagatcttatttttatctctgtaattgaacagtgccgtttttttctactgatacataaaatttatagatttattgtcgg

SEQ ID NO: 26659 - DNA, 928 bp, Arabidopsis thaliana landsberg
ggatgaccggtgctgctccaccgtacgttttgttagggttagggtatcccgggaaacctctctgagggaatttcagatcttgtgagtgatggtaatgtcgaccgagacatcgagcaggtccaaatttcttcttgtctcctctgtgttttttatatgtatgtctctgttctgttttgatgaaacagagaatctttgatttgttgatcttaggcttaatacattttgtctgaagttttgcttttttgaattgggtagggtcatgtcttctaaagcgattagaattttgtaattaaatgtcatggtgaatggaaattatatgtcattcacatagtttggtcagaagaaaaatttggtcttttgttgtctctgtaattttgattttctagttacggacttgtttttctctttaccaagatgttcacaagagccctgctctatgttttgcaggctttaattgctttgaagaaaggtgctcaactcttgaaatatggtcggaaaggaaagccaaagttctgtccctttagactttccaatgtgagtgtactttagattggtgatgtacatgtagtctgcagatacctgatttcatagcttattgctttcaaaacttgcaatttatgtaactgcattttgttttggaatctacccaagaggttctttgtttatttttatgattcactgatccaagtggtgctataaggcagataatgtcctcgacttttttgtatccttgtgtttggtcacatatcagccttttaatcttaccatcttgggacatgttatttgcaggatgagacatctttgatctggatttcaaatggtggagaaaaacgattgaagttagcaactgtatctaagattgttccaggacaaagaactgcaatttctcttaaaattcagctttctgttttgatgtagcagcatacaa

SEQ ID NO: 26660 - DNA, 1895 bp, Arabidopsis thaliana landsberg
gggtccggtcggaccttttcaccatcatgcgagagaaagcttatgaaacgcatcggaaagagaagcctcgagagactcaacgtgagactggagttcttcaaattctttttctttctcggcgagaagttcccggagatccgacgactctgattcgagagctgagacacgtgtcgagagagcaatggatgtgattttgcgagctacatctagctgctcgaatggatcggacggtagaacttgaagaagttcatcgggaagatcgaaacttctcgaacctgtaattgcacttgctgatccttcttcttcttcttcttctatctctgacatttctcgttttctgtgtttttttttgtaccttatgagttcatatacggttacggtataacccggtattagtattaaaccgaaatttgagtctaaaccaaacaatttcttgattttacatatcaatattcatcgattgagactgtattattacaaaaagcttcattatgtcaacgctaaattctattgtgttatgggaaatacaattccggtttgggattgattccggttcggttatgtaatgttgatatgattgaattgatagacgtgaatgtgtgtggataaagagaaatgtggtcacgtatggtttgtctttttgtgtgaagtgatatgacataatgtgtggtattgaattgggtaagccaagtttttgttctatgaatggataggactataattcattggacacataagaggagacaaatacattgtatccaattccaaacgtcaaactggatacaaaaccggattcaaattgcaaacaaaccgaaaatccggacatagctggattttaccccctagaaaagtaaataaattccttatactataagaaatattatcattttctcaacaaataggtatatcatgtttcacatttcaatgtatcatgttagattttttttgtacaagtcataagatcttacaacttacaagataaatagggatcatcatcatctaatgggaccaaaattatgaataaaataagaaaacgattacacttgtctccaacatattttcatgacaaggtttcaatcttcttctctgtcgtgtgaaggcaataaaagtgattgctcagaatcacttactgttttggttgaatcctctcttgctttgccccaaatcacagtgtaaaacccaaagctcaatatcactgatccaatcacactgcccacaacacatagatgcaaatttatatgtaccaatcatgtaaatcttattacctaacaaccgaaaatctatatcgattgttagttgttactgtcttcacattttattattcattatgtatttgaagatgaaactaaacatttcaaacacctagaactaagttatcatcactatgtttctttaagaaagagacattataaagttgaaggtaataagatggtacctcccaagatgaagtgtgtcgccgaggaatatagcagccatggcgactgcaattgcgatagacagcggcttgaacaaggatatgtagactggacccttcacatggagaccccatgtgtggataactgagcccaatgatgtatcaaagagtccctgaaacagagtattagtttctgagctaaagatttgatttctcaacttatgaggtttgattacttaccgagtatatgactgaagcgagggagaaacccggtttaagctgccaagaattcatgtctttttctacatgtagacatactgtccctgagattagagttgcgcataagttgtagcagaagactacggctatttcttcagggtatatctccatgaaattgagctaaaatcattgtggaagtgacaaatttagcttaatcttatgcgtaaccatcaaatccaaaaatctctttcatgaatctgtt

SEQ ID NO: 26661 - DNA, 855 bp, Arabidopsis thaliana landsberg
ctatacttcactgaataataagaatgcacgagtatgtgtgtgttcttgtttttgttagagttggttatcaataatgatgcgataaagcagcatatctttttttgataatatacacctcttattcaatttggtattacagaccaatggtcaatctcttgattattagtaaatgcctgctacaagatgatgatgctatagtttcagacaaactggctgagttactcatcgacgcttgtgtacttgatatctggataaagctgagaagcttccacttcaaagtaaggctctactgtaaaataggtttgatctcctttcacaaaaatggcatgatttaaagccaacagaagatcaagtggatgtggagactctgcaacatttcaagtattagcaaacacctgatcttaattgtttatgtttggtaaaaaagagtgtgaaattatctctctcacctgggattttcttgagaagtttctcctatgaaacgtaagtcttctccagatttttaccaaccttgctctcccacaattcgatgatgtcgttctgcgaaacagtgttctctggaggattgatgtagagagtcttgttgagagttctcaatggctctcatggtgtatgcagcaatgtcttcttctttgttgctgattgttttagaacagagtaatatcctttttttctttgttgccaatcaatatccttttttttagtagaacacagttcaaagactgttcccgttctgttctgttttttttactagttaaagagcaaatagcagttgatcaaatagagcgtttgcataaattgatacaattacatgatttgtagtgttctctatattttatcttacaagtaaccgca

SEQ ID NO: 26662 - DNA, 3343 bp, Arabidopsis thaliana landsberg
aatgttcttactgaaatggaggatttcaagcctacagtagattccttctggaaagaaacagagccaatctttgtatggtacctcttcactgtttcggttctccaaaaagctaaagagtttaaaacccttacttcgaaacttggcaaaagagagacttggaaacttggttaagaagacaagagaagcctatgacactttgtgcaagaagcaagagtcaaccctaaataatcctactcctaacgcaatgaaagaagaagtcgaggctcatgacagatgggaacatgttgcaggactagaagaaaaatttctcaagaaaaaatcaaagttacattggttggatgggggagataagaacaataaggcgttccacagagcggtggtcactagagaggctcagaactcaattagcgaaattcaatgccaagatggtagtgtgacagcaaaaggggatgagattaaagcatatgcagagcggtttttcagagagttcttacaacttattcccaacgagtatgagggagtaactatggctgatcttcaggatttactaccctttagatgctcagaaacagaacacgagttgttaactcgtgtggttactgctgaagagataaagaaagtgttattttctatgccaaatgacaagtctccggggccggatggattcacttcagaatttttcaaagccacttgggagattcttggtaatgaatttatcttggctatacaatctttcttcgcaaaaggctttttaccaaagggtatcaacactacaattttagctctcattcccaagaaaaaggaggctaaagagatgaaagattatcgtcccatctcttgctgcaatgtgatctataaggtgatatccaagataattgccaatcgactcaagctggtgccccccaaattcatagcaggaaaccagtcagcttttgtcaaggataggttactaatcgagaatgtgttgttagcaacagagttagtcaaagattaccataaggactcaatctaaagccgttgcgctctaaagattgatatatccaaagcgtttgactcggtccagtggtccttcctaacaaatgcccttcaagctatgaactttcccacggtttttatacgctggattactctctgtattagtacagcttctttctcggttcaagttaatggagagttagtgggttattttcagagtaaaagagggttaaggcagggctgttctctatcgccatatctctttgtaatgagtatggacgttctctccaagctgctagaccaagctgctactgaaaagaaatttggttaccacccgagatgtaaaaaactaggcctcactcatctcagtttcgccgatgatctcatggttctctctgacagcaaggtacgttctatagatggcattgtggaagtttttgacgtttttgcaaagttttcaggtctcaaaatcagtatggagaagtccacaatctatctagcaggggtaccggaggaattatatcatgagattcaaaacagatatcaattcgatgttggtcatcttccagtgcgttatttggggcttcctctcgtcaccaagcgccttaacgcagcagattatagcccactacttgaacatataaagaagaaaattggatcttggactgcacggtatctctcttatgcgggtcgtttgaatttgataacgtcggttatatggagtatatgcaatttttggcttggagctttccgtctgcctagagaatgcataagggagatcgataaaatctgctctgctttcctctggtcaggaccggatctgaatcctcggaaaacacgggtatgttgggaagttgtttgtaaaccaaagcaggaaggtggtcttggtttgcgatctttaaaagagatgaatgaagtcagttgcttaaaactgatatggaggattgtctctcatgctaactctctatgggttcgctgggttgagaagtatttactcaaacaagctaccttctggtcagttagaaccacaaccaatttgggttcttggatgtggaggaagctgctaaagtatagagataccgcaaagcatttctgcagggctgaggttcaaaacggagaacgagtgtccttttggtatgagaactggtctaatctaggcatcttacatgacatattaggagaccggggacgcactgatttggggatcacctcacgcatgacggtgagtgatgcatgggttggccgtcaacaacgtcgacatcggacggtcgctctaaaccagattgaagaggcgctaaggtcacagtaccaaaaccgcgtggcggccgatgacagaatcctttggagaggacgaaacaatgagttgaggccaaaattttccacgagagacacatggaaccagcttcgcacaacttcagctacggttacgtggcacacgggaatatggttcgctcatgccacaccgaagtattctttctgcacatggctagcggtgcaaaacaaactcactaccggcgataggatgctcaaatggaacaggggactgtcatcaacttgtgttctctgtaacaacactatggaaacacggaaccatctttttttctcctgctgctactctgcagaaatttggagcaatctagcaaacaatatctatcaggcgaagttctcaacaagttggtcctctttagtaacctctctcagtacttcttggcgggacagtacaaagagttttctagcacgttatatcttccaagcagccattcacaccatatggcatgagagaaatggtagaagacatggggaacgtccaaatacagcagctcaattaatccgatggcttgacaagcaaataagaaatcaaatatcaaccatcaccgcaagtggagactatcgatatgagaaggctctccagttatggtttcaatcaagatcttaagctttcaaatctctttataacttttctttctactctctaagtataagttgcacttgatgtacaaatgtttgtttactttttgaatctaatttaacattaaatttaaaaaaaaaaaaaaagaaatggtatggcgtcgagggggattacaatgttttagtgatggatttgcttggtggaagccttgaagatatcttttgtcattgcaacaagaaatttagtttgaagacagttctcatgctagctgatcaaatggtaatatgctttggatttaattcattgtcgctgttaatggtgttttggatttaaccaacctgtttattaaacattgtgtcagattaatcggctcgagtttatccattctaagtcgtttcttcatcgcgatataaaaacggataattttcttatgggtttgggaaggctggcaaatcaggt

SEQ ID NO: 26663 - DNA, 1626 bp, Arabidopsis thaliana landsberg
agtctctgtttttatgatcagactgaaattacattgagttgttctgtaatgctactgcaacaaatacgttaattcaatcactctacatcttccactcttaggatatacatcatatatactttgcttaagtaactatgtgactgtcacaaggaaagttagcaccagctaaaagaagtgaaagcctccgtctaatatttaaacatgataatgccagagcaagttttccattgacactatatagctccaaaacaagtggataacatacaagatcgtataaagacgaatgggagaaatttaaaagctgaaatcagaactcaccttcatcagattcgtcaagaatcccctcactgatatcacgatcaacatcccaataaataacagggaaatatactgaaaataataaacaaagagagagcatcagacctacataaggtaagttgagaaccatataagcatcaagataaaaagccatctagtgtaacaaggtctaagaaatgagaaaattcacatcccatcaaaggccctatgaaactagagttattaattgagaaacaataatcctatagcttttcatctggacgatatgttgtaaggagaaagaatattaacaagcctgcttgcaattctttgaatctactactccatacaacaaaaatccaaagtcacacaaacctgtgagagcaatgctgcatctactcctatatcaaagaactgcaagaatatgctgatcatcatcgtgacaggatctttcgtgcccgcctgtaaacaagctaatcactattccatgtcgtaaaaagtaaacaaatgatgataacgctgcaagaatttattgtaaagtgtataagaaaacatggacaagagaatacctccttgaaaacgacactttgtagagactgcagataagacaaacgaaaaatagagaagttagaaatacttgttcttagttacaaacttacaatagacaaagcggtggggtagagatataggagatattttcatctaataaaccattactggtctcagaacagctctcttttcaaagaagtaaagaagttcagacaaagaaactccttaatttttgaactctgcatcaatctataacaaaaactaacactgccattgtcacatccatgcggaagagtttgacatagtcttgcaatgctaggataacatagagttaaaattactaaaggctagcacctcacataaagacaaaacaaacctttaacatcttatacacacagtaaatggaacacgcatagccaagaaagttctgcacatgacccttccaagttcgagaaaaagcagcagcatcctgcaaatgaaatgaagtaagataagtgcttatcaaatgtttatattactacgtaacaagaccaccaggtaataacctaggtaataagtaatttagtcgaagatgtcatttccatgctgatgagtaaattcggtatttaaattaaaaattaacggaaaagtactggaagggaacctttgcttggcggagttcataaatttccaagaatagctgctttgacagctcttctaaaccttccacctctgcctccattagttttatatctgcataagaaaaacattcatgaacttagggagatatcactagaaagt

SEQ ID NO: 26664 - DNA, 1316 bp, Arabidopsis thaliana landsberg
gagtcgatgttcgattgtctcttcatgctactacacgaaatgtagcaaggtggaaagtttgcaagtaagttttatgtagaatatatctaagtttcttaattctgtatattaaaaaggttaaaatgttaatctttttttggtttttttctttttttctttttttgtgattaacagtgattcgatattgcaaacgtaccattttacagtctcctcaatgttgcctacttatagtaagctcatcaaagctggcctcaagatatgggtttataggtatactcgacacttctatctagataattggtgttccttttctttcagatatatctttcagatatatagaatgttccaataaccatacatacaaaaaaaactcagtttcgtgattgattgtcgaagaacttttttttgacgttaatatcattagaatttagaaaaaggaaaatgtttggctgttacaaagtagagcctttggctttgaatctttggcaaataataataagatgtttggctgttacaaagatttttttttcaaaaaaagaggctgttagaaagatgaatgatagacatataaccacgagattcacaaagtaaacccaccgaagatattatgataactattattcacccaccaaactcttgtacgtatgtctcttttggatttacatgatctcgttacatataagtaaatatttgaatgattaattagctgtcaaatgaataacctaccgatgtaacccagtgtttgttcattgattttgtatttgacagatactgtcttcatagtctcgaattagttggacggtttagatatccgcaaaaccaatgctagatcttttaaaggaaaaataactagtagagtatcaatatctgattttattttccttagaaagttgaaaattgattagttataaatacttattattgtctaacagtggagatgccgacgggagagtcccggtgatcggaagtcggtattgtgttgaagctttagggatttccgtcaaatcggagtggcgttcttggttccacaatcatcaggttagggtttattgtgaaattagctagaaatgtgtgatattttagccaaataagtttatattagtacggttaaagctatttaaagtcttttttgtgtgtgtgtgtattgtgaaggtgggagggagaataacggagtacgagggagggttaacgttcgtaacggtgagaggagctggacacttggttcctctcaataaacctgaagaagctctcgcgcttttccggtccttccttaacggccaagaacttccgtcaagcccctagatactaccactata

SEQ ID NO: 26665 - DNA, 1456 bp, Arabidopsis thaliana landsberg
  unsure (1)..(1456): unsure at all n locations
ggtaatacatattagtcttaccgtcacaataaatcacttacctcacttttagaaaaatagaactttaaaagttgagataagtatctaatggcccagcctcggcccatttacccaattctggatccggatattatcagcatcactttctttattgcaagtcgcatagactcgaattctccatgtttgagagaacccaaagttccaacttccaaaattggtcaaagaccgataacgtgtatattgcttctcttagtcaatggtgactgggtttaaaaaccttgctttaggtctcatgactttgcttttagtcttagaagtggaaaatggaacatggatcatcccgtggctttatttggctgattctatttctcgatttggtttccagagtcaccggaaacacacaaggtttcttccgtcttcagttgaatttctcattccggtttcaaaagagaaactttttcttatttgcaattttgtaaaggcaacaactttattccattgatccgttgttgatgtaaaggcaacaactttctgtctacagttgatgctctaattgctctaagaagcagtttaggtgaccatgcaaacaatatactccaaagctggaatgccactcatgttactccatgttcatggtttcatgttacttgcaatactgaaaacagtgttattcgtctgtaagtttctctctgtctccctctgctggttttataactgaatgattcaagtcttttactgagtgctcagtgacctggggagtgctaatttatctggagaactggtgccacagcttgctcagcgtccaaatnnnnnnnnnnnnnnnnnnnngtcttattttcggatcgctacttatgtatcttgtttgttacatatggcataatgttctctgtaacatggatttgtgctagtctgagatatttcctattaatgaattctctctaatcagaaatataattaagcaaatcttaatgacagggagcttattaacgataatattactgcgaaaatccctgaggagcttgccgacttgatggaactagtaagcttggacctttttgcaaacaacataagcggtcccatcccttcctctcttggcaaactagtataaactccgcttcttgtatgtactatactctccttcttctccgcttcttgtatgtactataatctccttcttctccggttcttaaccgcttcaatatgcagctttattgtttacagtttcaaagtttggtggtatttttctttgctaaataactattgcgtctaacattcaagaccttaatgaaggtcacggtctaatgtacttatttccggggagagggttgatcagggttgcagatggctctgtctatggagagcgtctagattcatagagagatgattgttaatgagagacaacccttacctgtgagacgattccccttatgagactgacacacggatatttggattt

SEQ ID NO: 26666 - DNA, 1195 bp, Arabidopsis thaliana landsberg
cttttcggacgggggctagagcgaaaagtctagaaaacatgcatatatgcatacatttgtctcgaattaaagagcgaagactaccaatatatatatatatatgcagctgcattgtcgacgttcgtgaggttcttcccgcgggtgaaggcaagatatgattatggggtattgatattcatattgacgttcgcactgatatcagtttcggggtttagagaggacgagatattggatttggcgcataagagactatcgacagtgataatgggaggagttagttgcgtgcttatctctatctttgtctgccctgtttgggcaggacaagaccttcattctctccttgcctccaactttgacactctctcccacttccttcaaggtttgtcttttcctttgggttgattatatacaatccttacctaaaaatacctctacaaattaaaacaaacttttcgccccacaaaatactacaatgtataaacttcttgaaaactttattttgggaaaaagatttacggtatttttttagatttctcctaccttatattcaattatgaattaaaaagtggtaatttggcagaatttggggacgaatattttgaagcgacagaggatggggacatcaaagaagtggagaagaggagaaggaatcttgagagatataaaagtgttctcaactcaaaaagcaatgaagaagctttggtgggtactctctctagctattccctacttctccattcacttttataattataccctttttgaaataacttggactggatcttgtattgatataatttgttcatttgtgtttaggctaattttgcaaaatgggaaccgcctcatggacaatttagatttaggcatccatggaaacaatatgttgccgttggtgcattactccggcagtgtgcctacaggattgatgccttgaattcatacatcaactcagattttcaggtaatcgctaactttttgttaggtgtttgcatatttaattaaaacaaaatttgaaaatacataaaagaagaaaaactaatatgctattatgctataactattttttatctaatacaatatatatatatatttacatgtcgcaaatgcaaacacaaaaataacatcaggttgaaattaatagtctgtataatttgtttatatagtttttttttttagtgtaaacatggatagtagt

SEQ ID NO: 26667 - DNA, 1048 bp, Arabidopsis thaliana landsberg
ctttgcctctgcattacttctaactactctatttatcggcgttaatgcatccaggtaaccacttatcatcatcattattgtacattggttttagacattagacatccattgcaggtttttaagctcagtgtagcttaattttacgttttctagttcatgcaaccaagccattgagcttaaatagttcatcatataacctacttaagaggtgtttttgggtttcgataattgggttttctaaaaacgaaattttgatcaatcaggttataaatgagacaataattgttagatcgtataattaatgtttttcaggtccaatgaaacatggcatgaacatgcagttgagaacccagatgaagtagctgccatggtggacatgtgagttttctctataaaacaaaagatattccacgaatatatttacaactatcttatgtgatgtcttgtatataaattagctaataatcctttttagtctatcgaaaaaaactcaagtcttactcgcataaataaaataaaaaaaaaagaaaagaaaactcttacttccagggtatatcatctcgtgaaacttttctgaaaatgaaataattaatccattcatgtttgatatttcttttaatcgagaaaaaacaggtaagtagaatttatgacaaaacagagctcacatgaagttctcttgaaaaagtttgacacatcactttcatattctagtcaaaatgggtcctccccaaagccacattcctctgactattcccttttctttctccttttccattatcataaataagttcaataatgatttttcttagataattactagtttttcatcaaagataacctctgattgcttaacacaatgaaactattttagataattaattaggcttttttgggtttaaaatttagatcatttagttaaacggttaacagatatttgtataagttggttattgatttatagtagtagattctaatgacaccgacatactataattacagaaagttcatttccgaattaacctaaaaaaaaataaatcggacttgacac

SEQ ID NO: 26668 - DNA, 2753 bp, Arabidopsis thaliana landsberg
  unsure (1)..(2753): unsure at all n locations
aagttctataaatatcggggcgttaaatttcgtgaaaggtgacaatagtgcaatttattgaaacataggggtcgaaaaaggagattctcaaaactatcgggtcatttccaaagttccaaaaagtttgaaattttgtgcgggcattttttatccgaagatgcaaaggaaaaaaacaaaaaaggaaggatttttatttttttaccgtgatagtaacgaacgagacagtgacgagacaacaatcatcattcccaataattcttctcaccaagaatctaaaatccttctccgatttcctctcatggcggcggaatcaaccagaaactcttctccgccgtctacttctcagtcttcaagccctataatcaatttacccgatgaccatctcttaaccatcttgcttcttcttcccgtagattcaatcctctccttctcaatgacctgcaagcgatacaagtctctagcttgctccgacagtctctgggaagctctgtgtgaacgagaatggggaccaacatctgtagatgctttaaagttgtcatctttacgagatgggttttcatggatgttgatgtttcagcgagtttataagatggattctgtttgctgtcacaagatctcagacccagatgatgatgatgaagaatcttcttcgtttccgatccctagagcttctcattctctcaacttcgttaatgatcatcttgttctctttggtggtggttgtcaaggaggttagctttgctttagctatatcatctttctcaattcttaccttgttgaaagcagattgattttcgatattatcgactcgagtttctcggttacttttcggttagctagatgagtgtgtcaagcacacgacaatgatgctagttggattattagggaattacttcattaaatttgagatctttgtgtatattgctttgttaattttcaggacgccatcttgatgatacatggacatgatatgttgataagagcaatcaaagcatattgaaatggaagaaagttaaatcagggactccaagtgggagattcggacacacctgcatcgttataggcgagtatctactcttatttggaggtataaatgaccgtggagagaggctaaatgacacatggattggtcaagtcttttgccacgagggactctcttggaaactcctcaatgttgggtctttgcagcggcctcgtcctcctcctcgtggtgctcattccgcctgttgtattgctgagaagaagatggttgtacatggaggaatcgggctgaatggagtcaggcttggagatacatggattcttgaactttctgaagatttcagctctgggacatggcacatggtggagtctccacaattaccgccaccgcgctcagggcatactttgacctgcattagagaaaaccaagtggttctatttggaggcagaggattaggatatgatgtgcttgatgatgtttggatcttggatattcaagaaccgtgtgaagaaaaatggatacagatattctacgatttccaggatgttcccgaatacgcatcgttgcctcgggttggtcactcggcgactcttgtattgggaggtcgaatcttgatttatggcggtgaagattcttataggcataggaaagatgatttctgggtgttggatgttaaaaccattccttcatcaggtttgaaaccacaagggcttagcttaaacggatcatcagtgtggaaaaagcttgatcgaatctcatatggaccaaaaagtcggtcttttcaccgtgcctgcgctgattgttcagggagatttttatatgtgtttggcggaatggttgatggtcttcttcagcctgcagcatcgtctggtctaaggtttgatggagagcttttcatggtggagcttgttcttggcttctctgacctagaccatcaacaaagacccggaaaaagcatgtaatagtggtggttccttcttttgtaaattagcagattttgtttaaaagcatatcgagaaaccagaaatggaacccacatgatcaaatctctgattacagaggaacacaaaagatgtgttgaaactggaactttcttatagattctgattcagtttacaatatacaaaattccatgacagtggatgtaaatatgtaatgtaaggacttgtttgaattagatacaaagaatgcagaattttgtgctatgaaaaacaaacttgcttgcctcatgggttgagtatcaatttggttctccacatctctgccatgaccttcctcggggcgggatcatctggacctttgtctctttgtcctgaggtgaagtataactgtccatcccaatacccagccagcgttgtcttcacacggtatggtaatttcccaatcacataccatttctgtagaggaaaggcaaaatcattagctttgtctcttggacaggtttgagtaagaaggctttaggattttaccagtgtatttaagttgaactggaagatttcaccaacgagaaccatctttttggtttcaggatgtttctctgttgtgcctccaacgattacaatggagttattaacgactttccaagcaaattcgatatgggagtccggttttggcatcggcggcataactttccatttcatttcctcatccaacatgtagacatcactgaataccacctgaaccaaacttaaagaacttagttaacagaataatagcttaattngcttggctaagacattatccagtacctcatccgcgtgagcatttgaga

SEQ ID NO: 26669 - DNA, 920 bp, Arabidopsis thaliana landsberg
tcaattctaacaatatttgaatccagaacaatagaaaatagaaacagacctgcacttccactgaatccagacacgaactcacggcgtttgtctcgtgcagaaacatactcgctctacatacaatttaaaaatcgaaactttcactcaaatcaatgaacaatacatgattaagtaatagtagacgtataatcaagtaatctgagatcggatcatgaatcaaaaaagggtaattcaattgaaaataaatcaaacctggtgatagtcttcggaaggaacaaccaaagcatcaagaggaggagagtgagaggccattagtgacctcaacgaagagagaatctcggacatggcgatgtttggagttcagagaagaatttgactgcttcaaggacgaacagaacacagatgcagcagcagatagatataaaaaagtacagatatcacagttttatgtttgtaaactttacgtgttccaaggaatcctaatggctgacgcaactaattattttttattttttattttttcctacactaccgatttgtgaaattattgataaaattcaacaattccaatgaaagaacacgtaatgaaattttgtttttattttacaacaaggaataaataagagtcaataatataaagaaacatgtatacacaaaccattaatggcgaaactgaaaacactcataaagaaaagaaagaaatttcgatgttgagaaaagaaagaaagatttttttttatgattatttagcaggaggaggaattgaatgaaaagagacaaattgaggaagcaatttttgtttttggtttaaggttgagcaagtcttttgactattgcagccatgtaggttccttgatgttcagcaagagccaattctgtttctgttgctttttttgacccatcaccagcgaacacacctg

SEQ ID NO: 26670 - DNA, 1464 bp, Arabidopsis thaliana landsberg
ctaaaacccttgaatagctctgcaataccgcctttcccacatcctacccaaaagaataaaccaacacgcaagaatattcagcatataatttcgatattttccatcgatatcttaattaaaacaatatgcaaaatggctggggctactcactcggttaaactgaatcttgcagatgtcaagtgaggtctgagaaagttcagggtatctctgtttcagacagaagagtaagctcctggctcgagccgcaagtatgtggttcttgtcattgccacgatctgcatcgccactgatatctttcatcatgtcccatgaggacttagagtgagtcaatcctccagtcttacgcctccacgtaactagtgaagcctcaactttgtcggcgagctcaagcgcctcatgctcagatgtgatcttcaagatgtcgagaagctggtcgggataaaacttctcggctgtgcacagttgcttgtaaatcacgtctcctacacttgctttcccactctgtacataaaatcaaacaacaccgagttgatttcaaaactttcacattacatttatatggaagtcgcaagttatccttttatacctttggaagagtggtgaggtaagaatcaggaatatccatgtcattaagagtggaatcgttaatggccaatgctgctttatgtatctgactggcacaatcgcgtttgtgacgcaaatgctttcgttcttcttcagataaaccttcagcaggaacacatggcaccggaagccaccatttctcgtctttccgttgaaccaccactttcctaaacgttcctgaatctctaccaccaccacccgagttcatcgatgagcttcctctttcaacataccagaactcgttttccgtaaaactatccaatatttcctacaaaagtcaaacaagtcgtgttggaaatcttttgaatcttgattatctatcagtctaattcgagtcttatacttaccattagcatgttatcgagttttctcaaagcaggaagactcatgagaatatcagatcttagctttgtttctgttatctgaaattaaaacatcaacgcaccggttttttagcgttttaaattgtgtgtgtcaaaattaagatagtgttgaaatagtattttacctcaacgttagtaccaagagatcttggaataacttcgacaatgtaatcacaaatagacatgaaacaattcatctctcgtttccataagtctttcttctctgtactcaatggttgtaaccttaaactctgtccaaacacagtcgctgcaataacacaacaaacacacgctacactataaatactctgttttgaaaacagagcatatttgaaaagagaagaagaagacaaaccatagagattggttatggagtttgacacagtaacagcagtacaaactcctttcccacttcctgacatgtcttcaccaagcaacagcttcgcaaatctttccc

SEQ ID NO: 26671 - DNA, 1158 bp, Arabidopsis thaliana landsberg
tttggtttttgatttgtaagatcatctaaatgttgttgggttttattgtttcatataaaagtagaggcttttatccgatattaccattaaaatgtgggggccttttcctaagagattcttgttttggtatattgattgactattggaggttacttattatttgctaatcttgttgagtctctgagactgaaagagaatgtcagaaattgtaaatttgtcatcatctttgagatctttaaacccaaagatctcacctttggttcctccatatcgccaaacctcgagctctttctctcgaccgagaaacttcaaatatcattcttttaccgataaaatctgtttggcagcggagagaatccgagcagtcgatatccagaagcaggacggtggtttgcaagagctcgatgactcgccggtgtctgttgagctcggacctatctgtggtgagagccacttcgatcaagtgatggaggatgctcagaagctcggtgaatcagttgttattgtctggtgagtttctaggttagaatttgttaattccatgagattttagatcaaatcgatatagtattggttcattgattctagtagcaacacgaatccgattggaaaaaagagtacttgcactctgattcttcccaagtttttggatttctcatggtgttcctgaatttgccaattgcttgataaatctcaagtctttgctctcttatgtgtttgattgtgtatttttatggttggtgaagatattagttgcatggattttgtaggatggctgcttggtgcaggaaatgtatttacttgaaaccaaaactcgaaaagctcgctgctgaattctatccaaggttttcagtaatttatattcttgttttcatagaatgttttgccatggatttggatcttgacagtgaagtacattctaattggaacaactatttctttcagactgcggttttatcatgttgatgtcaacgctgtgccatatagacttgtttcccgtgcaggagttacggtaagccttttgtacgaatcagtttcagtcagatgcttggattgttgtcttgttgatctaactactacttgttcaatgtttgggacactgggggacgcagaaaatgccgacgattcaggtttctttttatcctttcccatatcaag

SEQ ID NO: 26672 - DNA, 789 bp, Arabidopsis thaliana landsberg
ttcctttaaattgatttaacatatggattacaaatagagccagaaaaaactagaaaacgtattttttttattgctttctaaattaatgatgatctctaaggaaaaaatcatccaaattcagatatactaaaattagaaaatcttaaacctgaaaccgtacgtaacgcattcatatgagatttgtttataactataagttactatttgactatacataaacaattagatcccattattaaaagctttgatcttaaatgtgtaccgagcgatctaactatctcataatgtgatttggttacactaaaccgatccaaaattttgagaatcgtgaactaaaccaaaatccggattcagagcctatattatatatgttaactctgtcgtaaaaacagagctacttatagaaaatgttcaagaatttatggatatgtcgtttcttttgtgtaggtgaatccaaatggcgaaaacccggcatgggaagccatagggtatcgtgttaaccccgatgagaacaaaccttctgaaactcataacgaaagaccacttgagaaagggatagtggagacgatggaagaaacagagcagactcttcttgaatcacttgctcataaaggcctagaagcggttcttgacacggagcatgatgcgatcagaataaaatgtgatgttgtggtcgtcgggtctggttcaggaggaggcgtagcagcttctgttctagcgaaatctggtttaaaagtggtggttcttgaaaaaggaatctactttacgccttctgaacatcgtcctttc

SEQ ID NO: 26673 - DNA, 974 bp, Arabidopsis thaliana landsberg
caagaaaatcgaccttgttatatttatttatatggttggtcatgcatgcaatagtattatcattactttacctggttagagagatgtggaatattaagggattggttgaatatatacaacacacctcgtcgtttttattttgtttttggtcaactcctcgtcgtctttgaattctcgaaataaacaccatgccgtttcaaattttctttggaaaagaaaagaccctgtattggcttttatataaaccgctttcttcccctttactttttcccgacagtagcaagcaaaaattcttcatcgactcaaattcaaaaactcatctctctctatctctatttctctggttccatagctcaccgtcgcatcgcagatctactccttccgcaataaattttaccggcggaggtatcagatctcgccgatctgttgtagcagctactgtattttgggcttctcatttgatattggggaaacgaggagtagaggacgatggaaaatctgatctctctggttaacaagatacagagagcttgcacggctttaggagaccatggagactccagcgctttacctactctttgggattccttgcctgcgatcgccgtcgttggtggtcaggtttgcatctcgatctccttccccttccattatatgcttgacgatctatctcacgattcgttcgttttttttgcgattcggaattgatattgagctgaggtattcggattaatttgccctaaacttcgttgtttttgcttatcaacatccggatcgtgaggaattatagtttaatagcttctactatgaactagctttgcaagcaattggtattgaggaatgttgacttggctttgacttggatatttttttcactagttggtcttgaaccatttaatttaagctacgattgttgtggagaggggtttctgtactttgataattctatgtggcattaagtttatgttgtatcctta

SEQ ID NO: 26674 - DNA, 10189 bp, Arabidopsis thaliana landsberg
  unsure (1)..(10189): unsure at all n locations
tggctaaggtgaaggtcaagagacaaagatggtcccttacaaaataggctttaagtaacaggggatctctcaagaatgattgagctttagtggaatgctaaaggtaattcccaagttatgcatacagagataagatcccatctacccagagtataacaatgaagctctaatggtaatcccaactctagtcccaaaataagaacttaactctacccttttgcattcatgaatctttttaaacccctttttcatatcattattttcttttctcttaactctaggagaagctttctgaacacttcgatatatctagaggatttgggtttctttaacaactaaggttcttgtttttaatctttaaaaccaaaggctttcaacccttcttctttagctaacaagaacctcattcttttctttaacattcccaaaacctttactagatttttttctaacttctttagcttacttcccctagaattctttccctttccttatcaacaatgaattcaccctttccttttaaacacatcccaacccatgatataagcgcccacctagtcctatccagtctgaaaaacgtgaactagaactacatgagacactatctctgtcgttacaaacctaacactttctaccaagctcaatcgaaataagacctcacaaacactcacaagtgatatagggcttgaaagaaagtttaggttagggttcgggttaacgactctaataaggagagtcagctacttggattaacaagagtggttaaaatgagtaggaaaatccaagtattttagggtattcatgagttcaaattcgatgccaagacatgataattctaaatcaggttcaagttcaaattgatagagaatggtatcaaatcataacagtgtggtcgagtagagcaatctaggcatggttcatttttatttcaaattcagtgactacgcaacagacggctagcaacgagggcattgagtttatccggtgaatcaaaatgcttataaggctatctcatcatcatcccctatgcatatgcaacaatcctaaatgaaacactctagactcgatcctaaatgtgatgcaactatatgaacactcctttttttttatgaaatcattttctgaaatttttcaaaatttttttggttttttctatgccttagatgaatgcagactcaaaattatacacaatgcaacacacacttcctgagccctcccctaaacttaagtcacacagtccactgtgtgaataaacttggaagagagtactcaggacaaatccaatcacagaaacaaaaaatgaagaaacaaatcacaacatacggtatagtacaatggtgaggtgaagcgcttacctcagtcgaagaatgaacgtagttgctcgtcaatggctacctgcgattgctcccaggccatagacgaacctccttgttctgtatcagctccagcaggtgggtactcgacctcatcagctctgtggcggccagcaccgctctgaggaaactcgacctctctccttctgcagcggccagcaccgcggtcgcgtaaactacgagactgcagaagtcgtccgctcctactgctagatcgagtgagtgtggtcctcctcttcctcccagattcacgaggctcgaatgatgaatgcctcgcagggacatgcagaatctcttgctctctaggctcaggcctgcgccgacctggctcgggcgcgtcatatctcctcgaaggcatgtcctgagggagatggccctgcggaatagctgtagtggaagaggagcagctgatcttgtccttcagaaacttgatagccctgaggcacttggcgagtaacttgtcttgtttcttgcaccacttctgcagcttgctgttgttcctgtgagcttcgctcaaactcttgctttccctcgcaggagatatttgctcactgaaatgatacatgctcgtgtcaaactccgcctcatctatatcatccgtctcatcaatatcttctgctgtagctccttcggtatgactgatctcctcagttggcggactaccctcgaaaaaagttcttcaagcgtaggcctgaagtcaatgttcctgccctcgagaatcctagtagcgtcaatgcaggggagaagaatgttggcgattttaatcgatgaatgctcgaacctgtagcggtgaaagtcgccagccatgtcaaactccaagaactcacatctgcgcaaatgatccaagtccatcatcctcggtgctaaacctggttccttgagcggtactccacaagcttccagaattggcgacacaacgccacccacgcatagtgctcctctcaccttcttcttcccgttcgtcaacgcccacttcctgtatccacacagatggatcaacagaggtattactggtggtgcgttgttgagatcgcctctcaagacattcttccccttcgtccggcggagaatccctgtaagcgcataatctatcatctccatgtccgtgttagacacggtgcctgtagactccctggagtaaaaaccgttggcaaccgagcggtgaaagtagcggatcccaggactccggatttggttgnnnncggaccgcgtcgagtttagcggtaaattgtttccaatagtagcccacaaatccttaagctcttccctgtcaaacctgggtttggttccctttccactagggaaaccaaactgttcttccaatttcttaatcgaaagctgataccgctgttcagccacggagaacgtcaagaaccctaaccccatggtatccagctcaaagtccgtgagatcctcatacatctccacttgcagtgtggaaagaaactcaattgtctcctccttacaggcagcgtaagggtaagacatgagtgtatccagatgacacttctcgaacagatgttgcacgtcctccagtaaccccaactgggctaaagtctaatagcagggatacctcgttccccagaagtcattcatctcaaagaatcggatatactcctccactgtaacctcgtcaggtttgttcagcagctttgtctccttgcgccatgactctggctcatactcagtttcgatgtcctcatcgatccgctcatatctactcgacatcgctctctttcctctggcgatttcagctcttctctgattacgtcgtgctgcggagcgttcaaattcatctctgaaactctcgtaaacatgtttttctctctctggtctagtggaccaagactcagcttcatccacattataatcaggatccattgaggattctccactatagttactcatgatgaaaccttaaaacaaatgtaactcaaagataaacgttaatacgttagtcccaacaaaaccaaaaacacaaaccaacagagtaaactggtcgagtgtacaaaaaactttttttttttttttttttttctttgccagtttggtgaactcgaggtcaagtgattccttggttgtgtgaatggagtgtgcttgcgatcgagtgaccttgagaggcgagagatagtgaagcggtttgaaagaggtcagtgatggtagatggtgtgtagacgtgatcaagtgaagaggcgatggtcgagtgatgaatggacttgggagatggcaccttggtcgagtggttatgagctagaagtggtgaaggcggcttgctgacataggtcgagtgagtgaaatggcgaggtcgagttgtttccttgaagagagggagcaagcggtgatgatggagaggcgaagagagctgtggtcgagtgatgtctcagatggagagatgatgagcttgaaggtgataagtgttcagcagtgaagagagcttgtgttgcagcaaatggtgaggtcgagtgaaacagagtgaggggcgagttcttgtttggtcgagtgtgtgagtaagagagatggtgaggtcgagtttttgaagagagaaggcgatgagatcgagtgaagaaataaggagagatcgagtggtgtagagaagaagaggatagatttttgtcttctggtcagctgcatggggaacataggcgtaagcagtgggtcccacatgtgtctccttgtttcttctctgtattctctgttcatgtaaaaaccccacgaaatcctgcaatcttctgtaaacttgctaaaactccctcgaagactttgtcgcttctgtttggcgagtaaaatgatgaattttttttttaggtttttaaacatcactcatactcgagcgatatactcgatctctaggccatcattagagtaaaagttttgaatttttactctaccttcacgttactcctttgttcctgagaaccacaaacacaactaaaacaaatcaaaaataacgagaaagtaaaaattatttacaaggatagtcatgggacttcctcccaagtgagcttgttttaagtctataaaataactcctcacacttatcaagaagaaaataaactgtagagagggttagcataatcctctctgataccatcatcatattcagcgtcctccctggagaggtccgcagcagaatactcaatccccctttcttcaaaatagccttccttctcttctggaggataatctgtatcttgagaccatcttgaagtgaattcttttctcgggatagtgttaatcccgcctttaggttgagcttccttctgcatctgattcagcttactcctaagttgctcaatggtgtgggccagcttctctatagtttcattctgcttatcagacttttttctaagttctttcactctttcagtctcatatccttctcctgagatcgctctatcatttccagaggttcttccatcttctgttgacccttgtggagttctgttgatgttaaagtgcaacttgatgtgctttccaaggttgagacctattttcccttctctgacatctatcactgctcccactgaagctaagaatggtcttcccagtattaagggatccttatgctcttcttccatatccagcacaacaaagtcagtaggtacttctacttcattgatcattataggcagatcttcgaacaggccaaaaggtctccttgaactcttatcaccaagaatcaaggttaggtcgcccgagttatatttgacaaatcccagcttccttgcaacagaaagtggcattaggctgactgaagctcctaaatcacataggcaattgctgaaagctagttgcctaataaagcatggtagagtgaaagatctcggatcttctaacttttcttgaacaatcttcttctggatgattgcactacactcgtgagttaacgccaccgttcctagaacttctctgatcctttctgtaatcatgtccttctcacgtttgtgtgagtctggtattagcgcaagacagtctactagaggcattgtgatttcaaggtccttcaaatgtttttcaaagagagcttcatacttctttattagttgcttcttgaatctccctggaaatggtagtaaaggcttgtagggtggaggaacaaagactttatccttggttttagtagcggcatgctttttaagagaaggaggtactacttgagcttgggatcgagtactacgatcgagtataggctcctctattgctatttcagctgaaacttcattctgaacgaaaacctccccttcttgaacttcactgtccctagtgatagaggtaaaggcatgtcgatttgggagctctcgatcatggcagatagtgatggcgtgagcagtggcatactccttagggttctggattgctttccctggaagttctgtaacttttggtgcagaggtagatgctgattggccttccaaatatctgactttggtgtttaatgcttccattttggcattcaggtcattgtagctgcagtccagcttatggtgcaattcagataatttcttagcaatttccattgagctagatgcttgtccatgtagcagctgttgtaccatctgtttcatttcagcatcaggagcagcaagaccttggttttgttgaggtgcaaacccaggtggtggttgttgctggtagttcccctgaaattgctgcttgggaacgaaaccttggttgtagggaacaaaaggtttgttctgaccttgttgttgctatggaggatagacctgatcttgtggattagcaatgttggtgctgcggtaggagaggttgggattgttggttttgaagttgttgtatcctttgtagccagcctggttgttgttgatgtagctgacttcttccaactggttaccctccccatcttggacttgatactgctcgtcagcaacaaggaagtgtgcatgcttctgctggctaaaaaagaatcatgtccagcttgtcatttagcgctttgatatccttcctgtgtttgacatcacggtcagctgttcctctaacggtcctatcacagtcctcgttgtacttgccatttgattgagcaaggttctcaatcaattcccatccttcttcaacatctttgttctggaaattttcattgctggcggtatccagaagcattctgatgcgtggtaaaactcctctgtatagagtgctaagtagagaggctttcttgaagccatgatgagggcattggttggtgtaacccttaaagcgctcccatgcttcacagaaatctcatttatgagtcttgcagttttggcgttggagaagaactttgctaaaaaagccttcttgcaatcatcccaggtgatgattgagtcatggggcatattcttttcccagatgtgtgctttgtcgcccaagaagaatggaaacaaccggagcttgaatccgtcttcactgacaccattgacttttgttaggttgcagagcctatcaaattcatccaagtggtcgagtagatcctccattgatagaccatgaaatttgttcccctgaatcatcgagatgagacaactcctaatctcgaatttatttttctggatagcaggaggtgcagtttctttcccctgacggtggtcccgtggtgcatctccagcaccaatgttggtaggcccattctgttgattccgtttggcagccatttcgagtggttgctgaggtacaaggttgactgtgtttctcctttctctgatttcgcgagctatgcggtcgatgttgtcgttgaaaaggaggttctggttgcctgttgatcgagtttgcatacagcagaggtgtacttgtatcaatgagacaacaagaaaaatacacagtcagtaactggaatgaaaattaaatgtaacaaacaaacacccaattggcaacgacgccaaactgataataggtttttaagatcaattatcttaaaacaccaatcatgtcgttgtagtattttaggttgtcaatccaaatgggtgttatgccaagaatcaagatgtgatcagaagtcagtaagtcaagccaagcattaacaggttttggtgtgttctagcagtcctaagtgaacacgcagaaaacagaaattcaagcagaaacaataaaacactggaccaacacagctcgttgcagagcactgggtgtggtcgagtgacaggtcgagtagaagacagataatgtaacaaggatactcgacaacaaagtctgttgccagacaactgggtggtcgagtaccaggtcgagtaacagtaaagaactgcagaaactaagcaacagatgacaggatgcagtaaacagcagtagagtaaacaataaaatcaatcagataaagaattctcgaggatgggataattgagtagtttcgattcctaagtttacaggtgattgacatgctcaataaattatccctagacaacaagttcattaaccaaatctaagtgccaccgcaacagagacccttaagttaaactagtctcagactcaatcaccattgacgagagctaacctaacaggcattacgaatcaacaagttaaagccaaaacgctccctacaacaaataccttagtacagggccacgattctctggaattagtggttcagacatttcatcgaacaccttttgggcgcggaaatgtctgggctcaaaattccagttgatcagaaagcaataggcattaagaacaactaatccagaagggatctataaatcaaactcaaccgcctagcatactgagaattctaaactaccctaacccatcctcagaaacctagtcactactcatacatcattgcagaaagcataaacgatgataagaatgaaaccatgatatcagtagagtaataacaagatgataacaggatgaacaacattaaacgaaatcaaaagcaaatactgaatagattaagagaaatctggattacaaaaacgtcaagaacacagtgtctgcggaataaaactttgattatcgaaaatgtaaagtacgtgctacttatagcaaaatatttcgaaaccctaatactcaaaacgacacagtattgggacggattaagaactatactcgacctaggtggtcgagtgagtggtcgagtgatcaattggagtcttctgctcttccttatgcgggagtgtctaggtgagcgcggaatcgtgactctaaagctggcagtcgagtattatgtcgagtggtggatgatggtggaactcgacttggtggtagagtgattggtcgagtgaatgatgatggtgatactcggccatgttgcctagtaatcgagtggtaaatcgaaatggtgaaggcagctactcgaccaaggggtcgagtggtgttgtgaagtgggaaagtcatcaactcaacctcgtggtcgagtggtggatagagtgtcgcggtcgagtgatttgctgtagaggttgtggccgagtacttcaagaactccaggatgactgtactcgagctcctggtcgagtatgttgatttgatcaggtccacttcttccaattagctcaccagcagctccaaatcacctgaaaacaacacaaatatgcaatatacgtgcaaaactatcctagacatgcaaagtgatgacaaatggatgttcaaaacgtataaaatgcacacttatcactttcctttctaggataggaaaagaaaaagaagaaatggttattccgatatgttaggaggctgaagaatatcgatgaactaaaaaccatcctcaaggaggtgtggaatgatgaccctctatcctcaattgaagagagataaggagcctgcagaggggctatagtacgatggacaagagagaagtagaggaatagtcaggtggagatagagcactttagagagcggttagaacatgcaatggtaagccatgttcatgatgagtccctccttcttttgattaattcagatctaaatgctgcttatcaaagagaataagagttctaaacacaaagaagtaggcagaacttgctcactttaggagatcaaattctggattctttcatgcggtgacaaaggggagaacctgtatcaataatctcacagttttggaggatgcaaatgggaccaccttttataaggatagccagtttgcctcagtgatctcaagttgttaccaggaactcttttcatcagatctgacttggcctgctaagataaggaaatttgtggaagatgcaatttgtcctcaagtctctgaggagattaattcagttctgataagggatccttcctccctggaaatcaaggaggcttcgtcgacattcaccctgacaaagccccaggctccaacggtttctcagctagtttctttcagtcaaactgggactttgttggcgatgccctagtaaaggaaatccaaggttacttctcaaccagtgtactccaagcttcaatcaacaaaacttttatcaggcttattcccaaagttcaagggccaaggagggtactggattacagaccaattgctctctacaatgttgtggatcaggttttctccaaagtgctaaccagaagactcaagacagtcctgtcccctctaatatgtgagaaccagtctacttttgtggctggtagggcaatcttagataatttgcttatcacacatgagatgcttcattaccttaaggtttatagggctcgaaaaacgtctttttagctatcaaaacagatatgtctaaggcttatgacagattagaatgggagtttattcaggctgttcttgatagaaaggatttccatccaacttgggtaaattggatgatgtagtgtgtgaagacaatctcttattccttcatcattaatggagctgctatgcgtgatgttattccatcccgaag

SEQ ID NO: 26675 - DNA, 1085 bp, Arabidopsis thaliana landsberg
ccttccgttaagaacgcatgatcctttctacttcttcgcctaaattgtgttcagttttctttatttgttttaatgattgctgtatttggatggttatatatcatataaatttaaatttttataatataatataattgattatcgttaaagaaaaaaacatgtggcattggattattggccaggacagaaaaagcccattggcccacaaaaagatcccagatgtgaattaaaaagctgagtcaaaactcaaaagccacgtcaaatcaaactctgatccgtagggaccggttggttagcgaatgtataaataccaactctcattctttcacaccctttcgagtctctctactcctcttattcaccggagtaacccaaaaaaaaaaaggaaaaaatataaaaataaatattctcccctaaaaattttggaaaaccacaaacagaaatctctctgtctcaccctagaaaaacctagaaatcttatcgctatggctgcggcggttgcatctggaattgccccgacgacggccatggttgatcaagtgatccctaatcaacccacggttgctgctgctgctcctcctcctttccctgccgtgagtcaggttgcggcggttgctgctgctgctgctgccgcggaggctttgcaaacccatccaaactcgtctctctatgtcggagatttagatccgagtgtcaatgagtcacatctcttggatctctttaatcaagttgctccagttcacaatcttagggtttgtcgtgatctgactcatcgttctcttggttacgcttacgtcaatttcgctaaccctgaagatggtaaatattataaacaatcatacaggaatttaatattattattatggattacgacaggaatataatattgctcatgtgtttgcttttgtggattcgatctttgtgctggcatgctttggtcagttgcgctagataagcattaaagctgtgtgttagtttattggatcagcgagtcgtgcgatggaaagtctcaactatgctccgatcagagacaggcctatcaggatcatgctctctaatcgagagcccagcactacattgagtgg

SEQ ID NO: 26676 - DNA, 1459 bp, Arabidopsis thaliana landsberg
tcttctctccgtacttcgtaacgggccgtctcttttctcggcctttttttctctattcccgtccacaggccacttggcatttcctcccgtcatgtgacggctgacgtcctcgtctcagtttccattttttttctctctttactttgtttcctttgtatatttaaaataaaacccataatctttgacagatgaaaaaaaaaaaaaaaagaagggaaatccaaaaccttttcacaaaatatttatagcagtttcgacaaaaatggttttctgatcaaaatttttgaagaggacagaaatgatgtcattttagtgtttatggaaataacataagtagggtctgttcgaaaatacaattcaagattaacttcctagtttccttcctacaatggcattaacattttaaaaaagttttaaagatataattggtgttaattagaagaaaaaaacacacatgattggtgaaatgatttttccatagattaagcgtacgcatgtatagaaggagaataaaagatgattaaagaaatagtaaaagattcaataattatccaattatccagtttgaatgtacattatgtacctggaaagagcttcagtgacgctggtcagtgggcaggaacacattagcgttaatttaacctagaattattcaagaaaaggagaacataattaaaagagaatgtaatcagacgattcttctgtagttgcgtgagttggtttatggcctcaaccttcttatcatgcacttgtaaaccgagaactatataagaaatatgagtaaataagtgtttttttcgttattggttgatgattgcttttctatgtctaaatatgatcaaaacatacacctacataaacactatgttaatagttcacttttgtcaaagatctgattaaaggcatttattttttgacaataatttaaaggcatttactcattggttttgtgaaactgcaacatcttcgagatttcttacacaataattaacatgatacctcgtgcaccaccgcgagttagttaattctgacatctctatgtaatttttcaaatcatctattaaaattttaactactatgcactagtttttgtgtttgtaattatcttttgaaagcacaaaattttaactaattagtagtatatcattgtaaagtgtaaacccatgatatatcattgtaaacacaaaagccgataaaaatcaaaccacaaaaactcacatgggggtttactagatatggtttataacattccaatgctatcaaatgctattaattgattttaaaatctgattccactaaatcgttaatagttgaagtatttcaaggttatatacttatattataaattcaaaaaaatataaaaacgtataaagttatatactatatgatggtgtctcttgaaatatggccgctgttgcgatatgtatcatcaaactatcgaaacttattaattagaagatgg

SEQ ID NO: 26677 - DNA, 1331 bp, Arabidopsis thaliana landsberg
tcacgcaattatatatgtatgtaagggccacttgttatttagactcaatgtgattttaacattagaatatgtttgaatgaaatggatatagggctaaatggaattattgatatgtaagaggtggaattccaaaatggacctacataatttttttcttgcaaatttgatcggaagagggggtatattgaataattaatttatttgggatacaactatgagagttacttaagtatagagctaattatgaaattaaagaaacgcgccgcgtttttgatccataggacggtacaaaaacggcgtgctgttttgttttagaataaagcttcttcgttttttggttctttctcttaaaatatcttcgcgacaaagaaccatcggagaagaggaagaagatcagtgtagagctatcgggaaatttatctgaagaggaaactgaaattgagatcgaagttttgagtttgggtaaaaaatggaaggaggagtagaagaattgagtattgaacagttagcttcgagtatctctacctacaaagaacaactcgaacaggttcgttcgagacgatttctttcttctctttgtttcagaattttgtatgtggattagaatttcgaattggtgaagagaaattgaatgtaggtttctgaattttgtgtgattgttcctgagttagggttcgtaggaatagttttttagggattcgttgatttgacgagttgttgttaagtttcattgtatcttcttcctttgtgaattaataatcagatttgtgaacggattaatcactatactagggttgcgagttctatttcaaagtctgcgtttttatgttcctttttagtctctctgataggtcttttggcttagttttagtagggtgatggaatgtgatcatacacttgcttctcttctgggttatctgatagaagttttgactcttttggtctcaggttaggcagcttttgtcagaggatcctaggaactcggaatatgcagacatggaaaaggagcttaaagaggtgatcaatccctattttaatcacttattttgtgtgatcaaatcttttcatctttgttgtggattcgttttattagtctcccttagtttgagtgaaattcattgatccttatgtctttagcatttgcggcatacacaacatgattaggttacttagcatgtaggttttgcatacggtgctctttatgtttctattccctgcctcttttgaaggaatctgcgtgttgtttgaaatagcaacatcatttaacagctagcagataaagtggagttttctttcagttctggggtttgaaaggtgagtatgtttttgag

SEQ ID NO: 26678 - DNA, 983 bp, Arabidopsis thaliana landsberg
aatggcagtattttgatgattcttgaaatagaagacaaggtataaaaatgaaaacatatagctgtaaagcaggtgtttatcatagcttaacttatcattgttgttttctatcatgtgacctccaaaatgtcaaaatgtgctaccacacgaaattcaagtagcatgcggatcacttcatcgcaaagtgattccccataaactttcatgtagccgatacatgattatacatataattactaatatcacatttatatattatgtattacgtagaattgcataaagtggaatcgaaactcattctaacagttttgctagatattatatatttcatatctaatggctaattgtatatattgcctagttaaatatgaggttgactttacgctaaaattgtttacatgccaagttaattgtcaactaaggtgatgatatttttatcagtattaatctctaaattttaacaaccccatttctcatttttaataaaaaaattcgaaccaaaataatgatcatggccaagccttttttcaatggtaggctaattagtttttatccttttaatcaaaatttcgagaaatcttttaattcatcttaattatattgtgaaagttttaacctactactagttaacactcgagaatccgttttgcgatcaaataaaaacttgaagcatgtatatacagaatataactaagttatgcataaaggtgttaataatcttaaattacaagctccatatagatttaagaaggaacccttgtttaaaagattaaaaagactccaacatgatatttaataaacccaacatatttatctatataaaccatatcagagcacttgtactgcatcatcatcattcataccatcaaatcctaaagcacacaacaactgaaaaaacaaacacctttctatcttctttgtttggtttggcaatggatctagctaaacacacaagacttcaaatattgggatgcatactcctg

SEQ ID NO: 26679 - DNA, 1355 bp, Arabidopsis thaliana landsberg
  unsure (1)..(1355): unsure at all n locations
caaaggcaagccactcggcctagggcgagcgctcctgcgccgacttatcttttttgtcttattcccaattagggcaacctaggattgcctataatctagacctcttatgtttttgcccagaggatcttcgttttgtccactggtttttagggttcctttgattttcttttgcattttctggttgttctgttgagaatttggatttgatttcttctgcaaacttgtttatctcattgagatctatcttttgctaagtttataatgatttctgagttttatgaattttctgggttttgttctatgatgttcttcattgttcttgagtagtgttcttcagagttcttgagaatgggttaggtttaggtggattcctctcttctttagctagctaagtgtttatatgcatgattcccttctgttttaggagttcttaatgctattttctttctgatcaattgaaaattgatttcagactttctccatccaaaaggtgtttgatgaaatgtctgaaccaactaatttcagagatttgtagattctagcccaaggaattggatgattagactgcttattgactttaatagattggtgtttaaagcctgctttattatgtttcatcaacggaagttgagattaggaagttctaaagttatcagaatcactcacacggaagtggcttgatttggttttgaatctattgtctagggatagcttgattgagtttgttagttagctaatggattgaggagtccactaagaccaattaccccattcttaagagctctgtttcgtttatatgtgcaaaacttcgtgtttttagtactctgttcgtttcgtgcaaaattggtgtttttagtattgtactcgacctgcttactcgattgctcgaccgagtgctttacctagtgcttggtttactttctgttcttgttatttgatttgcatgttaacctgttgcttaggtttagtagaaacacaccaanacccattcacacttggcttgacttagtattctctgatcatatcctgattgatagcaattacacccatttggattgacaccttaaatgctgcaatgacataagatgcatttagggaattgacacacaccgaaaaacctttgtatcaatttggcgccgttgccatttgggtgtttttcttgttacatttaggatttctgagttattaagatcaagttctatttctttctttctggttactcacttgtttcttcatttgcttgtttttgtcttgcaggtactcttactcgactagcacgtcgagtacatcaaccgagtaagatcaaaacgtatgcaaactcgttctcaaggttcatggtaatctcctgcggtaca

SEQ ID NO: 26680 - DNA, 3367 bp, Arabidopsis thaliana landsberg
ttaactttacattttctttgtcacaaactagtcgataaagttatggaaggtggaagcatagattaataagagattaataaatatataaataaaaggttagggagataatttgctttgatacattatcgactagtttgtgataaatttagataacacgaaaagtagccaagtggaacatccagaagtatgacgttgaatcctacctatacccacacgacagtcacgttattaagataaaacgcaatacaactctattcttattttctttcgtgatttttatatcgtaaaaccaaatatacaaaaagtgaaaaataccatgtaccatttatatttttctttataatcgtttcttcttaaattttttaatttttagtggttatgatcactttatagtgtgatgaatttctttctgtctcaatgaaatatttgaaaaacattacccactcattaatgcaattaataataattagattgtttatttgacaaagaaaaaaactaggaagcttataagaaatcagataaagagataaacacaaatgtgactttaagagtaataataaattagttacggacctaactttggctgccaaatcatagagtataatggtgctcataaacaacataaaatatgtcacacgtggcggacacctaaacgttcatttttactggtataatgaacaaaacgagcaaacacgcatggttaatggaacttaattcggtatgtaacgattcgggttggagatggaatgggaactagaacttttgcaatcaatatttttgctccaggagtgtattaaatttaagtgatacatgaattgaatttttatttttaaaatgagatgcatttttataaaatattcttatgttgtgtttaataatttttttttcttagttattatcaatagtagaaaacgttgaaacgtgtttatagtatatatattttacaatgcaagcttggatagtttacataacgcgcgtagttatatgatggcaacaaaaagatgtagttatatcttacatgtgtacggagaacaaatatctaaactaattaattagctagtttgagtcctggtagaatattggaaaattagattacgttttttaatacaatgatgaaaaccatcaaattaaatatattatttatttggatggttagctagaaagctatcaaccgatcaatggtttaattatattattggtcatgccaaaggaacaaattacccataagttttaagggtttctttgcagtttagtaacgcctatattaaaagctcatttatttttatttggtttaaaggaaaaagaaaggtcgcttaaatgcctgcgataataatataacccaaggtttggcataaaagtttgaccccagaataatacacgccaagagtgcatcccccatagaattatagaatattttccatttttaaaaaacatagaaatatctgagaccgtcaatctgcgatgttcttctctctcttttaccacgaaacgacgacgtccctagcatataagcatggagccgttacacatattaccatgtctctatatatagtgaccccttggcctcgctagttaattcatatcgaagaaaactcaaatagaggaatcaagagtcgaagatctctatatattttcccttctcttgtttccttattagttttttccgacactcccattcaaaagtagaaagatactgaagagctcgctcattcacaaaataaccaaaatggttctcactcacaacgtattggcagttacatttggagtcctgggtaagtttcaagcattcataaacaaacatcaagttatacaaaactatatactatatcactgttattataagtgcatatcaaatttaactttgttatctttacctatatgtatttttgtaggtaacatcatatcgttcatcgttttcttggcaccagtgtaagcatcatcgatctcaaacgtacacttctatttttatctgctttctcttaacaaagaaaaatgttttggacattattttcaggccaacttttgtaagaatctgcaagaaaaaatcgatagaaggttttgaatcacttccctacgtgtcagccctctttagcgcgatgctatggatttactatgctctgcaaaaagatggagcaggcttccttctcattaccataaacgctgtgggatgcttcatcgaaaccatctacatcatcctcttcatcacctatgctaacaagaaagctagagtacgtttaaaccatcccatttcttttggtatattaaaacatgcactcatacatacaggtttagctgatgatgataaaccatgtagatatcaactttgaaggttcttgggctcttgaatttcttgggttggggtgctattattctcgtctgcgagctcctaaccaaaggatcgaaccgtgagaaagtccttggagggatttgcgtcggattttctgtttgtgttttcgcagctcctttgagcatcatggtacgtacatacttatgtgacatgtatcacacgcactcagaaaaaagaaatgtttgtctatctaaaaagagccatgctaattcatatagagaatataatatactctaaaataaaagaaactaatatttgtctttccttttccggtaatagcatctctttatgtttacgtatattatatagttctctaacatgtgaaattgtataaaatgatgacgcagagagtggtgatacgaacaaagagtgtggagtttatgcctttctctctatcattgtttcttacaatcagcgccattacgtggctcttctacggtcttgctattaaagacttctacgttgcggtgagtctctctttttttcttatattatatgtgaatctttttctttagtatatgaaaatggacagctcaaacatagtatcatatattattatgggtggtttatgttaaaggcaaaagagtttccaccaccttttgtctctttgcccaaattccatctatttaaagacgacgaatgaatgatttgagccgtacgctacttttgctttatgcttacaatcatatattatatgatcacgtaaaagaaaccgagagtacaattatataaagttttttaggttgtcggcgattgataggattactgttccctatcaaaaaatgattagtgggattgttactgatgatgtgattacttttttatgatttgaagcttccaaatatattgggtgcgtttctcggagcagtccaaatgattctatacgtcatattcaagtactacaaaactccactagtggttgatgagacagagaagcccaaaacggtgtcggatcattccatcaacatggtcaagctttcatctactccggcttctggtgatcttacggttcagccgcag

SEQ ID NO: 26681 - DNA, 705 bp, Arabidopsis thaliana landsberg
tttttggtttcctaattgggccctaaaaaggtcggtaaaatcgtgatttaaagccttttatttgtttatatccacgtcaacaaaacgatatcgtattaggtaggacgagaataaaaccctaggaattagaaaatttgtacaacgtcaaaacatcgaagattttgatccaacgtataccaagagtttcggagacgacgtcgttttgtctctgcgccgcgttcttagtctgagctcacgcttgttcgtttctcctctaacgtcaactgtgtttttgcatcctcagaggtttgtgatacaccttattgtttctgttcttttgtacaagcttcacatggattagtgtaaagtcttagaattgggactcggaatttattgttatgttttaggttattcaacccagttatggtatcgttttgaagtagaggtagaaaccctaatttttggggtctgtaaatttggagaaaaaattgaacctttcccttttttgttatattgtgtaatttgggactaatagttcttcgaagctgagtttttttgtgtgtaaattttgtagggtttaacatagttggggctaggaattttcatggtttctgttggttctaaatcattgccatctagaaggcacatgcccattgaggaagatagcttgatgggtgaccaagaaaagtctagtaccaatcccagtgaaaggaataagggaatgct

SEQ ID NO: 26682 - DNA, 2000 bp, Arabidopsis thaliana landsberg
gttctcttttttttacccttttaaccccatcattattcacatttcctaagggtataactggaatgacagaggggggaaaatgaccactcactttcattgctcgtgtgttgtttgttggcagagagataatgcatgctatgtggaaacctcagaagttcaagtccatatacctgtttgcaacactctacgtgctgacgctaacgctgccttctgcgtctgcggtttattgggcgtttggtgatttgcttctaaaccattcaaacgcatttgctcttctcccaaagaatctttaccgtgactttgcagttgtgcttatgctcatccatcagttcatcacctttggttttgcttgcacgccactctactttgtgtgggagaagcttatagggatgcatgagtgcagaagcatgtgtaaacgagccgctgcgaggctccctgtcgttatacccatttggtttcttgctatcatattcccgttctttggtcccattaactcaaccgtaggatctcttctcgtcagcttcactgtctacatcatcccagcactagctcacatcttcaccttccgctcatccgccgcacgtgaaaacgctgtggagcagccaccaaggtttctaggacgatggactggggcattcacgatcaatgccttcatagttgtgtgggtgttcattgttggattcgggttcggtggttgggctagtatgatcaattttgtacaccagattgacacctttggcctcttcaccaaatgctaccaatgcccaccaccggttatggtctcacctcctccaatcagccatcctcacttcaatcacactcacggcctttgaattttaagcatcaaatctttagtaccggcccaaaagtgtccctagctgccacgaaagttggcgtttttccacggatcagaaaaagacgagatttgggtttttcttagatctaccaagcccgtagtgtgtttgggtgtttgtttagcatctaaagttggttggtctgtttttattgtatttcatgtttgggaattaaagaaaaaaaaaaacaaaactttaggagttaatgacatatctttcatcaagaacaatcatttcaaggattagttcggaagttatggttaaaagattttaggaaggcttgaactagaggaagaagatgagcaaaagttatgataaacatgcaactaaaaccaatccagtttctttctcaaatcacaaggcaccataaccataacaaccacaagtcctaattaataaattccgaaaacaacattgaagagtcgaataacaaaagatagataataattgatagaagtcacggagaagagggatcgatgactgatttaccccttcttcacagtcttgtttgcttcaacgagcaccaccgctagtgcaatcccttgcaaagtgcccagactctccacagctgtagcagcttaagccaccaccaccacctcctcctccgccgccagacccgtaccttccaccacccccgcctccgctgtatcctccaccaccttgagagcattctctcgccatgtgacctggttcaccgcacttaaagcaagaattatcacctccacctcctccacggccaccgcttcctctaccaccataacctcctccgtaacttcctccaccacgtccccctcctcttccaccaccgccgccaaaaccaccgcgtccaccagatgaaccaccaccaccgctgttaccctgaacgggagcaccgtcgggtccagacacttcaatagccttgggacggccggagttgtcaacctcaacgtcgaactcaacagattcctcagctgcgaggctacgaaatccttcagatctgatggaagactggtgaacgaagagatcgtcaccaccgtcgctaggtgtgatgaaaccaaaccccttctgtgtatcgaaccacttcaccgttcccttgcgtctgtctccaccactcatgttcacgtctcctcctccgctcattctgatcaaaatctctccgacgaacta

SEQ ID NO: 26683 - DNA, 748 bp, Arabidopsis thaliana landsberg
aatgaacctttgcttgggtttctttagtttaagatctgagtctaacatatgaatagcatcaaaatcctaattgaccttttaggttatgaaaaaagcattcaagtaagttttgttattttgtaccagatgcttctaagtttagtttctgggctttcccgtggtttgagtggcttaagctctgcgggtcattcatcgggacaagaatttctcaggtctgatgcagtgaatgtggaacatgagatcgaaaggaatccttgcaaaactctttttgtagttaaagcaagcattaagctgaaggatatagatgtgatatttgatgttcctgcagtagacgacaaatttgagaggcttgtggagctagatgatacaaaaatctggtcttctgtccaggaagcaatcattgaactatctgttgaagaacataagtgtttaatcaatgttgatttgtgtaaactccaatcagttctcttcaaatttgagggtaatatatggaagagttctggcaactttatcacagaatctttgctgttcaggtcacatgatatcttgtttgaagcatgcctttctagctgcctattgagtgtctctatggattgctcaagcccatcagctctaggggacgcatcaacagcaaatgaaccttctacaaacaatgttcaggttcagagagaagtaaagacgttggactcagaaacaggccttttcccatccaacgcaagccgttggatgcacatcaatggagcattga

SEQ ID NO: 26684 - DNA, 2018 bp, Arabidopsis thaliana landsberg
tttttcgtatttcttatgtaaagacgttatttagggcaactttttccttcactggttttggcttgtatacttggaagggatgatatcatttaggagtggatttgagttttgcaagtgatttgtatcatatggaattcaaatatttttgattgaatttatagagttttgaaagtgatttgttaactgtactgcatcctgtttagttcagcttgagacggtttaatctgttaaaacaagacctaaaccgaattcgcaaggaatatgatttcacaattagtatctgtctcctttttttgtcatgtgtagtttaaaaccaaagccacagcttgtccaacattattgtttcgtgaaacgaattggaccaacaaaatcctacaaatgaaatgaggaatgttttggtgtatagagagaaacattacttaatctcacttgtttctggtgatgactctatgggtcaagtcaataagtgcccgcctcgatcttttgacatcttcattgtctgtttcaggtagagacccgattgcagctgctgctagattcgcatgttccatggctaattctcttgccctctgtattcccttgctcttcccaagatactctaaagcctgtgtgatataatagtattagagactatgaaaacatattatagattttaggagatttgtttctttcaaacttacaatgtcaacattcctaggatctttttcaacttgatcaacaacttcgcgtagttgaggaaactcttccatggcaaagaggattggggctgttatgactccatggcgaatatctgacaacgatccctttccgagagaggcagatgtgcccgtgaaatcaagaatgtcgtctattaattggaatgctaaaccctgaaaaattagaagttcatcaaagtactgtaagaaaattagttgcaatggagccaaagttttcagaagaagacaacgaaccagattcctcccatactcaaaagctaacacggcaacttctgctgtttgtccagtgagaacggcaacagctttgcagctgttagagattagcgatgctgtcttataatatgtcttctgcatgtagtagtccatactgcaatcatgaaaaaaatcatatttgcattaccgatcactattatatgatttccagttcctatataagccgcgatcgggttattgatgataaaatcgactcttgttttgattctcaaacatacattagtagcatagaagacttgagtagtctctgtttttatcgaccagaaaagaagattatacctataacgctgctcggttgaactagttatttccatggtttcaccggtaacaagatgttctacagcagttgcaagtaatgctacaacctacaaaaaaagagacacaatgaagatgtatggcttcgaagaagtgataattaattctgaagacagatgtcattgattctagattgtatatcacgggagattcaatatagcctgtcaaccacagtatcttataaaaagtaaagatttcttcgaaaagtttaaaataccagggtcacgtttattagtttcttttacctctgtgttctttaaagcagcgagagccccacaagcccgggagagcaagaagtctcctgctaataccgacatctacaacatgaagccaatggtgatcttcatatccaaattgcagcacaatcgccaaaaagcatatttaatcatgtcttagcttctactgtcaagtgagtaccttgttacccattacaacatttaaggaaccaacaccacgccttgtatcggcatcatccaagacatcatcgtgcagtagacttgcgacctacaatgacccgagcattactaattttaaaagggaggatactggatcttgatctttaatgaatgttatgagtaaaactatagttactcacgtgtatcatttcagtgatttcagcaataccccgttgccttacgcgtaattctgatgtgaaaataactgttgattccccaatcaatgcttctggaacgcgtacactcagagcgtgtcgcc

SEQ ID NO: 26685 - DNA, 342 bp, Arabidopsis thaliana landsberg
atactctatacttcgccaaccgagccaaggaagttaccaacaatgcccacgtggacatggtaatgatctttgttccatgcttttggttcatcttagtgcccttttggatgaaaacaaactaaaatatttacgtcctgtctattatctacaggttgtctctgataagcaactagtgaaacatcttcagaaagaagtggctagattggaggccgagcgtcgcacccctggtccatcgacagaaaaggatttcaagatccagcaggtttctgtccatttcagatcaccaaaatatataattgaaccaaagctttggtacttagtttatggctattttgtgacatt

SEQ ID NO: 26686 - DNA, 1467 bp, Arabidopsis thaliana landsberg
  unsure (1)..(1467): unsure at all n locations
gaatgaccataagcttttaaattcagtggtctcactaagttttctacctactctcttgttttttcatttaaaatgaaagtaagagattagggattttaaggcccaagcataaaaatgaatgtataatacacattgctattgggttggttttgacccattagctatatggtccaatagtattatcactattcttgtacgtccaattccagcttgttttagctgaaccaaattataaattgtagtcaaagaaaattaaataaaaactaattttgacaacatcaaaaataaccccaaaaaactaataaaattttgtcacgaattcaacatataggataatgtataatatgtattgaatcatcttttaatatgctttagattatggccttttcacttttttcttttatactgaaaagatacacatcgcattgtcaataatattgtatattgaactttgatgataattaaacctgtcaatggttatacttaccaggagaataggagatgtacaccattaacatgaatttgaatcaaaatttacagtccattgtaataaatgtgatagatagcatatgttgaaaagattaaaactcattgagtacaacaaaatttaaataagaactagttagatttaatacaataaagtacaatgagaaagagaacaaaaaagaaaaccaaaaatataggttgggtttcaagatgacgtggaaaagttatggtagtttgcgcaattggtaggtggggaaaacttggagtcttcaacaacaaggtttggtgggaatttgcggatgggattaattagtagtaatgtttttacactgattaattagaacatttctatgaattacataattacttggttcaaattagtcagtgcacagtttcatcccttttttgtataggaaattgtgttttttgttaactaaacctgatttatgttcgttatacggcacaacagtaacattccaaataaaggtaaaatatggtacactgcttctcaaaaggaaataataatcgaccacgcacacanaataaataaagcaatatatttttcaaaacacacacgcgaaatgattactttcacgaaacaatgacaatgttcatcagtagttttgtgacatcagtaaaaagctagatatccatattctctggtggaacatatttggttatttcggaaattcgtatagtggacttcgaatttaagagtataatatgaattgtcaacataagaaatctagttataactacgcacatgggaggtatcgaatctttactttttacaatagtgagagacattggtaggtacggtacagtgtgtgttgtgtataatataaagtgtgtatataccacacgcacgaaggcaagcacacgtacgagtcccccgtgagtcaataaaccaaagagtaattaaagtgattgggtgacacgtgcaacgttctctactccagatgtttcatcaggtttttcgta

SEQ ID NO: 26687 - DNA, 1517 bp, Arabidopsis thaliana landsberg
gtgcttcacccccaaaatctaaacaatacaatctattacatagtgttcataaagactatagttcaatctaaatctgatatgtttctaattttatttcggtaaatgtgatatattagaccaaagttaatgtttcatgttttgcatgagtagagctgaatttgtataattcttctagtcttctacctagagatatattaactttgcggagaatagtaaccagaatcggccgaatatatggtcggcctcgtgttactttacttacttgttatggtcttaaaaccctttctgtccgatgatgatacataactaacttcactaacaggtgtaagactccacgatttggtgaagacagtggagaaacacttgtcaatatttctttcaaaggtttctagtttagataccattcatatggtgttcaaaacatagaagataccattcatatataagtgtttgttttcatgattattgagaacttcattatatagtttttaatcttgttatgaaagagtgtcaatggaaaccccctaaacgtgatattaacaattactccatcaatttcatttataaccgttgcttaaaaatatttcacactaaaatagtatgtgaatttctattatgtagtttttgtaaatacctttataattttatcttctaatcaataagctaaactattagaaatgaaactaaaattttgttaatgttcacattaaaaacaaaatttataaacatgaataaattctaaacgacgctttataatgagtaatttttgataactccactagttaacgattaagcttaagtttttttttgggggccaaaattaagcttaaggttaaggtatacataaactaattaacatattatatataatcttccctaagataagtaaacgaagagaaagcgtgtaaattaggagtttccaaatatagtaagtcggagaaaaattaaaaacgagtattaattttctgtttgactctttctctcctcagtgcactctccactttctgatttcgcaccgcccacttcttcttctccccacatgctctatttttctcgttaaatttattaaatttgggacaactaatacgaagatcacatctaaaacatgtcactatacaaaccctttttcagacaatatactaaataattatgtgtaagtctataatcatctagcatgactagcgtataaatagtcaaagcgatgaggaaacttcgttcctccactaattaatttattgcgagtttgaaaaagtatgcagcctcgaggaaaatgtattgcaattgaccaaattcaaccaatttgtgggcacgaaattgctctaagccacattcgcggttttacgacaatgactttagcaatttccagtgtcaattgtctaacttttcaaattggtcttcgagtatttcacaatctaagtcaaattatcgtttgttaatgaacatatccagagattaaataattataaaaaaaagatcatagagaccctattatgtggaattaaagccgctctactaac

SEQ ID NO: 26688 - DNA, 1272 bp, Arabidopsis thaliana landsberg
cctgtaattagattcatatttacaaattttttgcctccggtttcacgaaaaaaatatgttttagctataggctttgctttcttttgtaaattgatgtttgtagatttctaggcaagtttctttatattttcaaacaaacctacttaattactcaataagaatacgaaaactaacttataacagctcaatttggtatggttttcgtcatgcagcagctatttttgaaaatttatcttatgaaagtttgataactaatgctcatgaaatgatgtaattgctttaatttacatgtccagatatgaaaaatcgaatcaaaaaaggatccagcatgattggtgtttatggaagatcagacggatcaagcagcattcagtcttctaatggatccgaaagtcgtgaaagtatagatgacaataagcaaggtaaatgtgttttttgcataataatggtcgttttcagatattttattcgtcttctctttgttcttaaccattgtaaatttaatttggcttctaggtcatcaaagtttagtagagtggttaaatgagacacttccttatctgaagttaccatgggaagcttcagaggacgaactgagagcatgcttgagggatggaactgtcttgtgtagccttttaaatcagcttagtcctgggtcaatgagaatggtacttacgaattgtcatgaccatttcacttacttatctgctgctagactaaccccttttttttttgtcaaaccctcctttttttgactaatcctctttggttattctatagggaggcagctttgagcctgccagtgtaaaaattgagcggtttctgactgctatggatgaaatggccctgcctaggttcgaagtttcagatatagaacaggtctgttatgttttcatggatattattcttcgtttctgtggaaaaagttgatttcttaaatatggaaagacatgctggtttacatagaattatccatgtcatatagatgaagtggttgtcgtattgccacttttcctttaatgagtcgaaccaattctgtgtaggcatatgtttagattaaaattagcctcgttttaaacacttctgggtgcaacacttttctgatcatggtttttgtctgacttgctattttgatgataagcttgcatgatttctgctcccatatcttttcttctctctgtcctcttttgtgtttctctattgagttatgaatcctaataaaaagtaaaaaccagggggatatggtgccagttgtacagtccctgaaggagc

SEQ ID NO: 26689 - DNA, 1420 bp, Arabidopsis thaliana landsberg
gaaaaccggagatcagagaaatgtcttgtgtaaaaatgattggtctttttacaattatttatcaatcaagggacatggggtacatatatgttgatatcattattccctagtctattgaactccatttgtctttttatcaatagataggcccactttttatatactttttcctccttgccaaatcataagaagttaaaacttaaaagtggatcaactaatttatagaaaccattaacaacttttgacactcttctttaatgtgtgtttcatttttaattgaatgccaataatataactttaaattccactgagaagatttgatgtagagacaaagaagtggctccaattcaccatctcccaagccaccaaaatctctcctaaacccttttgtcactcccttttctcatattcactttttttccaaggaatatttaaaacctcatgcaagttttcttgaatataacaacatacgaatatgatctttgattagattactcttttatatattatggttaggcatgtccttgcaagatttttgtatttaacatattgaaaatttatcattgaattacaactctgttatgcatacaatcaaatcaaacgtttaagaagaccatcccctatatatatttatatacaccctatattctcgggatgtaataaagtttccatttcaaataaaaagagcccttaaagggaggtaagtggggggcatgaaaaaagggtttatatatctcaataatcatccaaacaaaccaatccatgtgcttcccttcaaacattcttcttgtcattttcctcccaaccattttctactttggccaactttttttcttttgctacttaaaaataaaaataaaaatatgcatatttccactcacacattatacattctctttttacaatccttagattgtcacttttgccttcttcctcttgttcgcttaccactttactcctgattctcttcctttcggaatttcatcgaactactcaacaaccctatatacttttattgtttttaaagtattctcatgcagattaaataataataaataatatacacctttttcctccttatataaataggctcaacacacgtaacatggccccaaaccctagcaagactctctctaagactcatatcattacgtcatgagttcaatagcaagagaccgaaaggaacaaatggtgatccattcttcaatcgtcttgcttcaagaaagattcagacaacttcagagagcaagagagttaagagctgaacgagagctcctaaaccctaaacctaaccaccaagacaacatcttgcaatattacagcgaacccactagtttcggtttctttcagtttctacctataaactctcaaacatcttcgtcacagcagctcctatccctctccttatgcttacactcca

SEQ ID NO: 26690 - DNA, 1305 bp, Arabidopsis thaliana landsberg
tcatgcacagatcttagggatgtgtactgtggtttccacaaaaacataataccacgttcatggtgttaatgtaatctatctctttcaaatgttatagaaattagttgacatggtttgagtaaaatgccttttgaagagtttttcatcgagtgttggacgcccatgtttagaaattgattgtaccaaaagaaattttttactttttcggtggtagttcatggtggaccagagaaattcaatcattttaacttgtcaacttttgtcaaagttccattttttgagtaaaagtttctttattatctctaagccacgtttttccggttgttagcttttaatattctattggttttcactagtaaaaagtatacaatttgaattcctctgataattttgatgttaaagcatctcaatccaatactactaattaatgaggtatttagttatttagaaataatataattaagagtttaaaaccatcaagcaaatctattgtcaaattcattaacaacatcttcaaaatctacctattatttttcaaattttaattaaaacaatttcagtttaggaaaaatggaagccaatcatgccggctttaaccattttgactatctgcctatcccaaaccagttagtttgactaggtttcatggctgctaacaatatacaatcatagccaaagctgaatagagaaggttattttaaatcagtcaaatcgtactaaattgtttggacataaggctccgcttgctgtgaataaggccaaggagaggtcggcagaaaatttgtaaaattatttatttgagtaaatgttattcatcaagtaaaggttgagtaatgccttttgaagagcttgaaaaataggccacggtttgtattaaataataaattaacggttcaagtaagttcctctcaatctcatcttctaatttccttactgccgtattgactgaccatacgatttgttaaccgattaatacatcacttttggatgggatccacgattatgaaagcggttttggtgtataataatcagacaaagcaaaacaaaaggacaagtaatagaaggagctgaaatcctaaggttagtgaaattttattaccggtttctttcgtatctgaaatgaaaagaatcaacttgtccatacattccctatcttaccaattcaaatgaatttcatcttcgacccgtcgttagaaatggcttgaatgtcagagctactccgaccactactatcacattcaagacgaagaataccatatgcgatcctgcagacgttttcaatttaaatgtgttaagcagaacatc

SEQ ID NO: 26691 - DNA, 1214 bp, Arabidopsis thaliana landsberg
tatactcagaatcatacacagctagggaaaagttctttttcgccattatgctctctatttcggatggcaacctttaggctataattgtttcttttgtagtgttttggatcatcaatgtaaatcttgaactcatcattagatctctctaaataatatataatactgtccattcctgtgataacttcaagataaatcctttacatataagatcaagcacaaatgcggacactggcaagcttgtacaaaatcatacaaaaggtttaaaatccacacataacaattccttgagaaaaaaattgaatagctctatcacttttaaaaatttaatattttgtaggatataattacaagcaatataactagtagaagggtgaaaaggggcacattcctataaaatctacaaaaaaaacttttaaatgttaagagagcaaattaataaactttttatttgctacaataatttaaattatatcccttatacaataaagtacatgtcctataaccaatagaaatgtgaaaatggcaagttcaatatattttttaaaagaaatgaactcgggattatcaaattataatatagaaaaagcagatatttgggattagggataatgatctaattgactcaagttcttttctgaaacaaattaaaacctaaaatatcgagcgagaaattggtgaattgaaatgttcagttagaagaaaatgacaagactacccttatattgttgaaaccaacgaatcattgcaagacgtacgtaggaattgagaaagttgtaaaagcgaaagaagaggagatgacaaagtgaccaatcttttttctctctctctcggcgacgacggtgacgtcaaagcgccgccggagacaaaataaaaaaaaaaacactaaaagaaaacgttgatgttaatgacgagttgactcatgggttgttgtcaatcgtcattcttgaaaccgtcgtcattgcatgacaagaaaatcacctccgacgatttatccggccgccgtggaaaaggagccaaacgtggtaatcgccaccgtcatgctaacattaatgaaggcaggggatggcatttttccgacgtgccagacttctccgagttctcggcatcggttcttcgtgacgctacaaataatttcaacaaaaacgatgtcgtatcagtttgttatgatcaagaaccaaaccttgtttaccaaggctgcattaggagcgcaaaga

SEQ ID NO: 26692 - DNA, 3598 bp, Arabidopsis thaliana landsberg
  unsure (1)..(3598): unsure at all n locations
agtggtatgtcgaatacctctgtttgcactaagtgcttatttttacgttttgaaccaaacttaacattttcttcctgtcgtaggtatggtgaagaaactaacaggtggctataagatcaaataccacgctaatggttacgataaggagccaattgaaatcgacttcactcctccattcaggttagtgaaatatctttgttggtcaagacagagttcttcttggtggatttgggaatgatctgatatttctttatttctgtaggaggattgacatgattgtagatttagagaagatggccaaccttaatataccaaaagacttggctagcgaggaagctaacaagtatctggttgatgcctgtgagaggtttgatgtcagatgcccaccccctctgacgacagctcgtttgttggataaagtaagtttgttatccccttatagtattgaattggaagttatgtgattagttcatatgctcgtttaagatatctgtaatgttttcactgtgcagcttgttggacactttctggaagtgacgtgtgttaaccccactttcataatgaaccaacccaagattatgagtcccttggcaaaatgtnnnnnnnnnnnnnnnnnnnnnnnnnnnngatttgagttgttcgtcaaccaacatgaagttagcttttatataagaatcgagatatttttatttggttagtatagttcctctctactaaactgttttatttggctgcagctttgtaatgcctacaccgagttgaatgatcctgtggaacagnnnnnnnnnnnnnnnnnnnnnntcaaggtatatttgaatccttaacctccctctctatatatatatgtgcgtatgaattatcattttgaaaccttgatgattggtttcaggatcgacaatctggagatgatgaagctatggctatggatgagacgttttgcacggcgctagaatatggattgcctcctactggtggttggggaatgggaatagataggctttttatgttacttaccgactcacagaacattaaggtccctcttttttttctgaagccagtctagagaaatccaatggagtagtatatatgttgtcttactaatgttctcaattttgttgcaggaggttctcttcttcccaacaacgaagcctcaggacgagccagttgctgcaataggtaaaaccaaagttaattctcaaatatacttcacttgagtttatcaaaaggttaagccaaagatactaaacttaagtttcttatgatttcacagctcctgctgggggagagagggtggtggactaaggaaggagtttgcaaaacttatgaagaaacattgtgcatctctttttggtaaagccaaatatattagaggacgaggactccgtagttagtgttttagtttctgtctctgtttggagattgtgtagaatgttttagtgttattattaaacaagtcacttgaaagatttttggattcatactgagaagacccaaactatgttgcaagctctacttatcagaatgtttaagaatattgagtttgacgtctattattctgacgatgacttactaggaagttgactccaaaactttttcagtttgtttaaatttaaaagttaatcagtttgaaacaaccatcgtcatccgaatatatatataggccagtgagtacaacaaaacaaaaagctttcctcaagcaaataatcaaatgtatagtttttgcctttttgtccagtgaaagaaggacttcacaatccttgttcagctttactccgttcttcagccattctcttcttgatctcatgtgctgcattgaaaatccccattgttggttggttacacacaaagcatttcttgttcttcgtgtgatgctgcatcattacattaaacaaaactcgctagtttcacacatttcttcacaaccaaaaaaaaacagactcgtaattgtgatttaagttatgatcatacctttaaagcacaatgctcacagaagtaatgcttgcatttggtgacaactggatcaacaaaaggctccctgcaaatgaagcaagcaaagggcaatgcattttcgtcttcgtcgctatccttgtcagcctcatcatcttcatcctcaactcccatagctttatttctcttcctaactttctctgcctcttcccactctttctctatctgccatcccggtttgtaatccccacggtcatgcaagaacttacacgaatctccatatccacagtatccggtttccttgtaatccttgcaaatgtctggctggtaatcgaatctagcggatactctgatgtgagcagaagctcttaatggcccgtgtgagcctccagctttctcgctcgagattgtttgctctcttctaaacccagcttgtgatctgtatatccatgaattccttgtacagcttctcatcagaagcctttttcttattccctttcaatgcttcgtctgcttttttaagaactctctcacggatagctcgtgcgtcttgattgaagtcggtctcagtttcaagggttgctgttgctccactgtcgttctgaacctggatttccttggatgaatcgtagtgaaagacggacctctcaggagctccactcgttgtagtagaactcttagatggtccagaagaaaagtataacttgctatcgggttttgcaactttctttagattttgtagaatagagctttcgcttttcgaatctccgtcttcttcatcagcgtcaatggttctttttcttatgtttttacttttcgttggcttcttgaagaaagtgcaaactgaaacagaagaatgatttgattagtgtaaatgaaaatttctagctaacaacgaagaacaagaaaaaatctcaatgagacgacaactagaattgagatagaaggaagtatatgtaaccttgttgagactgagtttcttgggcagcaggttgaggtagaggttcttcttgctgagaaggtttaggctcaccagaatctgacatagttagatataagactatgtaacaaacacaaatcacccacttgtaatttgctgcttagtgtttccctgcaaaattcaagattagtattaagtcaatttcctgaaaacttgtaaatttgtttgcactgagtcaaacaacaatttaatcaaaatttctccagattcagttacaataatagacaatgcaacataaaaatgatcacctgaattcttcctaattcatctacgcgagctcacgaataaaccctagctaactatctatatcggtggcaatttcattcacagtagataaggaagcagaaatagaagctccagacagatcaatccgaaacacagttcgacaactcgatgtgtcaacggaagctacaaaatttggaatctaaaaaccctttgaattgattgaaattggagacaaaagctcgaacaacactaaagactaaacaagaacgaaaagtagatcaaaagtatggagattaaacacaaggaagaatatgttaccttaaaaaaaaatctaaaaatcgacgccggtgagctaccccgtcaaaaagaacgacgacgccgtaagtaaattccgacagaaaataaatcagtgtgaagagaaaagaa

SEQ ID NO: 26693 - DNA, 1461 bp, Arabidopsis thaliana landsberg
agccgctggttcgttgttcaagcaccagagacgtacctaagctggaactcttcagccgcggaaaattcgaccggattcttcaagatccgccacttattgaaaaagccgaatccgaactctcaggtacaacaatttcattcacttcctatacatagacgaacactgattcagataagagtatcaacgaatcatgtttgattttgatttcagattactgttcgacgcttgaaggtgatgactcttacagttgctggagagcttactttgaactcaaagatctcgaagtaagtaattctatagtcttttttttcaatttgagaatccaaagaatttagtgatagtgactagatttggttatgtgattgcagagagagaagccaaaggttgaagttgagaatttgattttgcaaacaggtggtttgaaatcgttaatcgggtgtttacatggagttgcttcaatggagaaagataacaaaaccaagaatggtttacatgtaggagaagaatcagatagagagaaaggaatgaatttgcacattcatattcctgatggtttaccaaaatctgaacaagagttggaggaagaagagaaatcgaaaatgccggattcagctttcactagattgcttagaagtaaaggaactatccctgcttggttctctcacgctcctgaccacgaaaccgactgaaaccggatcacggattacggtacctttagaaagttgttatcttatcacagttatatgtaaatatagttcttggttttgctttagttcatgtagtctatcttttgttaagatgtgatcatattgccatagaaatgtggttgttattacttgatgttcgccaatgttgaatttgtttaatgctgtgtgcctattacagtactacgtggttttggtttacgaagagatttctattcttgataactgaagtggattactacggtactacctttagaaagttgtattcttatcacatttcaatgtaattatagttcttggtttggctttagataatataatgtctctttgttaagatgtgatcatattgccagagaaatgtggttgttattgcttgatgttcacgaatgttgtgtttgtttttaatgtcgtgtgcctattatagcactacgcggttttggtttacgaagagatttctgttcttgataacggaagtggattactacggtactacctttagaaagttgtttcttatcacatttatatgtaattatagttcttggttgtgctttagataatatattgtctctttgctaagatgtgatacatattgccatagaaatgtggttgttattgcttgatgttcgcgaatgttgagtttgtttttaatgctatgtgcctattatagtactacacgagttatttccgtttacgaagagatttctattcttgatgaagtttgttctccggatgtgaagataaatctttaaaggaaaac

SEQ ID NO: 26694 - DNA, 1629 bp, Arabidopsis thaliana landsberg
  unsure (1)..(1629): unsure at all n locations
aggtatcaaattagtatactgtatatgttttcaaaaactagaaacattaatcacatatatgatctgtagtaaaaacatatatgatctgtagtaaaagaaaaattccaaatatttttttaaatccaaaaatataaaagaaagatagattatagtagtaaaaatagcttaagtttaacttagaacatgtgagttttttttactttgtttttaaaacggcagaatttaacatggtaaacataaattacatttccacacaacttgtataattggttaattatacaaaaatgtgaacaactttactattttacgaattcgcaatcaaaaattcacatttacttacaagagagagacaagaagaggcaaagaagaaaagccatcctaaagtattggtttgccatagctaaacaatgttttggtattggaatgcttgatggttagcttttgtgagagaactagctactcttgcgtttatttatatatcggatgaaaaaacagcttttccactttatttggaatgtactttaagtctcagattgtgtctatattttcattattatgacatttattatcatgaaatttcagattttgtctatatttcatattggattttgtttatatttcatattagattttttctatatttcatattagattttgtctatatacagactttaattttgtcttcaattagaaatttatttcgtctatatatatagagcagactttattatcagtttgacccaacgatccaaaatagggagtatatcttccacagataaaattactatacagtttttcaaagtgcttttttctttctttcgtttgtacctttttgtattaaaaaataaaacagaaaaaattacttgatataaaatgtatatactttaactttaactatatcctttacactactgttgttagtaccatcataacatttgtttttgcatttttcaaccaaaaaaatcattctatgtataacttaagtaatgaactactccctttgtcccatattattatattttgttatttttacataaaatttattattgaatattattttaggggaattaacaaagagaaaaaatcttcagaatacaagtggtcataatatactaaataaacataaattatgcataattatttgcaaaaaatctaataaaatgaaacaagaaaaaacagtctagacttgggactgtgggaatattaaataaccggttaccagagcttgggtcagattatctcattgacatatattggtatatcttcaactattaacatatatctcacaaacgcgcactagtagatgtacaaaagagaagaaaataaagagttaaaggtacctttggcacatcataaaatccacttacccaagatggccatgccaccggcaccaagcaaaacagccgcatatgacttcatttgtagttattagatggagtaacaattactatcacaatttaaggaacctgtacttgttttttaactagtatagaatccaacttagaaaganaaaaatgttgtgatagttataaaaaacaaattcgatcgtagttattagatggagtaacacttactatcacaatttaatggatggaagtacaattaatggatggagtaagaaaaattgag

SEQ ID NO: 26695 - DNA, 1260 bp, Arabidopsis thaliana landsberg
tgctgattcttatgtgttaagagtttagattttctttgttgaacattagtatgcaatgtcctaattcttggtggggcgcttaagcaatgtgaccttgctgtaaatatggacaaagattaatatttgtaggcttttaggtgggcactctatcagtttttgatgctcataaaggacctacatatataacttatatacattttattggtttgagcttatacgtagtaaatccaaccatgtttttcatctgttgcttcgaattctgaggttcaagtctaatgacttgtatgtgttttgtagaaaggagactcgcgatttgagggtcatgagcttttgcggttcactcgagaacagctgcttcagctcagagaggtaattcaaggctgctacctcagggcagtggaggccttctgaacgatagaccaagtgcccttgtgcaaggtaatggttcccaacagcctaaacctgttccttccccgaccagacaaactgtggagaagcaaaaccacaaccacagccacaggaggtggtcctcctacgactactagcttgaacacagtagagctcagtagaaagacctactcgcttttgaaggaatatttcaatgtccgtctattggatgaggcatttcaatgcatagaagaactgaaaaccccgtcttaccatcctgagcttgtcaaggaagctatctccctcggcttggagaagaaccctccttgtgttgaaccagtggcgaagctcttggaacatctggtctctaagaatgttctaactcctaaagacttaaggaatggttgtctgctctatgggtctatgctcgatgacattgggatcgatctgccaaaagcgccaaacaactttggggagatccttgggagtttggttatggccaaagcatcggattctgagttggtgaaagagattctaatgaaaatgggagacgaatggttcaagaaagcagtcttggaagctgtgacgaggagtgttagtgagtctctactcactacggaagcagtagaggttgaggcttgccgtggtttggtatagtttgtgtggtttctttcttctcaatacatgttttgatcagtttaagaccccacgctcgccggaaaaaacaggtgagatctttcttgtaatcatttattgaaaaatgttaagagttaatatcatacttgtaatcgaaattagattcagttttattactctgttttctttttcttggtttgtgctttttcttttggtgccttagttcatgattcattt

SEQ ID NO: 26696 - DNA, 1228 bp, Arabidopsis thaliana landsberg
caatgactttagaagattacacagtaaagccgaaatttcattgaaattaggggctaccatccttttttaaggcagaacattctcatgtttcccttgcaaaaatgaataacttttcccaaaaagggttcaacaaaggacgtcacaaaccgaactcagaagaaacatcctcagaacgctgtatttaattaaatcgaatgatcaaactcaggtcatcttgtccttgtcacaaagaaaaccactttgcttctaaaagcttcattactgaagggtgcacaggtttacggaagttgactccagcgtaaattgtctttgattccatcttatcctgaatacgcagaagctgatgagaaacgtgacacatattagacaatgtactttggttgacaaacattacgtatttactagtggactgagatgattatcctggctgtacttggcaagacgcttcgatctgcaaggagcaccggttttgattatgtccctgtatagacagaaagatccaaatgagagtccgacaaaagatatagcatgagattgctagttaaatgcttgcaatggtttcaacttacagtggacaagccaacggctaagtcagcaatgaatgtgtcctcggtttcaccacttctgtggctggtcatcactccccaacctgctttcttcgacatcttaactgcctcgatactctcggttacagatccgatttggttaaccttcaaaagaagagcattgcaagacttctctgcgattgccttagcaactctctggaataagaaaagagtataagagagatgtgagcattttaagagagggcagacaacaaaaaaaaactggtaagaacactggcaaataaaaacaaaccttggggttagtgaccaacaaatcatcaccgacaatctgaacctcggttccacactcagtggtcatcttagcatagtgctcccagtcatcttggtcaaatgggtcctcaatggacacgattgggtactcagcgacaaaggacttgtacaggtcctttagagcatcaccagaaatcttctgagagccattgttgttctgcagagaaacaaagagcgcaacagctacaagttaagaacaggtttctcacactctatcctgacaagctgttactaaggaaaaagaaatttcacctcttctttgaagttcaagtcgtaggtcttgtcttctgagtagaactctgaagcggcaacatccattccaatgacaacct

SEQ ID NO: 26697 - DNA, 3478 bp, Arabidopsis thaliana landsberg
ttctaagtgtacttttcagttttcagttataatcttatgcttattaagtgaaacaaagcttaactttggtcttaaaccgaatttatttttacgaggttaaaattcatcaacgaaaacaatcaattgtaaagcagtttttaagccacttttaaagttgtagctcgtaatgaatttagggaaattagcttcctgcataataatcacttgtctcgtatccaacatccttcactgctcttatcgattagggagataatggatactgatcgaatcggttaaaaatactttagcatatagagtaactctcaatcaaacagagtaagtcacttacacaaagaagataaattctggagcattctaataagtaagaagtaataacagtttcagcaaaactatgaggttgatgttcatttttccaaatttagcttaatccaactcataacataagattagcatccaaaatatacataatgctctcattgtctacccattccctcattactcatcattatacatgtgcaagaacattagaggcagagggtataatgttcttagaatctctagtccaagacttgaatcgtatatgatatacttgaggaagacatgaaaacaacgttgggttcgtttgttgctactataacaagaaaacagaaaaaaaataagtgagtatcttgatacattgcttgatctacacgtcatatatcattcttgatccaaaaaattgaaccgatgacatttttttttggacactgtagaacatttctggaagctgcatgtttatagcgttactagggtactaatccgtataacaccgggtaatgtgctttttttttttttctaagtagcgggaagttagttaattagtgtagaaaaaaaaaatactatagtgattttgtgatctctatagattattggctgacaaaacagataatagaatttttaacgatttaaattttggaaaaaatgttatttaatacatgaactttaaaaaaatggccaaattaaccttgaactcttgaaatgaccgttttatatcgcaacaaaaagttgacttctaatttaacttataatttatagttgacccggccaaatcgactcaccattaacactccttaacagcgcttttaacagccgttacaaaacatggtctaacagccgttatcgttggtttaaggacgaaaatagctgttagttacgctgttagaagagctgttaaggagtgttaacggtgagtcaatttggtcgggtcaacgataacttatagattaaattaaaagtcaactttttgttaaggtataaaacagctatttcaagagtttacggttaatttggccactttttaaaaattcaggtattagataacgcttttctcctataaaataatgtagtctttttcattttgtcaaccatattttttttaactatttccaaaccaaccacaaataagttaatgttaaattaggccaaaatggtaaaatcgggccgaagcctataaccaataagtgaagtagacgagcgacgcaaaagtcaaggttcgacacaacagtgccagtgccagtgaggttatagggtttcgttgatcgtcttcaagctttgatagttagcttgtcttacttcaatggggtatgagaaattcacttgggtgattaagaatttctcatctttgcaatctgagtacattaaatctgatatattcgtgatcggtggctgcaaatggtaagaagaagacaactgttatatttggtgccttttcgtttaattttaggttgaaagaacattctccattgttttaatggttttttaaatgcttgcaggtgtcttttggcctatcccaatggaaaacagaatgctagttatttgtctctgtatctggatggtcctactttaaaaactttgccttgtggatgtcgaaggcgcgtaagattactcctaactgttgtcaatcaactctacctacacctttcctgattagggggataggaatatttatgcttttggacaaaggaaagttcgtattttgtttgtgtttgagttacatcagttttgtctttttatggtctacagaaggaaaacgatggtttgataaaaagcttcctctgtgtgggtatgaagaagtgcttctacttaccgaacttaatgccaaagatggtggatttttggtaaatggacaagtcatgattgttgctgaagtagaatttcttgaagttattggcacactagatgtttctaaggaatctcaagaggtaattaaacctcggaaaaggatgaggctatatggtgatggtggtgcggtgtctagtcatttgcacaaggaaacttcatcagtagatgtcatgggtttcaagttcttccttcacaggtaacatgttaataaagattcaaactttttagatatgtttcgttagagaggaactgatttggataaatactcataactattggcttcaaactcatgagacttaccatttaattctttgttgttgctgattttggattagaggtggtgcttttttgaatttatcagtcgaacactaaaacaattagggaaaaaaatggtatctttattatcaaccattcagtatgtggatatgtatacaactagacgtatgagtttatactttgttcatccttttttacaactataggcggaatctgtgaagcgtatattcgaaagacatccatacatggcattagagttccgagcaaagaaccaacagttgaggacatcatgtataaatgtcctcctcagcctaatcaagacgttgtgccagtcactgcaagatatttccattgatgacctgggccaaacagagcaagtactaacattcctgcaaaattctggatttaaggtggattggctggagcgtaaactggaggaagtaaaggaaaagaagatccaagagcacattggtaagtctcggatgcaaggattagaggaagacctgaaggtcttcaagaagaagtgctctgacatagaagctctactggagaaagagaaggaagaactcaagggattgaagcaaaagtgctcagacacagaagctctgctggagaaagagaagggaaaggtgttggctgctgctgccagaactcctctaacgtttgacgatattctctgatgacttaggttctgtaggtgttatgttcgtttgtatctagttttcgaaattaaagtcctaacttaggaagctagatgctagagagaattctgtcggaattgtaaagagctaatctttttgtaaagatgactcactaggactaggattttgttagttgtctctttcgtgactatgtaaaagtattaataatactgtattatcgctggcaaaggtaaagctactaagtgtacttttcagggatcagctataatcttagcttattaagcaagtcaaaagcttaacttttggtcttaaaccaggttagatcgcatgaatattctcattgggtatcgagaaatgatttcccttaccaaacttaatgc

SEQ ID NO: 26698 - DNA, 1885 bp, Arabidopsis thaliana landsberg
attcaagatgaagactattgattggttaagtaagtataagcatcaaaatctgtttaaaagtaatcgaagcaacaagtttgatcagaggagcttcttcctctccaagaatgacttgaggtgccatagttgtaaacccgcgaccgacattgttaccacgaacgacagtaaactgagagctgccattcttgaattcgttgatcggtttaactcttgcatttcccgttccctgtcacaatttcacattacccgttataaacatcgaattgcttttctattactaagtttgattaaattgtacctctctcggagctgaaacatttcttcatgtatagtttctgtcacgtcgagtagcttcctcacctccacctccagcatctgagaataaacatatcacattatgaattagaactaagttccatatagattatacggttttgatatatatgtgtgtgttttacaatatatgcaaaagaataactatagttagataacatgtagttatacggttatttggcctctcttggcgatagtggtccaatctttagcctcaacaccgcttttccactcgaaatcaaccgcgaattttgcggtaggtctataacctggagccacaaaacacgtcatgtaatcgccggtttcttctgccgtgtacacgaatttcccggactctacattctctgcatgatgatggcttttccctttaggagatgacacctataaagagaagtacataaaatgtgatactcaaccaaacgattcatagattattttgtcatagattcatagttaatgcttacagtgacgaagagtttgtgagaaggaggaagatggtgaccttcgttgggattgacgatggaataagtcccaacggtcatgtaatttgttttgatgtcatcggagatacattttgtgttacctgattccatatctaatctcattgattccctcttctcatcaccatcatcatcatcatcgtcatcattgttaatatccatcttaactttgtcttgtgaatcttatatcttgatggtagcaaatccatcttctagtttcagcaacaacaaacaacaaggaaaaagttgggatttgttaaaagaaaaaagacaaaataatattaagtcttgtttttggttttgttttacatgcttccgtgtaagaaggaactgatgagtttaagtttagtttgctaaaaaggtcaaagagattaccacttacacttgtggttataaaatctaaaaaaagatgccctaaaaaggagagaagaaaaacctcgtccacggattttgagtatatttgagacaagtaatgcaacgatttaaattgggttttgtgccaaaaaaaactttgaaagtagtctatttttataattttatccatcaaaaaaatgcaaaattattatacgaattccaaaataatatgtaatataatccatttttataattatatatatattataaatattttcacgatcacatatatttgttttcgaaaattttaaagatatttttgaactcctcatctcgaggacttcgatttgatttatcaaaattttaaaatttaacagtaacaaaaaaggctatattgagtattattttcgactttatatgattatgtagcattttttgaaggtaaatgataaaattacaaaaatggatgaatttgagtttttttgcacaaaatccatttaaatatatgactattttaggtccaaccatccatccatatcctattatgaaaataatgaacgattcaataattgaataacaatctattaaatgacgaacacatgtatcatgtatagtctgttacaattgtataactattcgaattcgaacatacataatatatgtttttcaaaagaatacgaccgacatagttttgattt

SEQ ID NO: 26699 - DNA, 907 bp, Arabidopsis thaliana landsberg
ctccggtgacgaagctgatgaactcggagacacactcctgcatcgtctctttggcatctttagagatcttggcgttggcgggcaacgctttcttcatgatccggctgatattagcgatcggcaagaacctgtcttgctctcttggagacaaggaggactgtccgttctggttgttcccgttttgccctccaccggaatccctgtcggaatcccccatttctgaaaattacaaggaataaaaaaataaactttactcttttttcaaatcatttccatcaatgattcgaaatcgaattcaattggtggttgacttgagtgggaagactgaagcgagaaaatttagggttttagaaagagtaaaaagagcaggtgtgaattgttaagtgtcggctggtattgtacacagtggtgaaggagtcgccggagcttatataaagagaggacgcacgacttctgctcacttgacacgtgatcttatatgaaccgtccgtttactgataagattctgacaactggatacgtgctcgaccgtcggattggaattgatcttgtttgagagatagacagccctttaaggctttgccacgtgttgtggacagttagtggacccggcacacttttgtcacgagccgacgcgcataagaggagcgtggtaaacacacagaagacagaaagatagcgcgtggaaaacacggagaagataggtgggcgttagggagacagagggtaactgccactcaacgacccttcggtcaatttttcacttctttttttttttgtgttacgagcgaattgggttggatcatgagggtgtggtctgtggtggggttcattgccatcaaaactgcatcgaccaatcagaaaaaaagctgttggaaacaaaaagcgtcccagttttgtccacttt

SEQ ID NO: 26700 - DNA, 737 bp, Arabidopsis thaliana landsberg
acttatgtgtttctgtttaatgtataggctccagctgcagcaacagatttttgcaacgaagaatttatgttgaggtattgtgaactatattactatgatattctgttttcttcttataaaaatttgttttcggtattttgcttcaacatcctgcattaatacagaattaatgttgttgcagattggattgtgttagatctataactcgggcaagattgaagaaactagacacaaccttagctaaggacgataaaaaggttttggaagctgagaaatacgaaaagaataatgattggctgatgaaaatgaagttcagatatgaaacaaagaggcaaaatacgaaaactgagtttcggagctgcaataacatactggccattagaaaggttgcaaacatagccatacctttttcatcttttcttccctttttatctaggtatcctgtgaatctgatttaagctacttatacaaatctaagtatctaaccgtctatacatgttacagttattgaagagaaaaaagtctggctttgtcaaactttcttggaaagaagctaggaaggcattgttaacctcatatacgtataaacccaatttattgtcaactaggtgaaatctctttgtcttgtcacaggactcatctacttcttttatcttctcagagacagcacatgcccgatagcccctataaggtctgatgcgcttgaatccgttttaaaggattgtaagctaaaccta

SEQ ID NO: 26701 - DNA, 3290 bp, Arabidopsis thaliana landsberg
atccaaattgtttgtttacagttatcaaatgacatttctctttaaaaactcgttaatatctattaggcaagggatctctagtgaacttttttcctttgttttgttctgtcattttcaggaatctaaattattaagtctttaactctactccaccacaaccaaaattaaacgagtcttgtctacatgacctaatttgcttaacaaccttatcatctcactaacaactccattttccaaaatttaaactcctttaactatgcctataaaaccttgatccattcttcatcacataagcaacccaacaaattcattctaaatacatttcttttcactcaagaaattaaaatttcgaaaagtttgttaaaatgaatgcacacatgctcaatctccttgtcatagtcatttttgtagtttctttcgatgtccaagcactcagtcctcactactacgaccatacttgtccacaagccgaccacattgtaaccaatgcagtcaagaaagccatgtcaaacgaccaaactgtccctgctgcgcttttgaggatgcatttccacgactgtttcgtcagagtaacaacttcttacacacaacattgttgtcatctttcggtctttttatgtctttatactctaaataatgttgttggtgatacttttgatcattaaagggatgtgatggctcagttctcttagactctaaggggaagaacaaagcagagaaagatggacctcctaacatctcactccatgcattttatgtgattgacaatgcaaagaaggcattagaagaacaatgtcccggtatcgtctcttgcgccgacattctttcacttgcggcaagagatgctgtcgctctcgtaagtctctctccatctcaaattccaagtactacttttatttgatgattctaatgatccacctaaaatattatttgtggatgttactatagtcaggagggcctacatgggcagtgccaaaagggagaaaagatggaagaatatcaaaggcaatagaaacaagacaactaccagctcctactttcaacatttctcaattgcgtcaaaattttggccaaagaggcctctctatgcatgatcttgttgctctctctggtattaaacattctcgcactcacttaaaatatatctacaaagattcctaaaatatctttcttaaactatgctaaaagatgcaacataaatctcaattttaaaaataattggcaaaagacaaatatagttccaatgcttataatggtttaaattccgaatgttgaatgaaatggcaggaggtcatacactaggattcgcccactgttcatcgttccagaataggctccataaattcaacacacaaaaggaggttgacccaacactaaacccctcattcgcagccaggttggagggagtgtgcccggcccataacacggtgaagaatgctggatcgaacatggatggaaccgtgacgtcattcgacaatatctactacaagatgcttatccaaggcaagtcactattctcatccgacgaatcgcttcttgcagtaccctctactaagaaactcgtggccaaatatgcaaattccaacgaagagttcgagagggcttttgtgaaatcgatgatcaagatgagtagtatcagtgggaatggcaatgaggtcagacttaactgcagaagggttcgctagaatctcaatctacgcttccaacatcacgttactactacatttttatgtctttcgttttctttcgtcacattgattacttgtgaatgggcctttctaaagattaaggcagaggttcttgtatcagaattatctatcaatctctcgtgtgtgcttgtataggcatttatttacaagtaataagatcttttctctttctaagaacatgcagacaaatcttatcacttgtgttcacaacctatctaaatgattgacgaaacaatagaagaccaacactctcttttgagcaacaacttcaatatgtttcgtagttaagtctttaatttgacatacataacataacattaacatccgacccactgtcttagctggaccatcacgtagaagagaatggatatatagtcaaagaaagaagataagacagggagacacaaatgggtcgaggacatgacagcaacctaggtcttcatttttcttcattcaaacgcccactgattctcacggcgaacctcttcttcttcctctggcgtgaagtcgttcttgatattgaacgtcttgcggatttcttctggggtttttcctttaatcatatcagccactgtctggcaagtcaagtccaacagtcccttgatattcaagtagttagcagcctaaaaggtgtcacagggaaaccaacttagattcaagctcttcaactttcagataaaaatggaactttattgttcaagcaaatcaaacatattgaactacgattccaaagaaaatcaactttatcactcgtttcagacagaacaaaacatgtcatgttagcatccaaaaggtttctcagaaaaacaaatctagattcaagcaaatcccaaagaaattaaacattatccaatgtttaagacagaacataaaaaacatgagtttggatgtaaagtggtcttcagctataaacaaatccaacaaactcaaaagaaatctcttgacacttttttctctatcagaccatatatttcaatcagacatgatcatagtttaaactgtgaaattggcaatctaaacaaaacctgaaccctaaaattagatctcaaacagaaatcaagatctcaaaccctagaaatgaaatcgcaaactttgaaaaccaaagcaattaaaaataagtttgacaaaccaggataagatcgaagagagtgccctgatcaactttgataaactcagaatcccaagtcttgagatcttcatcactagaacccgacgcgacggtggtggtagtagtagcagcagcagcatcggccgtggtttcggatttctcagcagcttcgacatgtctcttacagtactcaatcaccttcgaaaggatcttgcttgtgacattagggagagggataccattatcggtacagtcatcttcaatcatatgtttgatggtttgtgactctagcgccaccgcttcgtcaatttcgaagttttcgccatccgaactcttgagagtgatttttctcaccgtcgacattggtttttgctgagtttagagaccacgtggaggctgaggaagagaatcgtggaacagaaagatgtgtgtatgggttaaatcaaaatgtttttaaagcccggcttacacat

SEQ ID NO: 26702 - DNA, 1990 bp, Arabidopsis thaliana landsberg
atgattccgcggagatggagtatatgaacataaccgttgttacttcaaacgaaccttatggattattcgacagttcaaatccattcttttataaaagaagaactccaaagtttaacctaacccttggaggagttcacagtggccatgttcagaggggtttgcgcgacccaatctgcatatcgactagcggaaaaggaaactgcagggtaacacatgtttttccctaatcttgtttcagttttagagtacacaatgcaattacattctcttttatttattctcatattaggatggttacacaaaagagacctccggacctgattcagttcgtgtacttgtcgcaacacgagctaaaccgagcaagaacttgaatagtgaactggatagagagttttatgatcattttttggaagtaagttttaatgttctcatgaggacaatatgtctgccctagaaaaatatgacagatcaaatgtttcttttatgttaatagcatctccatcagtgagataccttcttggtttctcaaaaaaaaaagatattagtattttaataaatattagttatataattaaattttaacaataaaataatatttgaccaatagatgatatacaagtgttcttatgagtttctcacttgagagactaattctactctctctcatactttttgattatattttatttttatattaaacagtttctcaatgagaaaccattgatggagatggtcttatgaatttatcctagccttcatataattccgctttgtctggtatacttactcttgtttggtcataggctcaatgatcaagtgacggatttttcatattccctaaagatccatatcgtatttgtgtgatttgtatatcaacacggccgcggttaaaagttggctagagcttccatgactcggacctacgtctccaatgtcgggatgtaatcggtcttttcatctaatatatatatatatatacatgttcacatcagtgttagcttgaacaaacaacaatttatcccttctcaagtagcatgtcatgtgtcgttcttcctactttttattggaaaataatttttgtatgagacgtacgttatgcaatatgcatggacgtgctagtgtcatgaatactcgtaaccagtctagacagtaaaaaatgtaggtgcagttatcaattttttctacgaaaattttacaacggtattattgttacttacttaattacacttaaacacacacaataaacacaaataaacaaaaggtgtagtcatcttttattaactactgagtagacctcgccggagtctatcgcaatcgacgagataagcaaagccataagcgagattcattagcgtagcctcgtgaagctcttcattaaccgtcgcagtcgcgtccgtcgagaaaaaaaccctaaaccccttaaagaaagcctcacgtgccgtcgtctcacagcacaggttcgtcatcactccgataacgatcacctccttcactccgatcttgtccagcttctcctgaaggcgcgtgttgttaaacgcactgtacgtgctcttctccacgatctcgtctggtccggtgacctggcgattgatttccgggatgatttcggaatcagtggttccgtcgaggattagatcgccgttccaccactctccgagcacgccgtggtcggttggggatttgtggttgtggcgcgtgaagaatacggggattgaagcgcgtcggcagatgtcgatggtggtgagagcgttttggaggattggttcagccatagagtagaagtgattctgcatatcgatgacgagaagagctgcgattttaggatttggctctcgctttcgtgtctcgtacgttctcgatgatgaagaagccatttctggcggtgaagatgaatctcttgatcggtggagatatatttgggaacgaaaggatttagtcactcacttattgggccaatataaaatgggcctagcccacgtatgatgtaatc

SEQ ID NO: 26703 - DNA, 962 bp, Arabidopsis thaliana landsberg
acaagctaacacaattaatgccacaccgttagtgaataatattgcctcttttatatataatattatattcaatccggggatatggttaatttttaatagaccaaagataagctatcaacctttctttatctctttgatacattaaagctatcaatcaacctttctgacatacaacaaatttaaaatttaatgaattgccataaaaaataagaaccaatcagttttatataaatgtttatctatctctctaaagcctcataactctatatatcgcccagtctttttatctctctgactctctctctatggacgaggctaccggggaaacagaaactcaagatttcatgaacgtcgaatccttctctcagcttcctttcattcgccgtcctaaagataagaaccctaaacccattcgtgtcttcggaaaagatttcaccggcagagatttctctattactaccggtcaagaagactacaccgatccttaccagaccaaaaacaaagaagaagaagaggaagaagaccaaaccggagacaacagtacggacaataatagcatcagccacaacaggagattcgagtgtcactattgctttagaaattttcctacttcacaagccctaggtggacaccaaaacgctcacaaacgcgaacgtcagcttgccaaacgcggtgtttcctcttacttttatcatcctgacaataacccttacagttaccgtcattacccgtcgtggaccaatggtccgttaaccgcggctaggtcctatggaggattttcttctggtcctaagccgtcggggtattatacacgacccagctatgggagtcagttaggactatggcgtctaccgcctcgcgttcaaggcgtttataactcaaacgcagcgtttactagtaatggctcttcttcttcttctaattcgactttaccggtgttgacccgttctcaaactcaacta

SEQ ID NO: 26704 - DNA, 1806 bp, Arabidopsis thaliana landsberg
ctgcaagaaaacatatgaagcttttatagaatcaatccaaagaatcaaaagattgatgaattcttcacagtatctctacttacaattcagtcaaattcttgagattacttaaggactcagggatttgacccgtgaagttgtttgcagagagaagtctgtaatataaatagaccaaatcactaagtaaagtgaaacaacaatatataagacaaaacagagtatatagtaactgatcttacaactctttcaagcttcttaagttccctaggtttcgaggaagtggtcctgtgaataaattagtttccaaattcctgcaatttgtctcttacatattagaatcttgtcaattctggtttgatgaaaaacaaattagatatttaaacattacacatcagtaagtgtagtaatatctccaagttgaggaggaaatggtcctgagagacggtttccggttacagacctattagttgcagaaaacaaaacaaaacgtgagaatcactaaaacttaatcatcacaagaaacaagtatgtgttgcagagaatggttacaagatttcaagtggaatttgagacaatgtcgtaggtattgttccattgagaaagttccgcgaaagatctctgtaagaaaacaaaaacagagattgcttaaattccaagtctcagacatttttgctatgatccactgacagaaactcaagaacgaaaatgcatacatctctcgaagacgcgtgaggtttccgaactcaggcgggaatattccgggcaagctgaaacttttaagctgtctgttgaagaaaatcaagaagtaaagaaagttttttcagagccctaactcagtttcttgttatgaaagtcacagagatgagaagtttcttttacttacatgtttgtgacacgacagactgagctggcgttgaaagtacagtcgcaggtaatgttactggttggttggttggaggctgactcgacaacaaagttccagtttcggtccgaacaagaagttctttcgatgttcactgtttggttttgaagctttgtaaagatcgttcgcaatgtatgaactctgcacaattggtcaaacatttgaagtcaaaactttggcataaatgaggaaagtccaatataaatatctcaaatcccaacgtctctctcattgacctaacttgccatattgagatataattatttgtttattaacaatccttaagaaaatttatacattatccaaatgttagaaaaaacaaaattctaaagtaaatcacacatttacatattaacctagtatagcataaatcattcagaatttgagatacaaatgaaattaacatcttgcttatacatgaaaaaacggaaaacgcgtatattcgtttagtcaagtaatatttatgtgtacctaatttttttaactcttgcatcgtgcagctacgacgaccaataccattcaattattgaggtaggtcctcgaacttgaataaatccaatattttccagctttttatttgtcaaatatgaccacacaaataaaattcccatcttaggtttgaaatgcgactttttagagaaaaatcacgcttataccaaaaggtaataatggaaaaccttttgacaacttcataaatctcccgtggaatttaatatacatatattttttgaacaaggacaacaaaaaaatacagttaattcgataatttgctaaaggataactttctttctctaaaagtttcttttttagtaaagcagcatctaaattattttgcttcgaaactaagtagaattgaggagttgaaaataaaattaagaaattta

SEQ ID NO: 26705 - DNA, 1307 bp, Arabidopsis thaliana landsberg
  unsure (1)..(1307): unsure at all n locations
ctaagtttctgagaaaccgtagcttctatggctcctctcaatctctcgcctctcatcggttcgcaatcattcccgatcagggtcactcttgttctgactctgcacacaaggtaattttaacattttcacttgtgcctatgtagcgagaaaatattcgattagggtttttctgataattgagtgttgtggagaaattgtttttttttaaattactctgtagcagatgtaagatttatgatctgtgctaattatctcggtttttgtctaatcattaccatggagattgtgtttattcaataaaggtgtcgtttttattttgcccatctattatttagggagttggttggaattgaaaattttccctttttgtttgtgatgtaattttgtaagacattgtggaaaataatggagtaatcagccaaaactagtgtttctctttctacattttgccatggattatcatgggtcctatttggatgcatcaaactgttttatctgtgtgtcagagagagaagaagaaaagagttgtgagagatcagtttattttaaaatcttatgtgttataaagaattggtgacctaaccaatgtgttattctttgtgatgttttagtagggttacgtttgcagaacaacttattcattgaaatctccggtttttggtggatttagtcatcaactctatcaccagagtagctccttggttgaggttcgtacttagctcactatcatcctctattgttaaactttcacatatacttcaattttgttggacattgcttcagttgtagaagaaaaaactgtcaaaccccaactttaaattttctcactttttgtcactgaacttgttgagatggtcattgtttttttaactttgatttattgctgtaacttcttttcttttccgactgctganagagtaagattgtcctttcctaggaggagcttgacccattttcgcttgttgccgatgagctgtcacttcttagtaataagttgagagagatggtacttgccgaggtgagtggccttttttcattcattagtactcattgtgtgcacaatggtgtggtgaaagcaaattcgctactgatgttctgaagctaatctctattttttttctatattctgctgtttaggttccaaagcttgcctctgctgctgagtacttcttcaaaaggggtgtgcaaggaaaacagtttcgttcaactgtaatgaccataatctccccatgcccccatatcttgttttcatgttaagattctatctctcttggtatcataaccagtctggtatcatgtttgtgggt

SEQ ID NO: 26706 - DNA, 1722 bp, Arabidopsis thaliana landsberg
tcaaaagaaaataagaactaaaagattgaaaataggatctgatgttctcaaagacgtctatgtagttgtgtttgatgaagttgaaagaagatttgcgagtttgcttccacgaagaggtaaaaaagtattataccaatactcgcgcggttcacaagtcgaggaaccaccactacagaatagtaattgtacgtatgttgtagtaactcttaaccgaaaagtcttcaatgatcatatgtattagaatataaataatttggtttgtttttctttcttttagggtcagttggatttgtttttgtttttttcgctaaaacattaaacttggaggtgacgattttagcaaaattaacttaagatagaaaatctaaagccaaagaatgacccacaattgacgaatcatttgggaagaaaataagtacataattatattttacatagttcatattgtatggtccagcctagaagctcatattttgcctcttgcggtttgctttgttaggaggtcggctggaccattacaaatattttatcttgcaaacaactctaatgtcgataatgattacatcatacgtgaaaacaaaaatgattacatcaattataatcctgaattgattaaaataatgttgatggctttgtttatatgtatattgagattgcgtataatgagagctggcccaactaatatttgcgaagaatgatcaaacaaataatgaattgaaatttgtgaactgggtaattgagctaccaaatctatattttttggcaactaaaatgtgaccgcatatttctgcactaatgacaaaaatatatgtcaaccatatctaagaaaaaaaatactcaaccaagccccaattttgtagaacccgaaaccaaaatcgatgcgattttttaatttccaaaagtattgaccttgttaatataaacaaaatgatcagttttaaatcagattaaactagatctgaaaataaccaagcacccaaaattcgtagtgttgacatcaaccaaataaataatagccagcataattggcctatacctctggtggtcctagaggaactctaagaaaatcgtgatcgttttttgcctaaaacattataaatttcgtatcattttatgatgtttagaagaaaatagagtaaatcatattcaacttccaaaaacaatgagaaaacatatagaaagagttacagatatataaaaatagtcaagtaaactaaacgagtaaagaaagtacagaataatccaacacaatcaaaaccaaattaacaaaaagtgcatccatcatctaccgtgaagaaaaggttacacagaacctagtacttagagattacgatataatcagtcaactaaagcaaacctaaggagtatagtttatatttaattaaccaattaatcaagggatctataaaatcgacctatgcatacaatagtataatccaactttaatccctcgagataaggaagacgttggaatccccaacgtaatcgtgttgggctgttctcaattcatcggccagctgtccttttctcatatatacccttcaagaatcttttactttccaaacttaccctcacgaatttcatcatttaccatatccttcttgagatatttatggtaaaaatatgatttcattgaatcttttcactttaacctcaaccgtttcaggaatctaaatctggcattcacaaattccagagaaaaatctgattccttcgaatctt

SEQ ID NO: 26707 - DNA, 2304 bp, Arabidopsis thaliana landsberg
tggaaaagaagaggagaaagacgagtcaaggttagaagacgatacctgagagttgcgggatggagctgacggcgatgacggtggtgtggcagcgtggtgaggatctgaacacgagggagccggcaaaactggagtgcgagttggaagagttgtatgaggggaccaaacacaagatgattcacgacgctgttcttgtaccggagagagagtcgcgagataattggagaagggaaagcaattttcatcaaagcggacatgtctggagatgtatattcggcttgtttgaagatgaagacagagataagcactttgggtaagtgagtaacccaaagacacacactgtctagatttgtcatcgagtttgtgttgattgtaaggtctcagccacggataacaggcgcatccaaaaactctgagcttatcgtaatttggtgatgtgccaaataatttctgacacggagactcaagctgaagtagaggtgttggtagtcgattgatcaagtaaacagctacagcaaatgcgtaaggccaatacgtcttcggaatggatgcgtgagatagcccggtgagaccggtttcaacaatgtgacgatgtttacgttcgaagagcccattgtgttctggtgtatgctgccgcagaagttagatgcgagataccatgttgtgagtagtattcccgtagtgcgacgaactcaccaccattgtatgaataaaaagtaccaatccgtgtctgaacgatttttccaccagatttttgaatgtaatgaacgtctctttaacttgagatttctgttttaaaggatagagccaagtatatcgggtaaagtgatcaacaaagatgacatagtatcgataattatcatgtgaaagaataggtgagctccaaacatcagaataaatgtattcaaggggtctggtcgaatttatggttgattgagagaaagggactttattacttttattgataagggaatctaagcaagagagaaatttgtgagatgggtttaacacagagagagaataatttgaaatgacagaatttaaaattgaaggagccggatggcctaaacgagcatgccaagatgaatgagtagctttcgagcttggagacgcaaacagagagaccggttgagacgatgctatgggccactcatacaactcatccttagttttgccttggagtaatgggacccccgtgttgagatccttcacctgaaaggatgccagaaagaattcgacagagacaccattagcattgcataagcgatacacagaaattaaattcttgtgtatattaggaacatataaaatgttgtgtagatttaagggacgagattttgtggatagagaagtagaaccagtatgtgatatggggatagtagacccatcaacaaccatcacatcgtcaccaccagtatagggctgatgaagagacaaattgttgaagtcggatgtgatatgatgtgtagcgccactatcgagaagccaactgttggaggagtaaggagagccaagtgcgagatttgctctaggctgccacagagtgaacggagatggtggttgctgtgaattgacactggacagaaaatgttgaagttgagaacatcgtttggcgctatgtccttgaacgccacagatttgacactttcccaaatatggtttggattggttattgtttgggcggaaattcgaggaggactgttgccacggctttgagttgttgttattgttacggttatcataacggttggtgcggttgccattgttgttgttggtggtggtggtggtgttgcgatgagagacggcgttggcggtgattggaatgacagtggctgagctgacggcgaggattttgctttcttgattcagtaggcgctcatggatctcggtgagagtgggaggagtatctttggcagcgatctggtctatgacgggtttgtattcctctggtaagttttccagcactcgctcgacttgttcgtcatgatccattggtttaccgaggagtgcaagctggtcaaaatgagttacaaagccttgcatatagtcatcaattgttttggaccttacgtccattgttttagatgcgaacgaaattgagtgacatggtcatatcttgggttggcgtagatcttgcggagagtttaccagatctgagcatcggtagtggctcttgacaccgccggttgaaccgacatggagatggctccaagaacggtactgtagatgagcttgtcttgtctttttcagcgagtgtagtctggattgacacgggaagccgcatctgtgccaatggttgcaggc

SEQ ID NO: 26708 - DNA, 1176 bp, Arabidopsis thaliana landsberg
ttgtaactataaactttaatatggtgtcgcaccgtggaattggttctcattgctacttgattagactatttttggaaggggatattagtataatctgactttgacattgtgcaaatattcatgaatttagctcacattatgtatataatatagaaatatatatttgtatttgtcaacaatattttattttcttgtaagccagaagaattcaaaccaaagtccaaaactcaaaatagttcttcaaacatgtaaacaactttctgaattttgcggtctattttgttcttaaaactaaaacatttatttatatcttatatggtggtgcatatggaaaatttaaattaattagttatgtcactaattatttctgttattttgatggaccagtttacgtacgcgtgtaaataaatatgtccgataaagaaaaaaataacgagtgacttattgaaaaatagtttctttttttttttaactattgaaaaatagtttattaattagtatcatatgaatgaagataaatacgaaaaagaaaactttcaaacatgcatgtatgattgcatagtaatattaaattagtaagaaactatcaagtgctaataaatctggtttctcattatgaagggttggtccctggccgccagaccagtctcgggaggagaaggtgtggcaaacttgtttccacgacgacacatacattgtttatcataaattaatctttttcaattacatttaattaattaatcaaaatcctaatgttgaacttaggtgttaaacttaaaaaaaaaattcttgaaccaatcatttgatattttaatttcatgaataagacgacaaaaattggctcggaccaatattatttgcaaatgatttatgcgatgttccaaataaaccagacgccaaatttagtttgtttttattttatttttaatattgttttttataatatataaacggttgctcatattttactccaccatttaatttaaacgatttaagcttttgaataaatttagtattttcaagatatgtacttcctagatatatctatgtcttttgatcatctattatattcaccaggagatttacccgtttttcaacttattatcttagacatacaattttttaattttaaattcatataccatgacaatttttttatcaaatctaatcatgatc

SEQ ID NO: 26709 - DNA, 1145 bp, Arabidopsis thaliana landsberg
ctctttctttatcgacacgaaggaccataacaggctcggtacgaccgaccttgattaagctattgatacttctaatccgacggcgagagagctcggagaacaggatcattcctttgttgttgttgttttcaaggagagatacgtctgctcccatgtcagcgatggtcttaacctgattcatcaccgccatgtctacatcagggtatctcgattcgtacatacgacattctagattcggagcaggattcgccatggttatgagattcttgagaaaagatttcggaagctacgaattacagagaaagtaagattgagtttcttagtagagagcgtcgaggattgagatttagggttttcaaaattggtacgattctgtcgttaaaaatagtcgacgtcgtataatcttcaatctcgccgagtcgctcacattctcacggcccattctagtacgacaccgtttttgtagttggcttgctaacgataccgtttaatctacaaaataaaagtactgaaattactaaaaaggttatgaaactaattgattcaaataaagagattaaaatgttgagattagcttaacttaatgagctgtgtatttttggtaatatgtcgtaaattaatttacaacttcaacctcttaataatcgaaatattcttagtttaccccattattttaacttgggaaaagttcatcgagaagtatttcgaatcgtgaccactcactcatagtcatttctctcctttcttcgacctcacaccaaagaacataaaagaaggaaattgtaagttagaactaaaaggcgaacacgaagattcatgctttcagatgagtctaatctttatgaaccttaattattacaaatcttgcttgttcttatcgaatctacagttctttttttggttttttttttgtccatgtctgttttgactttgttgccaaggaatttactaaaactagtaagtctaagctcgttcagtcgtttgcaatgttttaattgaatcaatggtttgttcttcttcctctattggatgtcatggaaagaaaaatcttcaggaatcttctttgccttgattctgagatttttggatttaaaaagttattccctttctacacttcttgtaatgatcaaagattactgtgattt

SEQ ID NO: 26710 - DNA, 2018 bp, Arabidopsis thaliana landsberg
cgaaaataacacggaaaatgttggatagagttgctgggatcaaatgaatatactaaagtaaccgagaatttgttgataattctattgtgcatacaactaggccactgtttattggaataataattgtggtattcattcttagatatacgaaaaaaggtaagtatagcactgtaaatattatagatagcataccggttttcctcgagtggcgtctcagggtcaggtctgacagcttttaattccaacttgaatgcatacgaagaggagtctcttgggtgatcttttgagttgtaatatccaaggacctatcattcaagggaacaagttaatttatttacccaggttacttctagtataatctatcttatgatgataagagtgaaaaacctcaattaccaatgtccaaggtgcattgtcgcttctatcataaagataaaaatcttggaccatgagagataatttagaggtacatatttcgccaattggaaaggtttcatacaggaactgcaccccagataattccagctcaaggcacgaagttgtatcccggccctttgtatgtttaaaattttcacctttctttctagaatcatgccagtcagagccagagtaaattctccatttgaggtcaatgtttttcagaaggatacgtccattagctgctacagcagaataagacgtctggccaaaagatgaacattctccatccagaatgtgttcctcatgatcttcctcagttgcttctgacacatggtcttctacaattcttaaggacgcgtcatcataccacccagaatttcctctcctcagatcagtctcaggaaacaattctctccccgacgaatccccttcttgaggtacctctgacgatggacggaactcagacaaacaatagttttcaaatatttcaggcaggctctctctttctaggaatacttgactgctttctgagtttattctggatgacgacccacaaatactttgattagaaggtagtttctcagtagctggtacccaattatatgcctgcccatgagagattccatgaggtgacatatagttattctgacattccacagagtcagactgatatgtcggattgacatcaaattggaatgcatcttcatttattttgtccatcaaaccaatgaccccagtttcattttctgactctaatcttaaatatttcatttctccacttgaatcggagctactgagtctatcgctgatttctaaatcattcctagcatttgcctgtgaatgctgtcccatcgagtctgcaagtgcacagctgattcctccaaatcaggagcaagtaactgttggagctgggtggccaagcgaatcaaaccagaagtcgtgtcactgcaagtttcaattactaagtgagattttgaacactctaactcccaaagaaggccattttcagagttagtccttagaattgcttcaataagcgaatcattagcaactttaacatagccagactcatgaagatgctctgaactgtacgttccaccaagcttgctaaggtcaaaatccacggacagaagaagcccaagatcttgaatcctgattctataatcatttcttatggaatcaaccagacttttctttgaaaggctaaaagaagatgcagctaccagacaggcaacccatggatcacttgcttgacgtaaatgatctgtattctcatggtggggctcatagcttagaccaacatcaacaaaattcagaataaacgaggagccgctagatgagctggagttgatctcttgagtttttttttcatcttcaaaagagaaaaaagaagtagccacttctatccaatccaggcgtcctcctacggccgagatcgtacagcccctggcagatactgctaaataatcgttacaaattcctggttcctgtaagtgcagaaaatctaagccagcgaaccttgacgacaacgcatttgaacctcctccattaccacgcttgatggcagagttgttacatgagagtaataacagttcctg

SEQ ID NO: 26711 - DNA, 1240 bp, Arabidopsis thaliana landsberg
  unsure (1)..(1240): unsure at all n locations
acgctcattttgaccacgacgcgctctcccggccatctgaaaaatcacatatatttttaatacacatctttgaggttcaaggttcaagcgcgatgaaagagtcaaaaggcgaaactaatagattcttgcataatcataatagatttcacatggcataaatttccttcttaaattaagactgacatcattcatcaaccatgcttccaaaagagtttatcgcgattacatcaatagcccaaaaggactcaactctatctagcctagtaccccaagggtgcaaaagctaggctagcttcgaggagttctactatcactgacttctagctctacccctgatacctagtgagcgaacgaggcaacactcgactcgggggaaggtggtctccctgagccagcagtgtccaagctggaggcaggctcctctcctccctcgatgtcgacatcctcgttggcctccatgtcctggatctcctggtggtgcatatctagatgctggttagcctctgcaagctgctgctgagtgttgattagctgatcctcgagaacctcgatggtgttctccaggttcccactaactcctcaagctcttggatttcatttgacaattgctccacttgtaagtccttttccaccatctcagtggacaagtctaccacaagttcctctctgttatccaaggtaattttgttagcctccagtaatgccatcatatgggacattgcctctccacgcatcacttgcagacgatacagggcattcatgcaccgcaccgtcaagtgagcagtctaccctgggtagatagcgcacacatccttggcatgctctactcggtccttccacattgggttgtcctccttttctgtgggtaacaagccaatgggatgagtggacaactccaaggggtgaaagccacaaaaggtcgtcagtccgtggagagcaatggcctcaatagtgtcttccgcccagtatccgaaagactcgaagtccaacaaacgccagcctggctgcaaaggatgaggctccaaggtcatcctcaccctacagcggggtacccggtgctcctcgaaaaactgcaccgcgtactagggaggcgtcgtataaccggctccctgcagcacctcccacaagnnnnnnnnnnnnnnnnnnnnnncaagcccgtccgtgtgggaatgtgcgttccctccttccgaggatccgtgagaagtcatctgtgtaagggtaagcataagcgaaaaagaaa

SEQ ID NO: 26712 - DNA, 1322 bp, Arabidopsis thaliana landsberg
agtattatccggtagccttgaacgacaaagcatcaacaagtaactctcaaaaactcttcaatctcagggctcaaaggtgctcctccggatactaacaaccggatgcgacctcccaatttgtctctaatctttaacagaaaaacaaaacctctaaaagtcaggtttatgtgatgacgataaacctaaacaaaagctccaaaaatacaaagaaaaaaccattatatcaactgctattaacctttctgaaagcaatgaaatcagccatgggtgaagctttactatgagagtatccacgattcaaccacgcaagcttgctacatcattcattttgttttgcaaggttaagctattagaaaacagagaagttagaagaaaacagagcaaaaaagatgaaaagttgcttactgtttgtagagagcattgaagatgaatctccttcttggattaagttcttgaagagccttttgaatcccctcatggattctctcaaacactcttggtactccagctagataagtcggtttcagttcttgaatatcgtcacgtaacacgttcaaattctacacaaatcaaaatatgaattctcttagattctttctccatactccatcaaaaaaagagaggttaacatactccatggtaatagccgacggaagcgcctttgcgaaagaagtattcctcattcatacggtcaagaatatgagccaacggcaagaaggagagatacacatcatcatgtgtcatctaatccgcccaaagaaaacagaggattagtcataagtaaacagaggattaatcaatagtaatcagataatatttgttctctacgattttattagtagttatcattataaatgtcaaaatatctaaatttttctatgtctcagaatttatttgaattttggttgaaaagtgtctactgttcctttgaagtaattatgggttaccttatcttcaaactggtccatatagagatccatcccaacaacaaaagtcgcgaccgctttgtgagtcaaaaccacaccttttagatcaccgcttgtgccgctggtgtacattatggtgcatatgttaaacgccttaggcgggttcgtgtcttccggtttctcacgtccctggtcaacgatcaaatagtcaacaaaaagatatttatggtaatatcaacgtcgctttgtgtgtgcacctaattcatttaattctcacatacactctagtacctaatgccgtcaagttgggttgcctgtcattttatatacctcagagaatggtccgaatataaaaataaattataaaactcaaggatccattataggaaaaaaaaa

SEQ ID NO: 26713 - DNA, 910 bp, Arabidopsis thaliana landsberg
ataaaacaaatctcatacagatttttttttatagttgtattctctttctcatgagtggctaacttttattcatgaaaaagtagattacaactcaaattttaaatttagtaggtttagacattctcaaacttatataactcaaaatattaaatttagtaggagtaaatattaattgtcaatctttctctggtgaaactacagtaagaaaacatcctaagaaaaacaaatttgagcaagagttctcaaaagtgttttgtatgtttataaacaaacataaagtttaaaataggaatgattcatatttttcacaaaccatatttgcttaatatataaaaactaattgattagggggaaatattgtggagctaattaaaagaataaaatttgcatggaagctacaaaaatgaaaaatcagaacaaaactagctttttctataattactagaatagattttcttattttccagctcctacaaatgaaaaaaaaaaaccaaattttaatcctaaatttaatatcctgtcatctcccaccaataccggaatgtcatgacttgcttatttgattttcgtttctcccactaacaaagtctcacctccctttccggtaaaacaaaaataagatctcttgtttctttttggaatgaaaatgtaaacaaacaaaaaaaaaaccaaaaaaaaaaacatatttgacgaagtacaacgtataacgttagaggaagacaaattatttgctacggtgggtctcttttacaaaagtgattgtatgcgatgatatgtttatgatacaacattatcctttgcaatgatatgttcacacctcttgtacctattagatattcatcggttgggatagacgaagaataaccttggtttggtcccatttcgatgttcgtctatgcacatatcctgc

SEQ ID NO: 26714 - DNA, 892 bp, Arabidopsis thaliana landsberg
cattgttgtttcctctaaatttgaaaacttcatttgttgttcccttcagaaaccggaaatcatgaagtgttcctagatgagaagttcttcagagaatgcatggagttatattctggggaaactggagttgttgaagccagcaggaaatattttcctgtaaaatattacaacatactggatcctctgaaacacagtaacaaccttggacgtagtgtgacaaaaggtactatattaaccagagatttctaagcatgattattggtatctcaagtaatattttctatcttttgtgtaatcttgctaggaaatatggtacgtttaagaaattgttttatgctgggagttcagaaactcagagatgtgcttacactgcctggagagaacgtgggttggaaactggagaagttctttaatgtttcactggagaggaacggtaagggacaaagacaagacgtagaggagcctgtcgtcgcgtttggcactggagcagcagactactctcaacttaaaggagattttgacagataccgcaataatcttatatacgggaagtggtttcacggtgagagcctgcataactggctccctccgagtctagacacaacttcctgggcaaatatcagcttctatatgagcagggtaaggaatggtttcaatgggaggaatcaggagggaccaacatccatgccaaatatcaaacagtcaccaaacaatcggagatcaaacggaacaggcacttacattcctggaatggtacattcaccgtttactctttcactcatattcctattttggaaaagaagttgtttttcaaaatgtattgatccatcggtttcttttgcagagtaaacaatctaacaccgctgggtgcagtagcagcaaaccgagccgg

SEQ ID NO: 26715 - DNA, 1018 bp, Arabidopsis thaliana landsberg
  unsure (1)..(1018): unsure at all n locations
ggatgctctcacttctttcggtcatacaacagtgtttttaagctttaaaaaagcaacaatggcgtacagggggctcgggtaacatttgtgcgggacttcttgcccatttaaaggtgcttccaatacttgtatacaagtttttttgcttgttaacaaactgtattaaaaaatcggtcaagatagcagtatggtaaaggtacgaacatggtgtctacctcgtgtagaagtgtactgagggctgaactcaggtggtgttggaaacctataaaatttacatataacatgacattatataaaggatcatacgcatttttggtctatatatagagcggataagttttgtttcattgaagaatgaaccaagctctattctctgggtatggaacggttgtgctaccatgcctatgcaatgtaatgactgctgtgctgaataaatcatctgtatctgaatccagatcatttgcttgtagttaatgaacataatatggttctgttacattaagaacttcatatttaatttatttttacaggctttgcatgctctacgtcctcagcaactaacgacagaagtactaagctcagggcaagccatttttcaggtattttatttcaataaggatggtagttcagaatagtgaaccctaatctcaagaatgattcacttgttttcttatatataactttttgatgtttctgttgctatagaatattctaacagagggagacatttgtgcatcacaacgcagagcagcatgtgagggtctaggtcttctagctcgtcttggaaatgacatctttacagcaagaatggtctgtccacaatgcaattctctacgtaaaaaccttttgtgactttctttatgctccttagaattggatgcttatggactctactttaaagtatagcatgtctctgtttttgctttgttcacttgtttcctaaatgtgaaaaaattcagtaccggttttcttggtctagatatntttatttatttatagtgataggacgtgaaacatt

SEQ ID NO: 26716 - DNA, 745 bp, Arabidopsis thaliana landsberg
catcatctatggattgggttatggtcatttatatataaatgattgccctatgcactagatatgattttgagaatattctttccgaaatgtattttacgcagggccggccgtccataaggcaagtaaagcattatgctttaggccacattttattcaaagaaaaatgagatatgttttggaaaattctttatagtctagtggttaaaactcttttcttttttttttttttttgacaaaccttgctttcattcaatggaacaaagaacaattacaagtacaggagttaaacaacctaaaggttaaaacattacaacaagaggtattctccaataccataaaaaaaaatttaaaattcatcgatttgaagtccatagaagtccatgagagctttgaggcaaagacaaagaagcacaatgcaacatatgagattatagagaatcgaaagatcattgttttattttgttttattttgatcgaaagattacagaaaatcgaggaattgtttaattttgttgatatatttttgtggtaatttttttaaaattatttttttttctttcacataaataaaattcgatagaaattagtatatatatatatatatctgtatctcatttattcaaaattatcatttgtgcaaatcggtaatattctggttaataaatgtcggttatgacactaaccagtaatgagtggtgataataatcaattcggtaatactctcacatttataaattatattaaa

SEQ ID NO: 26717 - DNA, 1427 bp, Arabidopsis thaliana landsberg
taagtcaagtgtaaattagagattaacacatcgaatgctgtgaaattgagaatctcgcagagtaaatgatgatagatcttaggatacaaagaagccgaaacaattggacaaattaggtctcttcatacctatggtggtcagagtaaggaatagttcgaaggagagagatctcctgcattcttttctcccttctctctcgagctttctccttgttcgtcatcgtcttcttcgctcgcgtcgcgtgtttgggtgtaccgtttatcttactcctgaatcaaattcgttgtacattagccatcagctctaaggaattaataaatgagaccttcaactttaataaaaaccacataatggcccaaaccttatactcttaactattcaatccaccagacaccagtaacgcttggcagtcaaatctttattgagtgggttcatactctaaaccgtttactgaaatttaattcaactaaacaaaccaatgatttttcatacaccattaattacaaaaactacaagatgaaaaacttttcacgatatttgttcgaaaatctaaaccaatgattttttccctcaatcttcgtttatagtttaatttatggtcgtctatctacttttgtttgttttatttgtcgtcggttgtctaatatccatccattctcacataaatgtttagtggtactatgataacctaacatgattgtgtgagataaaatagaagaggacaatactagcgggtttgtgacgagagcggtgacgtcactggtttacacgtgtcacgtactaacgattctcgcgtccatacgtctctgcgttcatgggctattgataagtattaaatagacaactcccgaatttgttttgttactcatcacaatagcgggaaactcatccggcttctggaaatttccgtttatccgattcgttctcacgtaaaccactctttctctcttgctctctcgctctctctgtatcgtctctgtttgatttcgcaattgaattctgggtttaggaatctcttattgtatttaatttgacaatcaaattttgggttttttaaataccaaactagaaagtgagattacgaaagattgttccatagtggatacgttcgtctttcaaaaggttgttccatatgaagatgatttgaaaccaggttttgattttaacccattttcagatttttcaaacgatttgattggttaaatgatattgaaaagtcaaactttttttttttgggcaaaggaattttgaataagcagcacaagtactaaaatcttctgattaaaattaggtttcaagtggctatcctctattgttcatagtttgagctaggtttagagtttgtgatatcttatccatgtttatgaatttgattagctgaatcaatctcttttcttttatatatgatcatgaaacaggagatgatg

SEQ ID NO: 26718 - DNA, 3764 bp, Arabidopsis thaliana landsberg
  unsure (1)..(3764): unsure at all n locations
gagtgaacaatctttactgtgtttgaaggaactacagaggtaaaagcgaaaatcttcgacaaagatgtcggtacagaggatgaagcggttggtgaagcaacgtaagttcctcaaacaacatcgccgtagattgccaattgacacctttagaacctaattgaggagttatgttatgaaacaaggcagtattccgttggagccggttttcgtggaaggaagtattccaccaactgcatacaatgtggtgaaagatgaagagtacaaaggagagatttgggtggctctctccttcaagccctcggtataaaacatcttgcattgttcttgatttttggtcttacaaatgtttaagtagaatctaaagaacaatatgtttattgtggtggtgtttgttaggaaaaccgaagcaggggtatggacgaggagtcctatgggggctggaaaaactctgaagcatcatactaagagaagaaaccattgtgtgtcactgtttgatttgagtcttgggaacaaaatgttgagttttcatttgaaagcgtattttttgttcagattgtttttaatgatttcataaactcgtgagatttttgattcttcttttctagaacttgttttggtaatgtttctctgtggttgttttctgagttgggcgagaagaagtctaccggttggtaaagtcaacgaatcggttcatctgaaccgggaaacgaatctatctaattaaattaaannnnnnnnnnnnnnnnnncaattaaaccggtcatcaagggctcagtcactctcgttggctccattgtcagtcagagttagttaggtttgtagatcgagaaagaacaaaatcaggcgaaactaaaatgttggctagggtttgtagatctgaatcatcttctgttgctgcttctgctagattgatcagcacgagatggattcatcttcgcgtcgccgagaaaggtacaaagagtctgccttctttgagccaagttacgtttgaaggagaggaactgaaattgaaaagtggttctcattatttcaaaagcttagatgatttcattgatttcttcgatgatatggttagatctcgtcccttctatacggcagttgattgcaataaagtaattggtgtcttcctgagaatgaatcgtcccgatgttgcgatttctctctaccggaagatgaaaatgcgccggattccatttgattactacagcttcaatattctgataaaatgtttctgcagctgtctacatttggcaagatcactaaacttggtttccagcccaacgttgttacgtttagcaccctaatccacggcttatgtctcgaagataggatttctgaagctttagctttgtttggttatatggttgaaactggatgtcaaccggatgtcgttaccttcaacacacttatgaacggtctttgccgtgagggtcgagttctcgaagctgtagctctgtttgatcaaatggttgaaattggattaaccccagacgtcatcacattcaccacactgataaatggtctctgcctagaaggtcgagttctcgaaaaagcagctttggtcaataagatggtaggaaaaggtctacacattgatgttgtcacttacggaacaattgttaatggcatgtgtaagatgggtgacactaagtctgccttgaatctgcttagtaagatggaagaaacccacatcaaacccgatgttgtgatctatagtgccatcattgatcgcctttgcaaagatgggcatcatagcgatgctcagaatcttttcagtgaaatgcttgagaaaggaattgcgccagatgtgtttacctacacctgtatgatagacggtttttgtagctttggtagatggagtgatgcccaaagattgttgcgtgatatgattgaaagggaaatcaatcctgatgttttaacttttaatgcattgatcagtgcatcagtcaaagaagggaagttgtttgaggctgaaaaattgtgcgacgagatgctccataggtgtatatttcctgatacagtcacatataactcaatgatttatggattttgcaagcataatcgtctagatgatgcgaaacacatgtttgatatgatggctagtaagggctgctcttcgaatgttttcacttttaacaccctcatcaatggctattgtaaggctaaaagggttgacaatggaatggagattttgtgtgagatgcatcaaagaggaatagttgctaatacagttacttacactactttgattcatgggttttgtcaagtgggtgatctcgatgccgctcaagaccttctcaatgagatgatctctagtggtgtggctccaaattacatcactttccagagtatgctggccagcttatgcagtaagaaggaattacgaaaggcatttgcaatattggaggatctgcagaagagtgaggtatgtcctcgaattgtccaagccaaatttaagatacagattccagattaaccctctctgattagcttagtgtgtttgctttgcaggatcatcatttggaggatgaatgaaatattggaagattcaatgccattttgcttcatgctcgatcgatttagattctgatgttccacaaacacttgttaattttttatatgtcgtgttaatttatgttattgttgaaatgatacatgttatgtgatggtcaattttaacttgttctgatgtctctataagtgaaaacaactttgaaatttgaatcactgaaggtttcaaatttctaccgtctctgatagaaaaatagaaacacacaacataaaagtttgaagattcacgtatgattaaggaaatgaaatggtcttgttttcgtaagtttgaagttttactcatggattaggatccattgtcttgttatgagaagcgtgcagctttattcatggatttgggatccttgtcttgttatatattttttgtaagtttactcatggaatatgaatcaaaattatgtaaacattacaattccagtttgtgtgtaatgtattaattaatgtatacataaaataagaacagttagtcaaagtaaatgcatttgagagattcatgtgtacctatatgaaatgctataacacatctcattgattttgctctttacagttttaagctattgatgtcaaaattgggcaaccatgatagtgccataagaatcagcaaaaagaaaataaaagaatcaattggtcttgattggttccagtaaatccataattctggtttgctcaagtttccctattcttccttgttgaaattattaccttcattaggcaaaattgtatttacaataatccaacgattttcgtgcgtaacattaggtgattagaaatttagaatcatagagaacctcacaggttaagtggacagggttaagttaatagtaagacatatgaaaacttagttaaggtgtttgtttgaattatgttaagaaagaagaacaaaaggacatcatatgcttagttacacaattagctaccaaacaacatcagatcaaatccatcacaaatcttcttcttccagccctcgagatgaatcttgtgtcttcaccgccttctattgagtggtttcgctgaagatgaagtgctaattgttggccttttagcacctgtggcaaatcaagagatgacttatgagcaaattggcactaaagatcaacgggagatttctactgagtagaaacaagcatctgcttcatatgagtaatttaaaagacatataagtaagctgtgattagagcctgctatgagtgtaa

SEQ ID NO: 26719 - DNA, 829 bp, Arabidopsis thaliana landsberg
tgcgttgatcgtagtaacgctctcagatcagtgttctctgccatcagttcttgatttttcgcctcatatgcatccacctgaaaatatcatattgcgccatatgtgtcagtaacacattgattcaatgaaatataaggcctgagaaagctaaattgtcatggtggttacaatttttttgtagaaatcagagtcagttttcttcccactccatgttccacgctgtctcccttctttctgtgcatatatttacaggaaaatgttcattagcgaaagaggatagtctaagaaaactcgataatagttatttcaaatcgcatatagtacctggagtagattcataatctccatgcctgatctcgtttccttctttttctccatcaacacttggtttaacctctcctaaaacaagatcaatttttaattaattaagattgaacctatattacaaacactctgaacttgctatgtgaacccatacctgtaactttatgtactctttttctttcttttttgtttcatgtaattgttgggtcttgacttgctttcatacacaaacaataacaaaatgttcaaaaagcattgcatcagcattcccaaattctttgaaacatgatccgcatcacaaaaaaactgagaattcgagctggtattaagcaacgattcaaacctggatagcaatcaccattcgctgaaactcatctctctctttttgaagcttctcattctgcgtctttaaagccgctgtattttttgcttcctgaccaaaaaaagtatgtcatgatccatcattacatgttgtccatattccaacctcggatatatatctctt

SEQ ID NO: 26720 - DNA, 1261 bp, Arabidopsis thaliana landsberg
tcttcagggtcttgttgagactcaattttcttaagctgtcagttagtttatagcttttgtgattgagttgaaggctaaactatgcaggaaggcgttgattttgtactttcgggctttgttaatcctgagaggagcacactgtggtcacaagccttgacactgggagccacctatcaacctgactggaacgctggctctaccttgtagatttgtgcttttactaacactccaaaaatccgtcaagttgaaacaaatggtggaacaattatctcaaaggttacctctttgactcttcttataagggattgcgtgcggattagaataccccctttttgctgatatttgatatgatttcactggctccacgagtggataactgagcgttatgcgcagaagaagttggtagatatcgagcaataccttatgcatgctggaaaactcatggtttaaaagcagtagtccccaagatgctaatcgaggtgagaaagaattatattggaaaggctttagatagaatctccgttttaaccatcctgaggttcatcaaatcaccttgtttttacgtttatgacaagagaaaagcttttcttattgcactgcttcactccgatgtttagttgactctgtgaaccttaattgattgtattcagaaaagagagaacacctgtctaaaaaaccagagaagcaagtagagaaaaaaacagaaacaaggggaacaccatctacctcatccaaggcatgtttaaatctgatgatttggttaaccaaaacgaaccgtattttgctccaatcaatggtgtatgactgtttatttccatatgttcacagaatagatcagcttgcaatcttgtgaaagagccattttctgttacagaggtgaagaaatgggccagggatgacctaagtcaaaccatctcatggcttgagagtcaggaggaaaaagtaagggaattaatatgctctttcaaaagacatgttttcttgattgtatgtttccgttattctaaagccattgtaacagccagaaccaggcgaaatcaagcgaatagctgcggaaggagtcttaacctgcttacaagacgccatagattctcttgaacagaagcaggttaatatctctgaagtctgaacaataatagttgccgcctgtgtacatttttggatttgttaaactttgatcagtttctttgagaagatcattggttgaatttattctcgaatgttcttaattttaggacattggatcagttacagagctatg

SEQ ID NO: 26721 - DNA, 704 bp, Arabidopsis thaliana landsberg
acaaccccaacgtacaaaaacaaagagtacttctcattgatcaggagctttgtttcgatctcttcataagctctatgaactctctaaatgctgcattcataagcaaaaaaataatcacattaatcttctggtttttcagtacgactgaagcataagtgtctttcaccaagtgactggaataaagaggacagttaccgttatcagagtcgtgaggtccaggggaggcttcagggtggtactggagtgacataacattcatttccgggaaagatagacccgcacagcttccatcattgagattgacatgtgttacttctacgcctccgggaagtgaagctggatcaaccgcatagttgtgattctgccaagaattacagaaaaaaagacaatgatacaccatatttagattttgtcaagcttgtaacaatgttcctagcacagtcgttttatcagataattatccgaactttgaatgtgaaagttcaaatccttagttggtagtatgcttggaattaaatggaacattttgaggttgggtattggtacctgagcactgatctccacctgaccagttctgttgttacgaactgggtggtttcctccatgatgaccaaacttcatcttgacggtcctaccccccaaagcttgaccaagcaactaatgacccatacagattccgtaaacagggactttaccgagaagct

SEQ ID NO: 26722 - DNA, 1612 bp, Arabidopsis thaliana landsberg
cgaagctataaatcatgttttgaataagaaaacaccttgcaaaggacaacatgatgaaggttgctgtcatttgttaatcttgcaggctgacttcatgaagatgccattcccggaaaacaatttcgatgcagtttatgcaatagaagcaacttgccatgcacctgatgcggtacgtaaaattataaacagctagttgtgttgttttcttccttctattatatgattcatcattatgatctcaacaacagtatggatgctacaaagagatctacagagtgctaaagcctgggcaatgttttgctgcctatgagtggtgtatgactgatgcatttgaccctgataacgccgaacatcagaaaataaaggttagtgtgtcccttgcatctatccatattatttatttgtgcttttattatcaacatgaatacaaacaaagactccatttttcagggagagatagagattggagatggtcttcctgacattaggctgactacaaaatgcctcgaagctctgaagcaggccggttttgaagtaagtatctgattttatggatcctctgtatttccaaacacatcaacatttcaacatctaaatactattatcctctgcgttggatgaaggtgatatgggaaaaggatctggccaaggactcgccggtcccatggtacttacctcttgacaaaaatcatttctcactcagtagcttccgccttacagctgttggacgattcataaccaaaaacatggtaaaaaacttgctctaactaatctgccaaatcccataaactattagtagttcatttatccgaacttgtcattgttatttatgtggtaggtcaagatccttgaatacataagacttgcacctcaaggaagccaaagggtctcaaatttcctggagcaggctgcggaaggattagtcgacggcggaaggtgagaggattccaacttttatttattcagaccatcaagattcactttagatttatcttttttggggtagaattctaaatctcttcttggataatttgtttttcaggagagagattttcacgccaatgtatttcttcttggcccggaagccagagtaagcggatgagagatggcgatggtcatcgtaggtcgaatgaagtgacaaaatttctcaatttgcagtcttattttctatgtttatcggatttgttgcagagtttcttattcaccaactatattttggatgttcgtaacatgtcacgtgttgttcatgtgcactctgcctgaaatctgaatcatgtgcacatgcccaaaatatcttggaatctttctttctctttagatctcaaaaacctttttcttttgtcgttttatgccaagattcaaaagtggggcctcctgattcctgatattttgctgacaccacctcctttgtccgctcctttaatgataagggagaatctttgtttttcctccatggttttttgttttgttttttaacactacctctccatagatctgattataaaattctcttgaattcaattctctgtctttgataaaggagaaactaatttgttgatcgtggattgaattatgacaagtcagaggaaaaatgtcaaagtaacagataaaa

SEQ ID NO: 26723 - DNA, 2795 bp, Arabidopsis thaliana landsberg
tgatcccatcatttatattactagatcatagagttgtattcaattttccttataatgttattgattgatatacagatagatataatgattattttctcgattggtactttatatcaaaagtttactgcaaattttagtccaagagggcttgtatccacacatagagtgtaatttagagctttaagtccttaaactgatcgatgtaccagatctgaaatttagagctttaagtttctaccaagcaagtatggaaatagattcagagatcaaaatcaaaatatttcagattagcggattgaactaactagaacacaaatgtggcaaggggacaaaacaaacaaacagacaacaatgctctgtgtgatttcaggttcaaactgtaatcagccagtatgtaagaagagctgtgtagtaactagagctcggtatcgtggcttgacccaaacagccaacttgacagtatagataacttacttgatgcaggcttctgtttcaggtcatttagatcagcattgcaaaggttgtcaaaagcatgctttagatgaggagttaccactttggcctgtaataagaaagataaaagaagttcatgcaagggtaggtatagaatgaaaatggtagggaaattcagagggaaagatgcaaaataccttgaaatcttcaagaggacagaaatcttttccatcacaaccctgaaatttgtatagaaatattaggaaacggaagaagggcaaaacagaaaagtgagtcaagtcatttcttaaaattctagaagttatgtctgaagttcaatggccactaagatcgagctaaaattgagtttgcgtttagtagttagatgaaacttactggcactgcaataggatgctcattgtgcagaacctgaacgaagtatttgggagaggattctgcgggacaactgtataggacaagaatgttgttcccaccaaaaggagccatggtgctgcctctaaaatccctggttttgggaggctgtggagggagttccaaaggtttctccttctgtattttctcaaactctgtaagacatttaagacctttttaagaacaagcactgagaggaatcatatgttcacaaaaaacacaagtggggtagtatgagagaggtgaaattgatagactaaccagatccatcaaggaaaagcccaagaagacaagaaaagggaactattgtttcggcatgtgcaaacctaagccttgctttttcgtaacttccaggtgggagcttttctgcatgataattgaataggaaaaataattagatctggtgtctacgatgacaagcaaatcgttcattatttcctggttaaagtttgaggttaccttcccgggccttgatagcttcttccattgaatgcaaaacatcttctagaagtggaactcccattttgtaattcaaggaatttccataacctttgaggagaaacacttccaaatcatctgtccattccagcaaagcaacctacagatgattgtgttacacataactagcattatagcattaaatccacaagcttcaggatacttaaagcgcatttaaatatataaacagtaacttgtacctctgatggcgtgaaaagttcacaactttgattagttacattaagcaatgatgcttcctgtagattttaaaattgattataattgatccctgaaaggtgtgtctaagaggggtaaaacgagatgcgggaaagaagcacctgcttgcacagaaaccagagagaagaaatgtcctgtttcgtgaattttaaatcatatctctttgcaacggaagctgtaatcttattcagaacaggttccttgagcttatccacagcaggctctttagcttttctatagctctgcaatcatcgaccatgtaaaggaaagaaatgctcaaaaaagaataaactgagtgactactatatcgaggatgagccaacaacaaaaaatatttagaatcattaaatcacaactataccttgtagttttgacaacattcaaaaaatctcaactttgtatcactagcacggttttcactagtgacagcgaatgctctattacggcctggtcccagatttcctttctcactgaataaccccattccaaatgctacagcacttgcagatgccctaggaatctaccaagagatttaaacatttcaggccaatgcttgcaaccaaattctagtgttcacattatctcaaattttgctgagcagaaacagaaacataaaaagatccacaagccaccaacctgcgtagctcttattgtatagacatcaggatggtaatcctcttcaaacaaactaggaaaccgttcccgaacccgaattcccagttggtataactcatcctccccttgcctgatcagctccccacctttcacttttccttcccaaggagatttccattgtcccaaccatccaggaattttgtctgaaggcaatttcctagcttctgcatctcttaccagttccttaaacctaccagccaaactttccaattcccgcaaccgtttcttggtcggagaacgagttccatgcctagcctaacatgtcaaaaaaccactattttagtctttattctccctcattgccattccatttaacccaaataaactatgcttaccacaaggttaaggtgaataggtgtacactcactgggaacattcgacccttcaatcaaattttgggtaacatctttcgaagtagagtatctgcacaccaaattcaaattcccccaaaaaataattagacctcgctaaagagaacaacacaaatttccacctttttc

SEQ ID NO: 26724 - DNA, 429 bp, Arabidopsis thaliana landsberg
ataacatgcagttcttcaaaggtacagtgccttttttcctgcttacaccactatgagtttccatgataacgactttaagctcgtctttttaaaaagaattgtctggtgtttccttcaggtctcctatgtactagacaccgaggacgtgttgcatcgtgctaagaggaggaaacttttaaaccaaagcggtttacccctcggacaggattctgtttgcagtggttctttaattaggcaaaggagaacacatagatatcaaaagcttctcaccggtcaatgacatctgccacttactaccagaaaacgctcgggaatagagcaacttcgcactttttgagagataaaaggtcgccctactcagcattgagctttgtcagaagagaaaaaaagtaagatggctcttacttctgttactgcctctggtccctg

SEQ ID NO: 26725 - DNA, 1218 bp, Arabidopsis thaliana landsberg
gatgctacatcaaaaggagtatcaatgtgagcacgacttcaaaaagcgaaaatggcagcaaggaattaaagcattttttgaaatatacaagtcaaacatatttatgtgggatgataaaaacttgtgccatgctagattcggtttatgtcacactagaataacctgaattgcatgaaggcaaacaagatttgagaagcgaatcgatacacacctatttaatacaccaaaatgcaattcaaaaaacggcagtctggtaaggacgcaatagcatctgcgagttgtcataacatagcgacttaatgatgagcaagcaggttgtttgtccaaaaccgtggaaagcaatctggacggtttgttcactatttcttccactagtaagcagcatccatacaaagtagaattatcagcaacctgagaaaaatatcacagaaatgactcatccaaatagagaagctacaatgtaataaaggttttaagcaaaagagatagtttggccacaatgatgcttacctgtaacctaaatacaaatgaaaggtcacttggtctaagatgttcctgcaaagttagtatcaccggttttaaaattagtgtatgttatcgtatatgaattttagctttgtgaatcaaagttgacacaatgattaatccccaatatttttccaatatcacaaaatttaatccagtagaaagatcaatttttacatctacactccacatcaggcaagtacctgactgagaataatctcactcaactcgctcatggaaggagttctctcaacagcatggacctgaaaccaatagttaccactaagaacttaaaagacataacaagcaaaaagtgggagtatgaagtacatagtttttacagataaacacagtaaatcatgaagggtaaaaggcacagaaacatagagagaaatctactggaattaaaaagactaccaacacttttaaagagctttaaaagtgagtgaactcaatgtactagcgaagtaagtagagaaccaacatatattttaaagtatgaccaccatgcgctattactagacaatgcattgtgagaaaatttcagctcagaactgtaagaaacttttctagaagtgtcaacatctacattctaaactagttacgacataacgggttgacccacagtgcaccggaaaacttgttatgtattacagaacagagaagcaaacaggtaggaaatgagggaatagt

SEQ ID NO: 26726 - DNA, 1594 bp, Arabidopsis thaliana landsberg
  unsure (1)..(1594): unsure at all n locations
aaacaaccacggccaggggggagacttcctgtgagaaagatgcaacacacccaattctacttgcaaaattttaaacaaaacaaaatcatggcttggtgctgaaggctcttacagaattagataccatttatacaaatgttcaacaagcatcagcttctacacactttattccagattctaaagttacctttcacttttataggtctaaacataaataagaaaaagtgatcatcattgattgatgcatacatacctgatcaatttatcgggttttcggtatctttttacgatgctgcagcctaggcttcnnnnnnnnnnnnnnnnnnnnnnnnnnnnnnnnnnnnnnnnnnnnnnnnnnnnnnnnnttagtgatttaataatggcatcatagtggcctatagtataaacgatatcaccgtgccaagcaattttaaaatggaattgcagaaaaacatagacttggatcaaagggtatgcaaatgcattattcttaatcttacagaacaatcatacatgcatgattcagatttgtaaaaagcatcagttacaagcctctacaatagaggtggttcataggaatttttgttttcctttttgactacttagagaatagcacaactattgagttttaccttctcagcttcaggagaaaaaattgccttcacctcctcgaagacagcttcaatgggctttgcagcattaatctgaggataagtagtacaacaaacactttgttacaacttaacaattgttggaccttaatgcaatcaaagaagaaaaagattttaccttcctaactttccccttagcttcgtagtaatgaatcactggtaagctagattcaagaaacaccttaaagcgcttccttatagtctcaatattgtcatcctctctccccttcaacaacagaaatggacgcaacaatcaatatatgtgtaacgtggagtgaaacaagagcctagacagaattaagtgacaagagattttcatatcatattaacctggtttcggcccaacaggcgcttctccatctcttcctcaggacaatcgaagaataagacaaactttggttcaatctcagtctacagaaatcatcaaaggcatgtaaattaagcaatggtaacgcacacataaatatttgttaagatattttactatacttacaactttttcaaatgctgctcggttttcctcattacgagggaaaccatcaatgaggaacttgtcattcccgttttcctgaatagctttctgtagaagcttgatagtaacctcagaaggtacaatcttcccctctttaatcatattctggatcatagttctgcaaaaccattgaacaacttcattcaacacaataacaaagaacctcaacaaggacaatgaaagcgaaggtctttcagcaacccaaacattgacaatgtcagaaagtttaaaaggcatacccattttcagaacctgatttaatctcagctctaagaagatctccagcactcagatgtgtgtaaccataatgttcaacaatataagcacactgggtaccttttccacttcctggaccacctattgaaaatacatccaagagacgaaactcaga

SEQ ID NO: 26727 - DNA, 1205 bp, Arabidopsis thaliana landsberg
ttctgtaagaaattcgtgtttttttacagagattagtgggtatagatcgaaaaagaggtttaaaacaaagccaatttctgagttcagtcaagccagttgtggcatctccagttagagtaagaaacggagtcgtatgagcacggcatagatgccgtcggtgggaatgagacgaaccactagggttttcggggtggttaaagccgcagacggagcccgtgtcctccgttcgggtcgccggatctggcctaacgttggcgagccaaaggtacggcgagctcatgacgtggtggatcgagattgtgatagcgttttgaagaatcagaacaaatccaaaggcaataaagtctcctccggtaaaagtaacagccagccttgtagcccgaaacaagtttctagtgagaaagaagacaaagtagatgactttccggtcacaaaacggaggaaagtgagaaatgaaggtgtaggggatgaaaagactgtggataagatgtttgggattgtatatagtaggaaaaggaagagactttgtgaaccatcatcaagtgatagatcagaagagccactacgaagcctgaagttttatcgcaggcgaagaaaactctcacaacgggtttcttcagtgcttactcttacagtagattggtcatgtgaggattgctggtttttaactgttttcggtttggcaatgagatatataaggagggaagaactcaggctgtcttcacttgcgtctttcttcttgtctcaacctatcaaccaagtgtttgcagaccatggcgtgcgattccttgtggtaattacctaattacctctgcacttactatcgttaggtttggactacattttgtttatgtacgtaattgtgatctttaatgttactaaggtaatcttttggtttctttttattgtgatgttttttcagaggtctccccttagctcaaggggtgtctgcaagttttttggggccatgagttgtctacctctcttttcagcagattttgctgtcattcctcgatggttcatggatatgcatttcactctatttgtaagagttctaccacgctccttctttttcgtagagaaatctctgtatttgctaaacaatccgattgaagaatcagattccgagtctgaattagctttacctgaaccttgtactccgaggaatggagttggagttgggttacatccaccaatgagagcct

SEQ ID NO: 26728 - DNA, 1375 bp, Arabidopsis thaliana landsberg
tatcaggatggagaaacgttttcgcgaaccacctgagtaaatatcattgttacaagccatatttatagttgatcttcacagattttatattggaaagatcactataccattttgtttggttatgtgcaacaatgtgtatggcttttgagctccactctagatcccaccattgatccatgtttccatcataatgaaatagaatgacagtgaaattcgcaggaagaaactgaatacaacaaactaactaacattagaaacagaaacttttcagtaattcactgatctagacaaaagcatacttaccttctttacaacagcatcaacattatccttttgcttaagtcctaccggcattgccaacaagtttcggttggtcaattcgccactctgttgtaagacaacaacagacatcagaaaattcttgtagcaacaaatgtatctgattactctatgtaaagcttacagataaatctaacctttgacctcaaactactacttgaccaaagtggctttaactccaaatctgatctaggttgcatgataccaaaaggcaaacctttcaacttttcactgaccggttcagattcctgaacaagatccacacacatcaacttcagaccagtaatgcatcaacattagaaacaaaagagaatcaatatgttacctttgccatctcaaatggataatctgtttcttctatctgagtaatgcatataccaaacaacagagagtcacatatcaataatctcatcgttatatctaaacataatagctctgtcatttccacaatacctctgtctgttcatactgaatatttgtagtcttataccaaaagatcaaaagtactgtacacattagcaccacaactggtttcattttccatgacgatttaccctgcagattttcagcattccccacatcaaaatcaacagcataacccggaaaatcacggtgagatacagaggaaaaacgcttgacttaccccttcttgagcattgtttcttctcttgacaagtgacttccatgatttaatagacggtaaaccatgttccataatctatttaccgagctacaaaaaaaccacacacaaagaaatattcatcactatccatacaaacacaaagacatctcaaagtttccacaatctgaaaaactcaccaaagccaccgtctttgtgttgttcccttgacaagaacagagagaacaaagaaaccaatccaaagcttcaccaaaatctcagttctatacaaggctgatctacgcacatgcaagaatgaatcttttcgaaaaatctactctaggacacccaaaaattagaggcttcacataccaaaaaaaaattgaaacctctttagcatgtattctaataaatctg

SEQ ID NO: 26729 - DNA, 1350 bp, Arabidopsis thaliana landsberg
actctagaggatggcagtaccgctctggatcgtatcaaggaagtgtcgaatggtgtcaaggagcttcttgatgcatattcgatgtgctcagccattgtcggtgaagattccttctctggatccggtttaggtagagctagtatggacactagagacagactgaaagggttcgacaagtttctccacgagacttctcagaaccaaaacacaacaacggatttggacaagtacttgtctgaaccgatctttccccgtagtggcgagttcaacattctgaattactggaaggtccatacaccaagataccctatcctctctttgttggcccgtgacattttgggtacgccgatgtcaatctgtgcgcctgattcaaccttcaactctgggacaccggtgatctctgatagtcagagttccttgaaccctgatatcagacaggctttgttctgtgcacatgactggttgtctacagaaacagagggtacaatctcaaactctatttaagtcttcttctcctttataagaattcaaaagccaatcaatcatcaactcctactgacttaaatctcttataacgagccaagaaattctaccattgtctagacaataccctcaaactctgtgaagagaagaacaaaatacaaggtattgaggtctttgcgttcctcacttccaccgttttcttcatcattctaagtgaataaatttttattttcctcgatacacattaactttactagttttgaattgtggtaggatgaaaagatcatggaatgtcactcgtagttctctaaggtggtgaaactgaagagaaagccaaatgcttttagatggtcgtgttgcgtagatggaacagaaagtacagaagtttaatttatttatgcatttgagtttgctgtttgtaacaaatagaatcctcaagtttaaagcaaagggaaataagttaaagtcaattttgtttcttctttttctatatcttgcttaacatgaaaacaaaacagggattatagaataggagtaggaggaaccaataatgaaaggagagacaactccaacaaatcgatctgtgtaataacattaatgtaaaacaaagatgtgttgtgacgtagaatgagtgaagacagctacatgcaagtcgtagaatgcaaaaaaagagagtaaatgaatcagataaaactatagtagaaacattatagtgaacacagagcggggaagtgcgtgtgtgtgtctgtgttttacgttctcttgttaggttcgaaaacgtatttgatcaacgaatctttgatggaaagcatctctggaaactccttgctgagcttggcaccatccatctcgttgttgctccgtgga

SEQ ID NO: 26730 - DNA, 1182 bp, Arabidopsis thaliana landsberg
actcttaacactcctatattgcttttgtgatgcagacattttcttgaaaacatcaggtggtatgtgtaaggtctttctatcgtaaaggggatcatcaggacgtcttctattggcatccctgattcgagaagactcaagccattcaaatttggttccttcgtttacttctttcttctctccacaaaccggatcctggagcattttcagccttttgttagagtccaatacaggaaccttatcctccttaaaagtcatttcatcctccagaactcgcttcaagcgagaagcacgtggacgcatccctggtgtttctggaccaggaacatcgtcatctactcctatatcttctactgatctaagttcagctctcccactgaaactaaaagcatggtttctttcttgagttttaccattattggaacgaaattgaggaataacatcattagccttcatacatagagatgaatcattcagcggaacaacatcttctcggctcctgaaaatttgtaaacaacgatccaatgcagtaatcagaatctctccaacgaatacaacaaattacacgaatcttcttcttccagctaaagataacaaaattaagagaatcgaagattagtacctctctccagaacaatctcgatcatcgacttttacaaacttatgcataatattggagaacagggacgaagcatcaccggcggattcagccggcttaaatccagacggcaggacacgacgcggaaccttctccggtggagtatccgttcctctaacctcatcgacagatttcgaaacagcaaaacgtacagaagcgtcgcctttagcatccccttccttcacattaaatcgtggtcctccgctgccgcccccgccgctagcagcatcgccggaaaccaaacccttcgtagtcgccgccgtgggtttttggaagaaagacaaaatcgatctctggcgctgcattttttggaattgtgagagagagtgagagagaaacgatgttttgagctgagagaattcgaaaggggggaaagattggcgccaaaaattttcgccttgcgtcgtagaaatggcggaaacgatactcctcagggctcaactttttttgttgactgtcactctttgaggctttgatgaccgccgatttatgtctattactgaatacgttggatcttctagccacga

SEQ ID NO: 26731 - DNA, 808 bp, Arabidopsis thaliana landsberg
ctggtattatccccatctattctagtatcatatgacttcacgttttacctaattagctctcatcgattttgtgtgatctgtctattacaatgatagtttccttcctatgtattataacacgggcctcatgaaagcccgttagggtttgcgtgtaaagcataagcccagtaataaaaaaaaaaacctttacgaaaagattggactttttcaaaattggtagcttctccaattttctccgcatagccgttaactaccaaatcacaattgtcgggttcgtgtataggctcacaatgtaacgcttgtaatttatgcatgcacgtaaagtatgtttgtattattaaataaatgaatggattggattatgtggtttatgataacctgatgagtggtgctacattattatggcatgagacaagctaacactcatatcttcgacacttggacgtacctaaatgatgtttggtcattcactctttatgcaatcaaataaacaataaaagcaaacccaattttaagaagaatgttggatcattgttttgttaggaatactagttaataaaaacctgaaaatactattcaaattgctaagataactttcaagtatatatgcctatgatcattttaattttaatatatattagattaatttggttatccgaatgggttaacaaaatataagaccatagagcatgaaataacaaaatttaacattaccaatcttattccaatgtcctcactttccattattatgatttaaaatataaatagtaactaataaagtaataaaacattactatttatagaaaaa

SEQ ID NO: 26732 - DNA, 1407 bp, Arabidopsis thaliana landsberg
gatgaactaaaactattacatgaatgataaaaaatccacaaattcagtatggttataaaaaatactagatatcatttccatcttaacatttaaaatcaaactattcaaattcaaccaaatttgtaaaacatgctcaaagtgttgagaaaaaactgaatataaaagtagatttcttatctttggttcatccataataaaacaaaattcgtcataggtacaattgaataatgtcacatcacttcagagtcgtcaaacaagggcctgttcatctacatgtctctatctcgttatgacagaaacaacaacaaagggaattggctctgaagcctctgagagaaacaaaaacacaatggtaagagaaaaaagttgttaacgttgaagatattaacgttgaagatattaacgttgtgctagtattttttagtcttgatgacttgtctcgtgtatatctagtcttcactcttcaccaccgtcgtttagctttgtcattgtgtttgcctcatagacaagtaagtaacaaacagcccccacaaatctctctagctcactagctaagacaataacaagatgttttttttttttttttttggcaaatggtccatatgaaaatgttagtttcagtgagcgtttgggaaaagtcttatctttggaagtaaatccctataagttaattagaaatgtttgtttactgtcaagcatttaatataaaactctaaaattggttcacattttctggatttctttcattttctatataattacaattaattaagaaaagaaatctatagcataaatatcatatatatggaaagggcaaaattcaatagcattttttttcttttctttttttataataaaattgaattagttggttcgacaagtaccagctgtattcttttttctgttgtaactatatttcctttttatgtattttctcataaattgtataatgtacacctgttgaataataactagttttcatagcttaatttcgacacttgtcaattcttgatgataagaacaactggttttgtactataaaatgcatcgaaacttcttgtaataagacatatacaacttcaacatacacataatctctcacttaaaaatatctctctctctctctctacaaaatcaattccaatgttggtgggaaagataagtggatatgaagataatactcgctctttggagcgagaaacatctgaaatcacttctcttctcagccaatttccggggaatactaatgtccttgctgttgacaccaatttcaccactctactcaacatgaaacaaatcatgaaacaatacgcttatcaaggtgagtcactctctctctctctctctaactatgaggatttagagagttgctagggttagggtttataacagctttcttttcttttg

SEQ ID NO: 26733 - DNA, 1061 bp, Arabidopsis thaliana landsberg
  unsure (1)..(1061): unsure at all n locations
catttgtgtatattgatcaattacgtcttttacatttttatgaagatctcttatgtcaagggtcccctgggctgttctagccggaattgcgcgaatccacagttcttcccaaactctggtcagcatacctgaacctattgtccttcgaagacccgaaattagtaacggattagcagccataatacttctccaaccaaaggaaggacgattagaacatcctatatgcagaggatcactaaagcggaagtatctgcctctcaaaaccctactaagtatggaattcggatatctaataaggcgccnnnnnnnnnnnnnnnnnnnnnnnnnnnnaaattcttctagtgatctaaaaccaaggccgccctcattgtgtggggtgcacaatttatcccacgctaaccagtggataccattactattttcgttagttttccaccaaaaattagcaatagcgctacttagttttgaacgaatagccttaggaagaagaaagcacgacataacatatgtcggaagcgcctgagcaacagactttataaggacctctttgccacctttagacaagaattttgcagaccaagtattaagacgcttttgtagtctatctctcacaaaggaaaagacttgaactttggatccatgaattttctctggcaatcccaaataagaacccatgcccccatctttttggattcccaaagtcgccttgatagtacttcgcgtaatattatccacatcatggccaaacattactgaagatttagaagcatttaactgttgccccgaagcctcgccgtaaatacggagaatcttaatgatctcttgaccttggatgggatctgctttacagaaaaataaactgtcatccgcaaacaaaagatgggacgtagatgggcttgctcttgaaatctggagaccttgaatacgaccatgccactctgcatctctaaggtttgccaccaaggcttcagtgcatagtataaacagaaaaggtgaatangatcgccttgtcgaattctctagaatgtttaatgaatcctctcggtgaaccatttaaaaga

SEQ ID NO: 26734 - DNA, 1753 bp, Arabidopsis thaliana landsberg
  unsure (1)..(1753): unsure at all n locations
tttctccggaaggtggccgatacatcagcattcccggaaaaaaatcgtgcataagttacagaccgacccgagtcaaacccgtatccacacttggatcgaagccatgagggcttcttccccaacccgtacccgaccggggaaccatatctcccctcccggagtccgatgaggaggatgaatactcttcttggatggctcaacacccgtcagctttaaccatgtttgaagagatagctgaagcttcaaaagggaaacaaatcgtgatgtttctcgactatgacggtacattatcccccattgttgaaaaccctgatcgagcttacatgtctgaagaggtttgcttcccttcttacttcttcattcccttgttttaggttttttttggttttctgacaacttttgattctcagatgagagaggcagtgaaaggcgtggctagatatttcccgaccgcgattgtcactggaagatgccgtgataaggtacgttttaatatttgaataaaacatttgtttcggtttaggatctttttggttataaaaagacataactaacgtgttttttttcgtttttatatttggtaggttcgtagatttggaaacttcccggactttactatgcaggtagccatggaatggacatcaaaggaccttccaaaagatacaaacataataaggtataatcataaaaccttatatattaaagtatgttgattcataaagagactaacaagggtttaatgttttttggaacaatatagaacaataaaggagttcttttccaagcggcgaatgagtttttgcctatgattgacaaggtctcctacctttttctatttctatatttataatctatgcgtcaaattcaagctacttagtataacaacatattggtctctaactaaggaaaaaaatacgaatctcttaatcaggtctctaagtgtctagtagagaaaatgagagacatagaaggagcaaacgtcgagaacaacaagttttgtgtctccgtacattaccgttgtgttgatcaaaaggtaagaaaataaatcaagattacaaatattttcttcatagtcaaaaaagtaattataacgtatggttcatttgttttgataggactggggattggtagcgggagacgtgggatcgatattgagtgagtatccgaaactgaggttgacacaaggaagaaaagtcttagagattcgaccaaccatcaaatgggataaaggcaaagctctcgagttcttgctcgaatccttaggattcgctaactctaacgatgttttgcccatctatataggagatgatcgtacggacgaggatgctttcaaggtaaatttaccatctgcaaaattactataaaaccttaattaaatattttcattatttagaacttaattttgtagataaattaattaaaattttggttgggttcaggttttgagaaacaaaggacaaggctttggtatacttgtgtccaaaattccaaaggaaacgagtgctacatattctctacaagaaccttccgaggtaatataatattgtcttgagtttggttatactctctaatgtctgaggctacaactttcttttttgaataatgtttgaacaggtaggagagttttgcagcgactcgtggaatgaaacaaatgtcactaagaggaagatagccaatttccctgacataaatntattttccaattaataaatgaattagttttcactagcacaaaaatgtgataatgacaagc

SEQ ID NO: 26735 - DNA, 2066 bp, Arabidopsis thaliana landsberg
cttcttgtcttcaaagaaagctgttacttttaaagttttttttttcttttttgagctttcacctataagacttcctcggtgttgagtattagcacaatcaaagtcaagactacaagagccattgtctattgcttttatgatgatgttttggttctaacataaaaagggagagagttgtgttcaagttaaagttgttgattcaattgaaaggaggaaaagcaaaataaataaatcccaaatttggtaactttactaatttataggtagttgggtttagatagactcctattgggcctgttaaggcctttaaactatagaagccgataaagacccaggagttaacttgagagtcacgaaaccactcaaatacacgttcttgtttatcttgtgtacgtaattactacataaacccattattttgtacgtataacgtattgtatgaaaaagctaaagaaagtgaaataaatctaggatcgaaatgtatataataaagttcacgggttggtatttatgtcaatgaaaccgaactaagcaaaggacccactctttttttgtataaccagtttagccctctcatttactaaaacaagccgtcataacatcgattcatgtgcttattcagtgtcgcatttatatcccaatttgcttccaccaaatatcttccctctctcgattttcaacttcttgttctccaagaccacgtctcactttctctctctcgctctctcttggaaaccaaaacaatgacgatgactcacctgaatcgtctgatcttgatctctcttctctgggtctcttggcatctcaaatcctccaccgcttcttcaaccgtcgtcgacgaaggaaacagaacatcaagaaacttccgttaccgaacgcaccgattcgttccgaggtttaaccaccacccttaccacgtgactcctcaccgttcgtgtgattccttcattcgtccttacgcgcgttctatgtgcattgagcttcagagaatccaccgtagcagtcggaagcagccacttctttctcctcctcctccggagattgatccaaggtacggcgtcgacaaaagactcgtcccctctggtccaaacccgcttcacaactaaaaccatatcctcaagtttctatacatacatatatacagaaacatttgtcacatattttctaatttaactcgtttctcggatttgttcgagagagatttgtgtactttatagctagagttattttggcccaagaagatggttcgttagttcttcttggtcttctgtgcggaaatttcttatttcaactttcttgatcttgtaatggagtcatgcgttatggtaatattgtaactaagctatttccacgcttgtttttgggctttgtagtgtgaaaacaatcttggaaatagtgtatttttgcaagggactttcttttgtttttctaatgagaaaatgataaattatagttttgaaagcgaaaggagaaaaaaagatttagtatggttgggagagcagaggtgaagaaacgcatgagctccattaatttgggagctgtatttatgtaactctaaagtttccattggtctatcaataaaaatttaaaaaggttgatggggcatatatatgttatgttcttctctttcgtgtgatatttcgctgtaaagatatttatttcgcttgtctctgtcaatagacaatagtaaaaactttgcaaatatagaaacttttatttataattttgccaaccagattttcctttatcattttgccagccaaattttttatgtctactcatttttacaaatgtggcaccgtccaccatgtacgtgttatcatccgatttaatcaacggattataagttgtagaaaatattatttattactctttatgaaaaggaaagttatgaaagaaaatgtatatatcttaatgtttatcgccaaatttatgggataaaagtgttttaagatgagatgatgaatatagtgcaagcctggcaaaacagaaaaggaaacaagaagcaaaattggaggggaaaaaaataatccttatagagtaaaatagaaataacatgaatgcat

SEQ ID NO: 26736 - DNA, 519 bp, Arabidopsis thaliana landsberg
  unsure (1)..(519): unsure at all n locations
aactctctcagtcatcagtcgtcagtccgacgaactcattatgccggccacagattaagccctccgttgcctctccgtcgccgtcgtgaatgctcttcgtgcaactggaacctctgccggcactcaatccgctctatatctgtccacttcgagatcgaatcgaaggcaagtcattttctatgttttttttttctcttttgacactcaattcgttaccctagatctgtttccatcaatctctgagactcaataaccgatgtttgtgtgattttagaattcgttaccctagatgtgttttctttatcgattcttaaaattttgtctactttgcatgcctttgtttattgcgaattcatatgaatttcgtcttagtaatgttaacctgaactgctctaggtgtttgtgaacggtgtttgcatctcgaaagttgtgtataaaccgccccattagagttgcaacttttggattttggatncagtnatgtttgattttttattgagtgataaaacttgagaattt

SEQ ID NO: 26737 - DNA, 1375 bp, Arabidopsis thaliana landsberg
aacctggtgtaagagattccgatgtgtaagcataacacctttcggatttcccgtggtaccactggtatacataattgcagctgtatcatctgaatcaatgaattgatttctatagctccctgcagtcatctgtttgttagcatttattcttttagggcacagtaggaaaaaaaaatcagaacctttacgtactggtatcattagatgctgataattttgcacgactctcctgtccttggtttataatttctgcataactgtaaactggaatctgcatcccctgtgtgactagtgatgatttctcaccccagagaagtatcaaaaatctcagagatgcctttgacgtaaatgactcagcaatgcggttgaaaaactcaggattatccacaacaatggctacgctgcaatatagatcagttgaaattatagatctctacagtctatattctaaacaaatgcacagataactgaagagacacaatatattgagggggcaaagatctttttgaatagatacgattttacaggagagctggtgcaataagataaaatgagaaatcaagagctgtttaattagaactacatcaaagcagaacattaattcctaagaagataccaaaactgtcaatctaaaccaaacatactgctcttagaatcaacatcatcattagatattcagatgcatctgaagatatagaactagacctgtttgaagaaaaaaagataacaagatgacgaaacaaacggcacaaagatgaggtcggtataataaagccaaactatgcatctctaagagtaggtatgatatttacgtcaaacaacataataaatgaaaagtgttggcatacctttcagaatgtcggtatatctgcagtaactcttcgacagaggacctagatcctctgacaacagtaactgcccctgtggccattatacctaacataaagtatataacagcatatatagatatcaatacctgggacgagcaaagcagaaatgaaggaacagtgtatattaaaatattgcaccaaaaagtgaagttgggaataggtaagcaaagctagcaccatgagcgtatcatcacctccgatgacagagttcctcgttaaattagaggaaagaagagtgtagaggcgtctcatctcaaacgtatctcaaaagattgtttgtttgatggctaatgtgtaaggtaaggccctaagaagctaggtgatataaatttgaacgaaaccaatccccctagttcttcttgttcttcttataaactagtgagtaataatgttcttgtgtgtgcctgttaggcttggacctaacaaacactaagtccagaggtagaactcaccccaaaaagctagcttgtgggggagagggtgcc

SEQ ID NO: 26738 - DNA, 699 bp, Arabidopsis thaliana landsberg
tcaaaattactacttactatcttaaacatatataatagtcaatcaaaaacaaattcaaaattaaaaaaaccactagcacatcaaaaaatttaatttagctactcttaggaaaagtgttattcaaaataaatttcccagtttatttttctagatttgttgtttatcatttattttggaaagagattttaattttggatattataagtttcatgaatcactagtgtaagttagcgagtgcgattccggagcgtaagacccacgcgcagtagacgaagacggaagcaagcaccttcttcttcctcttcctctttgtctttaaacccctcgtcgtctttctcccgtgttctaacctcattcctccataacccctttcttccttttgaatctctccttcttcttcttcttcatccccaaattcgaaaccctaaccctaaactcagtttcaaaatggctgaaccaatcaccaaggagcagcctcctccacctgctccggaccctaattccacccaccctcctccgtccgattttgattccatctcgatccctccgttcgatgatcatttctccgatcagactccgattggtgaactcatgtccgatctggggtttcccgatggtgaattcgagctcactttcgacggtatggacgatctttacttccctgctgagaatgagtcgtttctcatccctatcaatacg

SEQ ID NO: 26739 - DNA, 1148 bp, Arabidopsis thaliana landsberg
gaaccgacacgaaacggcaacgtttttatgtaacaccaaaaatggttaatctaaagcccaataaaagggtaatctagtggaccaccaataaaaggcccattaattgataggcccaatattaacaacctgcgtttgggaattgcccgccggatgcttccaggatccggaacaaactcacttcaactacaaaactcgaccctttgaaataagaagaagaaactctgggagtagtggagattgaattttcttatctacctccactattcaatcgcatggcgtcaaaggcccattagaaaagtcaagccaggggttttggattagatcgttcgttcttcaatttaaaagttttcttctttcttgttcggaactcagaaacacgatgaaattggcctcgagcttggttcctcatcaatggcgtctcttaacatcaccacagctttctctacaagctttcattttctccacaggtacttactttgtctctgattttgtcatccatggtttcgttttacctctctctctctctcaatcttcttcagcctccaccacaaagtctcacactttctggtctccaagcttgcgtcaatgtcggaatcttcagacggctctttctccaatcgtcagttctagctacttgcccacttcctacatcactcagaagcagattgaaatccctacctcccctgtatatatattgaacccttgtttactccaactttgggtttccaactttgtgtttccattaagacaaaaacacgatgttggatttggtttgcaggaaaaacaatcgccaccagtgcaggaagggttgggtgcttttcaaaaaactgcccatggtcatgccatctattgatttgtatgcttctgctctcaggaagtctaaaagagtccaaccaactaaaggttatttgattctttatcttattctctttgtttacacattaacttcttcaaactctttaactcagtctttgtccatttttggtctcaggcattgctaatattgctaagcgagaaagaaatagaggtgctaaacagcttgatgcattcatgaaagtaagttcattgcatccttcgctgggttttggtttaaattctgaaacgtaaattgtctttaccaaattagaaattgttttgttttgtgaaag

SEQ ID NO: 26740 - DNA, 1140 bp, Arabidopsis thaliana landsberg
  unsure (1)..(1140): unsure at all n locations
gaatccagcttctatttaatacaaatataatcccatgacaattaatttcctaagagagattatacaaatccaaaaaacaaaagaatccgcttaagttaaacctatgcgtatataagatatatataaattacaaaaggagaaagcagatatatgaatagagaagtaacttctccctcactgtgtttaggcttcaaagctaaaacctgagtgtgtaacataaagataacagccgacgacccaaaagaaaaagaatggagtgttggatacattagcttcgttatgttgagtttggtgaagaaccgtaaccgaaaggattgttgcttgcccagttccactgatccctacacatttcttcgattccaaaatttgccctgtccacagattttgagtttcttcattcttagagactatgccaaaacaggtccatgatacatacttaataaaaacattcgttgggtcttttacttacttccagtttagttcgcgttcagctttttctgttgacgcatagacggtttctgcatcacctggtctccttccaaccttcaccagtgggattttctgtacacattattgcaaactatcaagtcattgtgatgtaaagagtcaacacatatgtgtgcgtacactcttatgaatttgagtgtatagcgagagagagagagagagaaggagagaagtgatcttcttaccattccagaagctttctcaaatgcatcaaccatctccaacactgttgttccttttccggttcccaggttgtatacctcacaacctagcacaacagccaaatcagacagttgagcttgtttgtataaataagcggatatgtattgtcgagacaatgaggtacttatgaaaagaagaagaaaagcatacctatttcagtatcgtctagcttttgaagcgcacatatatggccatctgctagatcaacaacatgaatatagtctcgtacctgaagttgataaagaccgataagatcaatataactcatcacaccaaggataaaagcaagattgttaaatcacaaagtatcgggtcaagttgaagttgactattgaggaagtaaattgattctcatgttattacttaatattgaagcangaaaagtgaatctatcaaatgatcatgatactt

SEQ ID NO: 26741 - DNA, 2835 bp, Arabidopsis thaliana landsberg
aaacctacagaactcacaaaagcaatccccatcagattaaacctcatcgcaacaatcacaaagagaagaaatcatttttaacttttaaaatctcaccgtactctcggctaatccaagctgaataatcccatccgtgttcgtaatccgatcgtacggatccgttttgactctctccaacccaatgtaataaggcgaatcggaaggtttagctacaggaactgctcgggaggagactcgaactcgtccgatcgagttcccgcgagagaagagattagtccgtgaaaaagttctcggtaactccgtcgggtcggagggaggaggacggcgtcgtttaaggtagagctggagaaagtagaagagacaacaaggaatgagagagccgacgaagagaccaccacggccttgaattactccacggagaggtactatcaacctcatcggaaaatgctccgccgcggagatagttgttgcctccggcgttgaagagagattcgagccgttcgttgagagtaacgaagttgaaaaagagtcgaataaatacaaaagttttgagataaattggcaaattatttttccatattcgcaaattgtctctacgttttaaaagttgctaaatagtccttctaatattggtgaaattatttaaagatcttcaaagttttgaaaacaacaatcaaagccataatcatgatccaaaacacagaagatgagcatttaaccattacatatatctgtcaactgaaaggttctataacaaatctaaaatagaattccatatgataagaagaacatgaaaacacaattagaaaagatgattaatctttgaatcgaaaatctcaggaaaaaaaatatatcagaccgccggatcagggctgctgctatgccatcctttagtgcaaggaggtatttccatgaactcgtcgaactccttcacgtgaacatcgcaacatttccactacacaaagaaaacagtgatattcaatagaaattcaaacagtgaaagaaaagggtcataaaatgattgaacaaagaacgtgttacccctctcagtctgtcgtggaagaccgcaggacctggatgatggctacatgcagtctcatgattgtttctctctttgaatgtttggccacatcctttgtttttgcagacttgcggttgattaatgtctatcacagccttttgtactggaggcgctaagggttcaattttttcttcttctgcttgtcccggtgtgttcagggtctgcttgatctgttctttgggttgggatcctgtgtggtaaagaaggacacaaaattagatagaaggtcatgcatgttaccaatgtgcaacgagaatttaaagacgagagaataaagatacaaaccatggtctgagcagatgaagccttgccggcatttggagcaagagtcttttgttgctgcattggcatctgaagatgaagtagaagccgcaacaggatgttttggaaccgatttggccagaactggtttctcagttgtgtgtttacctgttttacatcttcattgcaagaaacatcttcagtgtttgcaatcaactacaatatgtaccatgaaagacagaggaattattatgagggggtacaaggatattagttaccctggaatttccaagaacaaactgaaatcatgacttctttgcttgcagcagctccactctttcattccgtcgtgaaaaaatggctgcaagtttgaactttggtagctttaattctctgagcaagcgagtgtgaaacaaaaaaaaaaacataaaacagtatttgaagagtaaatttgacttactccctgcttgaacaaaaaccagtagtcagtgcaaagaccagccccagccacaccggaaaaagaaaagataataaaagaagatgaattacaataaaaagctcaaagcaatagatgaatatgaaagaaacactagtatacaaggccaaatgttaagatgaatattgagataaagccttctttctatacacaattgttctaattacacttccagggacagtcttaacgagctctctctctcacatagccataaccggtggcaaaagttggaagcaaacaattcaaaagtcgctgcatgtacgtacactctccctcacatagccataaacggtggcaaaagatctaatacttggattattcaattttacgcaatatacttttgctttcttccatcaagtgttctaataagctcacagtctcacagaattcataggttgcaagcaaacaacttagttaaaatttgacaattagacaatcaaagctgtgttcaaagcttacttacttacaactaaatgaaatctacatgtaatcaatcagctaatccaaaacctaattaaacacttgcgtaatcatcttctcatgatcaaaaatcgaaattcgtaacctcacatcataaaatcaaattcaaaagctactctatgggtttatcagaaactatcgaagacttagaaaagaaagagaagaatcgattaaagatggggagagaagaagacgtacggaagcatgaaattgacaagaaccttgaggattgtcgtcatcggtgaacatggcgttgcagccaatacgttggcactgaagcttcttcgttgcagatcctacttccattatctctctcgtgaatttgtgaagaaatcggacgaattgagaaggtaggagtaaaaagtattgggaaatcaaattaaagggctttttcgtcttttagaaaattttgacttttgagttttgaccggtaatgaaaactgatgagtaaaacgggcctcggcccaaataataccatgcagagcgggcttggtccgcttggacattattttcatgt

SEQ ID NO: 26742 - DNA, 1454 bp, Arabidopsis thaliana landsberg
  unsure (1)..(1454): unsure at all n locations
tctatgtctaagtcttacctgagatgaaaagtttttgcatcggtagtagttcggattctgttagtaacttttctatggtgactagattcgggtataagctagttaacacggctcaacgttctgatcctccatatatgtctgcaccagctacgaaaactcgggtttcgcggttgaagccaagagccgcgtgcataagcacggcttcttcgggtgttacgtcactaagtccttctgtcctctatacatcctcacatcggagtctgaattctgctcagagacaccagcagagcaaattaggttcagaatcgaagacaaggaagcatgagtgtgaagtaagatgaacagacttttttcctctggttaaagttgaaagagatggaaagtgtttttggcggtaagaatccaactctttctgttctgtttcacctcctccgaagtaacatagagaatgagccaccatgtcgatttcaaaccgtaaatggagagcaaggtacttagaagaagaagaagaagccgcctcctcctgcaccggagaatcagccttattgtccaagattaaggaagcatattttggaccgaggagatgtagatcaagtggtgcaacgtaagatccactgccccgtaatctcttcacgagcaatgccgcagtttcttgtatcctcgggacaaagtttagcgcatgaaagttacatctgcaccgaagcctctacttccaaaaaggtttagataaagaagctataatcagagatatatagaagcgcgtagagtaaaaaaaatgtctacctgtaannnnnnnnnnnnnnnnnnnnnnnntaagcggtttccgaatccgacaaaatggattactctgttcttgagtagtatagggagaatgtgtgtcatataaaagtctggtttggcttctttcatcacttctatatctgtcaccttaagaggtaaaagtgacaaaacatgaacaaaaagagaagaaagatgagactgttcgcgtcaagatttggggagaaatgtataactcacgacgctaccgatttcttcaagattaagagattgaagctcttttggtagctcctttactatccgaatatcgggcgacaagtactccataaaatgttcctcttggtagatatctccaaactgactatatatgaagtattaattaaagttcaatacatcgttacaaatgtaaaaacctcaaaaatggctagaaaatgagagatagaggacggagagcttacaatagttaccttgcatctgtccaaacgtcacttaacatgaatttgggaatgacgagagccgcattgagcaatcgagctacaacaacaatgttacatacctatgacgaaatccattggttatagacttatagtcactagagaatttgaagataaatntgaggacatggagaagaaactacagcaactctttgtgataatcccttcgttgcagtaccatat

SEQ ID NO: 26743 - DNA, 3777 bp, Arabidopsis thaliana landsberg
cgcgtcgtcttggcgtaggaagtgaacaaatttagaacgtatagaagatgggatgcgaacaggacggtacttgttgtcgagccacacagctattccttttgcctccaatataggctgttttatatatatcaatcaaaagcattcgaaattagttagtaattcacaagttagaaacttatcaacgaaaacacgaaggcttagtgagaatattaacctcttgatttggaagtttaaagatgaaatgatcgaagtaaatacgcgcagcagatgtccccgatatcctcgctttcaccacgaatttgtctccgctctgttcaaagagatgaaatgaatatatggcataatgtgaggacaggaactaagttgaggaagaagagggacgttattattacacgtaaaggtgaaaggaacttcattgtcaactctgaaattgctaaggcttccccagaacgtgctacttcgtcgcagttgataccgatactctctagaaactcatgtcgacctttagtagaaatatattaacaagcaacagaatgagatatatcttataagtaacacacactgagccataccacaaagccatccacttcccaatatatggctgaagatgaatgctaaaagcaagactctaaacttaacgaacaagatcttaacacatttcattcttccagtcacattcagaaaatgtatgaaaaggtttccaactagagtcagaaaaggagtagctgactattgatcatgcagtccaggttctgtcaaagaatacgatctgatgaaactactctttcacgatagaaattgacacaatctgaagcagcaacatagcaaccgaattactagcaacatcacctcaagttctagtcagccacattcaaaaaattgtccaattagactcagaaaaggagtaactattgatcaagcattccagattctgtcaagaacacgatctgaaacttcctctttaacaatagaaaagtacacaatctgaagcagcaacatcacaaactaactgaattactagcaagactctaaacttactagcaaaatcttgtcacatttaatccaaagccctaaattctactcaaccacattcacaaaaaaagtccctgtcaaactaagtaaagaagtaactttgatcatgcagagttcagattttatcaactaaattcacaaatgtatgaacactttcaacaatcagaagcagcaacattgaaaactaaccgtgttgacagtagtttgcgtaaacagcattgttcacaacaccaaactgatccaattcataatcacgaactttgagttcaacctcatggaactcactcattctgtacaatagcgaagattttcaatcagaatcattagatcactgaatcagatatagaatctcgacaacactgaatccgaaaactcaatttcacaacgacggaatccgatttcgttagagatgcaaaatatgaaagtagagagatgtgtataccctttgcctcctttgagatcgaagaatgctagaggcttgaaggtttttacgctccggagaggaatactaagtggtcgtctccatgaattgagaaacactaccgcaggcatagccggagtcgccgtgccggtaacctgaagaaacatttctgggttttcgagagaaacgatgaacttttttgaaatcacggtttattttgaaatgctaaaccaatcaacttggttaactatacgataccaatattttggaccggtttaatgcgtgtatacgttttaaatcttatttgatgttgaaaagtaacttatttgatgttaacaagtaactaaactgatgtgatatttgatattaaaaaataattgatgtcaatctcaatagactaacataagtatgttggttatattctttaaggctgctgaaaataatttaattcctcagtgttctaactattggttagattgttttgctaggattatgaattttgttagttcacatgtagtctcataccctgaatttgataaccaaacaatatttttagtataaacgtatcgttaatgaaaagatggtaacaagttaaaaaaattgaataacatatttgattacttcgttcaatgtttgagtgtccaaaggagaaagacagttttattattacataatagttaatagacaaccatgcataattatattttggcataaactcaaagtcgagaagtaaagtgatcaaccaaagtttaatcttcacgatataacattggcctcatcctcagcaaccaaacctttagtgatggctcttaggttaggcttaaggatctttccatttccatttttgggcagttcttccaaaaataccacctttctcggacacataaaatgtggcagattctcacggcaatagtcaatcaattctttctctctggccacaaatttatattcatcatcttctttattagtctcgcccttttgtaacacaatgaatgcacacggggtttcaccccacacacggtgaggcatggccacgacggcaacctcaaacactcttgggtgcttgtaaagaatattctcgacttcaacactgctgatattttcgccacccgatattattatatctttggaccgatctttgatctcgatgtgtccatcaggatggattacacctacgtctccagtgttgagccatccgtgtttaaacgcttcaaatgtagctttggaattctttagataccctttcattatgttgtttcctttcatgacaatttctcccattgtcttcccatcgtgtgggacactctcttgagtttcgttgtacttcacatcaacttcagctacgcttaatatgcctagcccttgccttgctttcagctccatttgttgattctctgttaatctgtttcaattgagtaatagtttttgtcatatcaatcttaataatattgtaaatgttgtaagtgaaaaaaaaatcatcactattaatttgttttgagaaaaaatatccatttcaataagttcaattactttttggtaaatgttaacgaaatgtgaaatataatactgtatatataagtataaacctgttccactcgtcttgccactcacaaaagagagctggaccagtggcctccgtcaggccatagacatgcagaacttgaaaccctaaccgctgaactttcttgacaagagcagcggggagaggtgaacctccggtcatcagatggaccggtccagacctatgtgacatgtcaagcggatttccttgtaggagaatgttgaagaccgtaggaacacaacacatatgtgtcacactatgcatttctatgttctcatagatctccggggcactcacgtggctcatacacacattggtgcccccgcgcgctgctgttgcccatgtaaacgtccatccattgcaatgaaacataggcaaaaatccaaaggtagacagggcaggtactcatttcccaaccaataattacacctaacgaggtcaaatatgctcctcgatggctaatcaccacaccttttgggtcagccgtggtacctgacgtgtagtttagggagatgggatcttgctcattttgtatacggaacatattttcaaccaacggagacgtaggctctcccatctgaatgagactctcgtagtctaactcctcggatgaaacccttttagcggaattgtactcgtcaataaatatgaccagcaagtttagttgtaagtcgtcacatgatagtagatggaggatttctcgagccaagggctcaaagtttcggtgtatgaataatatcttgggctgggcgtggcggagaat

SEQ ID NO: 26744 - DNA, 874 bp, Arabidopsis thaliana landsberg
cacgccttcgtactcccctcatgcattgcgcccttccaccttccgagcccccggatgggagcgcccgtgttgctttcgtcttgctgctgttggaggagcgcaactttgcggaagttggcacctttcagccatcgctcggcttcaaggattttcatcaggcagcccggctgcattccctcaccgatggtcacccaagatggtgaccaccagttcgatggtggggagaagcaagccgggttgcggcctctgccctgccctcagcttcaaggatcttcatcatccttgctagggaggagggcgaggcgagccggggcctgccttcgcgtgggccggcgtcccgcttcttcctccagattctgggggtggaaaccatcctccagctctgcgaaggaggcgccctctagccatgccggggaaggcgaactgttgcttcccagctagggtgcaacattccgtcctttgtccgggcgatggtggctagccgcaccggggggtctccctacacgtcgtacgccgcgagggcggtactcgtgttctgggacgatcccattctcgtttttgtggcgaggacgggagtgaggacctgccggtgcgctttggggcggccggcgcccgctggtgcggtgttggtgggcaggtggacgtcaccgtcggtgctgaggtggtggcggctggagaagtcttttccactgacgagactgtcagcgccacccgcagaccgacctctggctctttggctttaatatctggttcgtgtcccttgagtggggacgtgaacgagagccttccggtggctgcgtccgtcctgggaccatggctgctgctgtggaggttgtctcgcgagtcgcccagagtctgtcgtctcgcaggctct

SEQ ID NO: 26745 - DNA, 1626 bp, Arabidopsis thaliana landsberg
  unsure (1)..(1626): unsure at all n locations
aatcggaatagacaaccactgcttgccgcctaggcgtcgtttaggcagccgtctaaaatgattttttgaacactgaaaatatataatatatttttaagtattaaaattaaaatttgtatacaaaactaatattaaagataatattaaattacgttatttatttttttaaatctaaaaaattcataaactccaatttggactaacgttaccaacagtccaacacaatccacaacgacgtcgtttaatgtagacaaccaacctaatttgctttctctccatttaaacgacgtcgtagtaacatagtaaaaccggcaaaatatcaaaccggtgacatacggcggagatggagatacgcgcggcggaggatatcgaaatccgcacagatctatttccgccactctctccactcgcttcctctctctacgactcattcctctcctctcactgctcctcctgcttctcccttctccccccatctccgccgcaacctctctactgctccgccgcatgctccctcaccgattcattcaccaattcccctcaattcccaccggagataacaccaatcctcccctccgacatccgtacatctctccatctcctcaattccaccgccgtcgacacttcctcatcgccccaccgtcttaataaccttctcactaatcaccacctcctcatggctgatccttccatctccgtcgctatccaccacgccgccaattacatagccaccgttattagatctaaccagaaaaacacagagttggaagaagcagctatatgtgttgtgctaacaaacgccgttgaggtgcacgatagcaacggactagctcttggaatcgctctttatgattttagattctcttggattaaccatagttgctctccaaactcttgttaccgtttcgtcaacaacacgaccccgtatcatgatgttcatgtcaccaacacacaaacagcgtcaatgttagaattgcaggaacaagttcgtcgtactagtttgaacagtggtaatggaaatggaccaaaggcgagcgttagacgcatcaagaggattaatagtggctaagacatcactgaatctcatattgacttacttcaacccaaggtatggtctgagtccaatgactcgtgctttggaggaatcatcactgtctctagattgttgatctgaacaatagtgtattcctttttaaccatttagggagtgagacagtcagatttgtggtcgaaatatcgatttacgtgtaactgtggacgatgtgtagcttcacctccagcttatgtggactctattttagaggtatgaattgtggctgttgtttggtgtagttgctcattattagtctcatatcaaaagctagtgaagtttcagtttattaatgactgagtttgagttagttgtgtgttttaaaatagttaacgtatatgatgcatccatttagggagttcttgcgttggagagtgaaaagacaaccgttggtcactttcatggaactactaacaaagaagaagcagtgggaaagatgactgattatatccaagaagccatagatgattttttatcggcaatatngancttaaacttgttgtgagatgatganagtgttctgcatcacggcattc

SEQ ID NO: 26746 - DNA, 1650 bp, Arabidopsis thaliana landsberg
aggaaagcagctcttctagtgacgatgattcagattctgaggagtacgaagtggaaaagctagttgatatatgctttggtgatcctgacaagacaggaaaaaatggcctgaagtttaaggtatgccctgttgcccttatattgttgatctaaccttacttcttagggttttaagagtgttcttttcagcttttataacttccaagacatatttttgtaattctttgctagctttatgacgttttagttttctgaagaggaattatacccatgactttttcattaggtgcactggaaaggatacagaagcgacgaagatacatgggaactagcagaggaattgaggtatatgcttcaaaacaatgttaaaaagagattctgttgttatctggaactaattaattttgtttggaattttagtaactgtcaagatgccattcgggagtttgtaactagtggatttaagtccaagatcttgccacttcctgtaagaacttgcttctgaattgaattcttgatctttgaaagtcgtatgattgtaccatcaacatctatttgccatgaacatctatttgcactgaaaataaaaaaatcttgtaaatgattgtaactagggtcgtgttggtgtgatatgtgggggacctccatgccaaggaattagtggctataatcggcacaggaatgttgattctccattgaatgatgaaaggaatcagcaaattatagttttcatggacatagtggagtatctgaaaccctcatatgtgttgatggaaaatgttgtggatattctgcgtatggacaaaggctctcttgggcgatacgctttgagccgtcttgtgaacatgcgataccaagcaaggttaggtatcatgacagctggttgctatggtctttcccaatttcgatccagagttttcatgtggggagctgttccaaacaaggtgaatttataggcgtattaacttcctcgaggtgacggtttcatacttacactatttggtatttcatttcagaacctacctccgtttccgcttccaacacatgatgttattgtcagatatgggcttccacttgagttcgaggtaataaaattgtaaattggtacttatcttatactcttttcattaagcctgtcgttcttccaacttaagccaccttggctttcatgtttcagaggaatgtagttgcttatgctgaaggccaacccagaaaaacttgaaaaagctcttgttctgaaagatgcaatatcagatcttcctcatgtttgtttcatttccactagatccatctgcaattcagggttaatatatatttataatttcttttcacatatctaggtatcggccgatgaagtccgggaggatttgccttatgaaagtctccctaaaacagattttcagagatgcattagatcaaccaagcgtggtaagttggatctggattctgtagttacggtctctttcacagcaattgtctgataagccatgtccacttgcatatttcatatgtaactcacgcgttagtgttttgctatgtcagatttgtcaggctctgcagttgataactgtaacttaaggacagtgctactgcatgttcacaggccgttcggtgtaaatggaggcgtattatgaaagagctccccttttcc

SEQ ID NO: 26747 - DNA, 2116 bp, Arabidopsis thaliana landsberg
tttttcataatattgtaaagttttccaaatcatctctttattttggtgatatttttcatgattttattttgtgaacaaaagtgtagaaaattataaaccaataatataataatttaattcaccgggaatcatagattctttattttaattgaataacataaaaaatttactgactttataaaagtatgaatctaataacttcaaatttatgaagattttatattactttttaaaaatcttaaactaataacatcaaactttaacaaatttttaaaacatcttcactgaataacaacagattctaaataatattttaagtcagttaaactcaatttaaatcacaaaccactaacatttttcttcccgtccttttgaatttgtgcttggaaagggtgacatgtcacattcttgtgacgctcctacctcatgaaatgataattcaaaaacttcatcatccattagcgtcataatctaagatccgttcgggtattttaagacttcggattcggttcggattcgcgatcgggtttttcgggttcggattcgggtaaacccggagtatccaaaactcaaaattttgtatcaaaatatttttaaaatacttcaaaatacacaaaatttttaaagaacttgagtattttctatcctaatctatctaaaagtaggtaaaatacccaaactatacaacatgtcttagaatccaaatattttagacatttaagttgttgtaaatgtgattattactaatgaattattttctatgtatatatatttcggatatgttcgggtacttgatcgagtttttaggttcggatcgggttcgggttttgaagtttaggatccgttcgggtattttaaagttttgggttcgaattcgaatcgggttttttgggtcaggttcggtttggttcttcgggtttggctattttgcctaggcctagtcaaaatggagatttggtaccactctttgttatgttatagtgatcagaataactataatagtatggtataacacatttactaattaatgtaaacacaccaatttggaatataagtaactaatgtttgcttacttgtagaatgaagaaacctgcccaagtggtgatactacccataaccgctagagttccggtaacccaattctgatcagtggtctcggaggaggtgccagaggagccgccgtgtaaagagctatgagcagtcttaaagagctcaatggctggacctttgtacaacgtcataaccattgctcctcccacagttattgctgttccaatcacttttgcaagacttcgtgtcttcttcaaatttacagtttctatcctaattaaatttaagcaatttttgaattaataactataaaattatgacgtaaaaaatatagagaatgattaatatgattggtctttggtaattagaagcaaacttacctgaaaatgacagccattatgaaggtaatggcgggaagtgcattaacaaaggcagaactatacgttgctgacgtggctttcattcctatgtagtacaagttctggtccaaaagtggtctgaatagacaaacaaccaacatttacaaatttattaatcatatgctttaatgttgcatcatcttctgcttaaccaatcatattctttctttttttttcgttatcattctcttcaagttaaattaaaagataaaggaaaacaaagctatgagaagacggcaatgggtgatgatctaatcaagaatattcacgactagaatctttttttatttttgccaaacgactagaatcttttcgtatagattcttcgtatataatattcttttatatggtatattttacctttatatgatttaaggattcatcgatatgaaaagatttgttagaattattgaattaattcttatatcgaaatagtttattactctggtttggttccctctaatgaagctgtacacattaaatctttattttgatccttgtttgtttgtatctaagaaattcttaacgcaaacgctgcatctgatgtaacacagttttttcgaatacattttaaattttttattaaaagaaaaaagtttattaaaagaaaatagtttattactaatcgatttctaagaactttcctt

SEQ ID NO: 26748 - DNA, 2169 bp, Arabidopsis thaliana landsberg
gaatagttttttgcatatgataattacaataatttttagatttcattttaaaagatattttgtatatggattggccagatctagagttcgtgctggttctatattacttcggtgtatagggttagttagttctattgatttttggcgtgtgtttattagaggctcatgtatgacacattgacacttaatatacatcggaaaatcttaaaatcctaactggactagctattagggcctaatccataacatgtttagttcgttattcagagagaaaagcatgttttgtttctgcatgtaacatccatatgatagtagctatagtaggcccagcatttgtttcagtccatcaaatatttacaagtaaaaacattagagtggtctaatatgatgtgataattggtacctccggaggtggatgcaccttgtaaaagaggataggcagatgcacccattaatgtttcacaatgccatgtgaaatgtgaacaattttgataatatacccaaagttatgaacaattatgcctccattgtttttgaactaaagtacaaaaagcaaaccaaaacaaattaaacccattctttaaaggaaattagtacagaagcccttaaacccagttttatttctcttgtaatcctttttaagtgaagccacacacattttaactaaactgatcgtccaacctatgatttttttttctttttctaatcatgtttcagccatttacttcgcacgattccacaatttatgccaaatatcgcaataacaatttttgaaatattttttttctagaaaatcgtttgttactcaaaatttacgaaactttaggggttctatatatattatgtgatctacataaaatatcaagctttaacctttaggggttctaaactctaaaaataaaaacatacagcctagatttatggaggcctatggcaaattgttatacatgtaaactttcttttgtactgactacttatttattttattttattttaacatgtatattattttatgatttctaattatcgttagaaacgttattctattattttgacaaaatatgattttcaagcatcttaaaatatttataggaatggtattttcacaaaattacaactttataacatctttctaatgtaaaagtaatctattttagtggaaaaagtcttagtgtaaccaaaaaaatcaaataatttgtataaaaaatgtggcgttttaagtagtagaattttttttgtggcctagctatggctatttccctttatgttgtatggtatgcacggctctactcgttgacaattgacaaatgatcctcaaaaacaatttgatgccgatgcatgggctttgattgctactctaatgggcttttgtacgcccattaatctccacgactcggtttctcgttattagtctattttataaaaacagaaaatgtacggctgagattgttaaatgtatgatccaacagctgaaaatcacttatatccaaaaagatgtgagaggaacattctgaatttctgataatctgtacccatcgcacaaaaacctcaaatacagaaattttttttgagacatcccaaaatttcactggttttgtttttcttagaacaaaagaaaaaagcgagttgcttttgaccaccagcttttgtgtttcttgtcttaaagatcagatttggctagggttctttcgtgaaatttgtcatctcttctttcagaaacttatctggattctagccaatttctgttgtgactttgacattatcttctccagaaggaggtgaaaagagaatttgtgggtcctggtaagttccgaattcgtatttgattgagctctgagtttcaagggtttgtgttggatcaatctttagattcgttggtgaaagcgtttaaatcgacgaaaaaagtgatgctttggaagatatgatcttctctatctctggttattactgggtttcgagattcttgtgcttaagatgttacctgtgagagaaagtcttcagaaacaagttaagattttgattggattagggaatttagggtttgagggttatagaggattgtacactagatttactaaccctaacgggtttttagaaccaactagctctgatttgctgttgattaacgaaaggaggaatctttctgctataggtgctgtttctcgaact

SEQ ID NO: 26749 - DNA, 650 bp, Arabidopsis thaliana landsberg
ggtttctgatttgggattttgtagcggcaaaacgggagtaagagggaggagcgaagctgagattggtggtggtagccatgattggtcaagcgagcttagataattttaaggagaagccattatttaatttgttcattcaaaaatcaaataaatttgttcattcaattggtgcgttttttccttgtattgggcctctggccgtatgggctttggccttgtaatggtttcaaataaaatcctaaaccgagagaatcaaatcctaaaccgaactggtacagtgaagaactaaacctataaatatatcaaaagtctgtgtgtttgtataaaacctaaagggtttggttggttcctttccctctctgaaaaaacctccgattatggccggatctctaggtcttacgccggagtccttgaaggcttctggccggatctccgagaagcttagccttcctatccttcagagccaaatcaagcgtgaaccagagggttacgaaacggaggtccatttgatttacaaacagttcagagcctccgtcgatctctttcagcaacaggcggctctcactttctcctccgtcggccccggcccttccgttgctaaggaactccgcgaccgagccatgtttctcgctcatgtctctccgttttat

SEQ ID NO: 26750 - DNA, 1833 bp, Arabidopsis thaliana landsberg
aaatcaaatgggaaatttataacaaaggtatccttgtgtattaaaaataaaagtgttgtagcagttacgtagctttcctgtttttgaggattcacggtacgtatatcaataataaggattttgtttctataaaaacaaaatctgatgtatattgacaaaaagtcaggtgatgatacgtgaaataataaatatgtaggtaatggaaagtatactagaaatttctaagaatttaatacttttttcaatgatatgtgtgaactcgaatgcgtcttgaatctatgatatacaataaatgtattcttgtagatatttcaatataaaaaaagacacttgaagtctttagaaaaaagagtactaaaagttaaatccaaatggtttaaattgaacaaaatttcagcctctttgatttatatttctacgtttttttttcattttaaatgattttaaggttttttgcaattagtaaatcattaatgttaaatgtttttataatgaatattagtattcacctacctaacgaattattcgaccaaatgaaaaaaaaatagaagaatagaaaacaatattaaattttcaaaaaatctaataaatcgaaacaaatttatttttctcttaaacatcaattattatgaaatggagggaatgcaaatatatagtttggtttagttagctaagggagttactacatgtaaactgataactaggtaaaggtctatcataagttccaaaaaacaaagctaattaagatgcttttggttgatattttgtctgatacaagaacaagtgggagtatggaataagggcttgacaaaacaaacatacaacgaatagtttatccaaatctaaatcctcaaactgcaatattgtagttatactacaatacaattgaaaaaaaatgaaaacaagaagaagaattgtttagatattttggggcaatgaatattattgggaggagacaagaagagaaggaatggtagagagggaaattgccggcaactatcaaaacaggacggcacgcattgcgcccgagggggctcttcattgttgacttcactctcgtttatttttgtctttcttactaaatgatttgtttcttaattaatttgacatgtaaatacattaatttctttttacaatttcatctcgctatacttaaaagtgcataagataagatcgttgtgctcgttattccatacacaagtatcaaatttttttttctttcatctatttcaagtaatttatgataagtagattataaatgaaagaagaatagtgtgattaagtctcaaggtcaataaaatagcttttaaagagagaccggagactttatatcaattctctcctttagatatttcagagaatgaatataatttcggtgtgccaagtactcggatataggctagcatttttagtaccgatgttcggcttctctacaatataggctggtttttttacaagcattggtcggttttattcaggcataggcttgctttatcaacagtgttgccagactctcttcgtgcatggactagctttacaatgctttggccggcttctgttttggtgtttcatagttgggattttcattttgaagtcttgaatttatggtatgatgtagtgtggcatagtttgttgtctttgaccgcttctgcttgaggtatgcgttttaaatgttaatatgataccatcatgaccaacactaaaaaaagaggacttgagatataagattaaaagttataatttttttcttgccatgtaaatagtgtaagggtgtgacactatagtttcagtaatatggtgatgcatgcagagaaatttaaaataatgatgatt

SEQ ID NO: 26751 - DNA, 2330 bp, Arabidopsis thaliana landsberg
tttttactaactcgctttgacctgtcattactattattacatagttatctcatttttggtctttattgcttgaatcatgaaatcttcttataagagactttggtattacccacaaaacaacttaataattttaccttttgatattatataatccacacaactaacatgaactaactgctgacataatcgtcttaacattaaaaaaaaatgaaatgaatgcatgcattgcatataaatgtacaaatgttggcttgatctcttgacccctacctaagacgtaagaaggtattttagagctgtgaaatgtgtcaagctgagtctcggagtgaaaagggtccggtttagtgaagccaagtaagcaaagccccttgtttttgacggacattatatctcctcctcttctcttctataaattgggcacctttttccaattttacgcacagtcacggagatagatagtaagagagagctatggcggaggagcacttcgacgttctgactaaatccggtgagaagaccggtgtgtccaaacccaggcatgtttattgttcatgtgttttcccttttcttgtttgatgaaaagcactcggaaatcgaatttcgacgctgagatgtttgcacattgaaattttacgtctttgttgaaaaaagtcatccttttcttaggtttggggtttgatttgatgcttcgttgaccctatcaactacacaacaaactcgaccaaagagttttaggtcaatcggagaaatttcaattcgattttggttttaaaaaaagtttaagctgaaaaatttgggatttttttcttcatgatcagctcttctttggagttgtttttccagtgaattaacctcaattcgtctctgtttggaaccatgtcattgtaggggagaggttcacagagatggagattaccatcgtgctgttcatgtctggatttttgtggagactactcaacagctacttctccaacttcgatctgatgataaagattcttggcctggtcaatgggacatctctagtgctggccatatatcagctggtgatacatcgcttctatctgcacagtaagtcaatcccattctgctttcgttacttcttctttccgtttactaaagatttcaggatactttctgtaggcgggagcttgaggaagagcttggcgtaaaactcccaaaggatgcatttgaaaagatcttcgtttttctgcaggaatggtttgtctcttggcctatatgatacatgttctctgattctttcaagagacattatttgtagcttagtttgattggtatatcttgaagctaacttgctttcgcttatttaaataagcattgtaatttattactctcaacttgagaggtattcttaaagacagtgtgctgcttttcttttgtgtactttgacagtgtcacaaacgatggcaaattcataaataatgagttcaatgatgtgtatcttgttactattctgcatccaatcccattagaagcctttactcttcaagtgagtttttttccttcacgaagctgtaagtttaagtagtataaatcacttggattcttaagtaacatttttttatgtatgtattagaaagaggaagtctctgctgtaaagtacgtaccttacgaagaatacagaaactttctgtctaaggaagatcctgcttatgtgccatatgatgttaatggagagtatggaaaactatttgacataatcagacagaggtacagtatctctatttcggtttttctcctagctattcctttttttttcttgttcatatctaatatcttccatggtaccaaatgaaaacttttatgagtcaactattgctgaggtacatattttatatagatatgttttcttacatagagtgtttcttctgaatttgttgaaggtgccaagtgaacactgaggcccgtagtttatctctgcagaagcaactccagagatattctccagtcaccctcgaagccaaggtattaatttgttacatcttttcttgtgatttctttgtttcatatgcaccaaataaatcttattttgcaccgttccataaaagacattttgagacacctttcatttatatgcagttgacagaactttctgaagcagatcagaaagcgttgggtctaattgtgaaggctgcaaaaattatggacgatatattctatgagcaggttctgtggagtccgaaatttcttctttttttgaccgtgaacatgaaatctcagatcttaaactaaattagaaagttatcctttatcaggtttggaacagcaatccagccctaagagattggctgaaggatcatgccagtgcatca

SEQ ID NO: 26752 - DNA, 986 bp, Arabidopsis thaliana landsberg
agtcttttaatttacttccctttatacttaatttaatgtttcgtaggaatccataattctgctttgtattcaaagttccattttaattcttaactcaaatatacaattaattgaattataaccacgttcaacttaattgtttatcatgctcatgagttagatgtaaccaacttggagtacaattgtcaaagaggcacatctacctacaagacaaccaattctatttgttttcatgaatgttgttttctcttatttaattaccaaagattgaagaattagtagcaattctagattcttggcccaagcatatgtggtctagtggtaggaaaagctttggtgaaaggtgaaatttctagacccaagtttgatcctcagaaatgtatgcggcctaactacctcctaccagtgtggtggtcttttggagagaaatcgactctaaagcatttcggtgcggttttaccgggactaaccggatcagccgatagagtatatataaaaaaaaaaaagagaaaactcctaaaaattaaaacacttaacccaaacacttattgaaacagcaaaagttaaaacactaaacccaaacactgattgaaacagtaagagaaagcccaattgaagatctagccagctgcatcatggtaacatgggaactagattaagcaatagatggatatcaatactattgtatatcgggctaaaatcagtgttggtttatatgcggtatctagatgctttttcagacttttcaccaccgatcttatcgatccacaccaaacacagcctacaagctccatcacttgcgtcacttggttctagaaatccatataccttcgtccatgctatgttttcgaaggtatgatgggtctacagaatcaagtgaggcagtgacaccatgcagggtcgggtgggaatgcgtttccaaggtaaacacagccgcaggataaatgcaaagagaaaaaataaaaaagacaggagaggcggtttct

SEQ ID NO: 26753 - DNA, 1422 bp, Arabidopsis thaliana landsberg
taaaccgattcatctagtaagtccaaagtcacacaaacattaaacaatctaaacacacaacaatccaaaagaaaaaagaaaaaaaaaaaaaatggcttcaaattcagcacttctcatgaaaacaatcttcctcgtactcatttttgtctcttttgcaatctctccagcaacttcaactgcgccggaagaatgtggaagcgagtcagcgaacccgtgcgtcaacaaagctaaagctttgcctctcaaagtcatagcaatcttcgtaatcctcattgcaagcatgattggtgttggagctcctctctttagccgtaacgtttcgttcctccaaccagacggaaacatcttcactatcattaagtgtttcgcctccgggatcatccttggaaccggttttatgcacgttttacctgattctttcgaaatgttgtcatctatatgtcttgaagagaacccgtggcataaatttcctttctccggatttctcgctatgttatcgggtctaatcactctagccattgactccatggccacgagcctatacaccagcaagaacgcagttggtatcatgccccatggtcatggtcatggtcacggccccgcaaatgatgttaccttaccaataaaagaagatgattcgtcaaatgcacagctcttgcgataccgagtcattgccatggttcgtacgcacatatatacataccgaatatcattgtattttaaatgacatattaccgaatacataggtatatctaactttctacggatatataggtcttggaacttgggatcatagttcactcggtggtcattggattatctctaggagcaactagtgacacttgcaccattaaaggacttatagcagctctttgcttccatcaaatgttcgaaggcatgggtcttggcggttgtatcctccaggtaaccggaaactacatctatattgaggtgttttgagacaacaccataatcaatgtacatactaatacaaggaaatataaaagtactaataaccatattggtatatagctttgattattaatattcattattaatataatagtgccacattttgggtgacaaaaaaaaaaagaggtcggcccctttacataaacagcccattggcattttacaaaggcacaaatgacgacacaaatgtactgagtaataatttaccaagaatgtatgttggagaatcgttttgtcttacacatcaaccaattacaacagctatacaggtttcaggctacgagataatctacaaagatccacatttcgaaccaaggtagcgcaaatcgtcatcatcaagcgagagaatgaacttacgcatctcgtcatcataagaaaatcaacaaaatgataagacaagtcatgtatatttctggaacaaattaaatcaacaaaatcaacaaaagaggt

SEQ ID NO: 26754 - DNA, 2479 bp, Arabidopsis thaliana landsberg
  unsure (1)..(2479): unsure at all n locations
atttgggttgtggtgtctaaagaggtgaatgtagagaatattctagatgaaatcgctcagaaagttcatattagtggagagaagtgggacacaaaatataaataccaaaagggcgtttatttatacaatttcttaaggaaaaagagatttgtattgtttttagatgacatatgggagaaggttaatttagttgagatcggagtcccctttccaccaataaaaaacaaatgtaaagtggtattcaccactcggtccttagatgtatgcacaagcatgggggttgaaaaaccaatggaagtccaatgcctggcggacaacgacgcatatgatttgttccaaaaaaaggttggacaaataacactaggaagcgacccagagatccgtgaactttctagagtagttgctaaaaaatgttgtggtttaccattggcgctcaatgtggtaagtgagaccatgtcatgcaagaggacggtacaagaatggcgtcatgcgatatatgttttaaattcatatgctgcaaagttttctggcatggacgataagatccttccgcttttaaagtatagctatgatagtctcaaaggggaggatgtcaaaatgtgtttgctatattgcgctttgtttccagaagatgctaaaataaggaaggagaatctgatagagtactggatatgcgaggaaattatagatggaagtgaaggtattgataaggctgagaaccaaggttatgagataattggtagtcttgttcgtgcatcattgttgatggaagagaatcaagaaacggtgaagatgcannnnnnnnnnnnnnnnnnggcattgtggatagcatctgattttggaaagcaaaaagaaaactttatagtgcaagccggcttacagtcgaggaacatacctgagattgagaagtggaaagttgcgagaagggtatcattgatgtttaactacattgaaactatacgtgatgctcctgaatctccccaacttataactttgctcctccgaaagaactacttggcgcatatctcaagcagcttctttcggttgatgccaatgctagttgttcttgatctatcaatgaacaaggatctcagacatttgccagacgaaatatcagaatgtgtctcattgcagtatctgagcttatcacgtacaaggataaggatttggcctgctggtttagtagagttgaggaaacttttatacctgaatttggaatacacaaggatggtagagagtctctgtggcatatcaggtttaacaagtttgaaagtgttgagattatttgtttccggtttccccgaagatccctgtgttttgaacgagttgcagcttttggaaaacttgcaaactttaaccataactcttggtcttgcctctattttggaacaattccttagcaaccagaggttggcaagctgtacacgagctctgcgcatcgagaatcttaatccgcaatcatctgaaatctcatttgttgctactatggacagtcttcaagagcttcattttgcagactctgacatttcggagatcaaggtaaagaggaaggagacggttttacctctgcaaatcccaaccactaccacattcttcccaaacctctcgcaagtgtctttagaattctgcaaaggattgagggatttgacgtggctgatctttgctccaaatcttacggttctacgagtaatttcagcaagtcacctggaagaagtaataaacaaagagaaagctgagcagcaaaaccttattcccttccaagaactaaaagagttgcggctagaaaatgttaagatgctaaaacgcatccaccggggtcccctgccatttccctgtttacagaaaatcttggttaatggatgctcacagctgagaaaacttccactcaatttcacgagtgtcccaagaggtgatcttgtcatagaggcacataaaaaatggatagaaatccttgaatgggaagatgaagccaccaaagcccgtttcttgccttcacttaaggttttttctctcgcatttatctgccaaaacttctatttaattattcctttgaatcttactctcttttttggatgttttaggcatttccggagaacatcgacactgatggctatgagatttccattccgagtccatgacttcttgttgctgatattgagtgacttaattattaagacataagtgttattgctccaactcaacatatgttattaaattcactttcattaagtatggggttcaagttgtttcaaccatatcagatggttcttgaaacaacttcaaccaaataaatattccgggaaataaggaaaacgaagtacaacaacatgacccttcgaaatcagagctcaaagaaatttcctaattcaagtcggagcacagatgaatctaccttaacagctgtgttcttaagtttaggaacatcgtgtggaaaaatcagttatcggcatccataccccgagaagccgatcataaaacg

SEQ ID NO: 26755 - DNA, 1413 bp, Arabidopsis thaliana landsberg
  unsure (1)..(1413): unsure at all n locations
aatgctacatgacaaaaaatatcatccaattctcaaattttctctcaatcacaagaaagtatcatcctttaccttatttactagcccagcactactgagtttagtattaaacccaaggccaaacacttcactaaatcctttctggtgatggtcataacgttcactctgaggatcatacacacctccaacatcaagtgccgcatcaagcttctccaaaaccttatataaccacatcacaaaattactaactaatacagagttgatgcaaaatcgcacactcaaaacaaattactgcacaaattcatagctacacacacaaaaattcaagaattttacataaaaatcaaactaaattaaccatttctcgagaatttcgaaaaaaaatccaaaattgaacccaaagaagggaactttgcacacagagaaactcaaatacagggtaaattgaacaaagggtacctgatgatctctggttcggacgatttgagcatcggagaatctattggaacgacgaaggatgaagcaagctaaagcttcgtcgcagtggaatgttccattatgggtcccaacacgtttcgtagagaaactagctcggaagtttgaagaacgtttgagaaacagagaacgattccagattctgctgcaacagagacctcttgacccaaacatggctaagagagagaagaagaagctcttctacaactaaaccctcgacgtcgcgggtttaagcttgacattataacgccgtcgtttcgtcaactttgggatttgataaaacgacgccgtatgtgttttctttgtgaaagactaaaatgacgccgtttgaattttacatttttggaattattttcttagggaatcttctaatagagttgatgatctttggttgacctaccaaatannnnnnnnnnnnnnnnnnnnnnnnnnnnnnnnnnnnnnnntcaaaattctgtttatatcatattaaagtgatttcatgtaccaaatgtattgttttaatcgtgggaccttaagttataatcatagaaaactcaggatcaaatccaaatgacaatacaacaataaaccaattttttatcataatggcataaacactctcactggggggtaagtttgtgcataacagagttattaacatgacaaaatagtactattaaaggaatgcgacccacattactttggaaagagcttcaaaccaaaggaattgagaaatgtggtctataagcaataacatcattgtcttcaaccaaatcaccaaacatattttcatgatcattcttcttgtcaaactaatctcgaaaccgcgatcattttaaacccgatcaatgcaggatactaaaaaaaaaaaaacaaatcttaaaatgtcaacatcataagattgatgatgaaggttaactaacaactacgttttgg

SEQ ID NO: 26756 - DNA, 2254 bp, Arabidopsis thaliana landsberg
attctcgcagctcgagtcactcaccgttccgcctcgtaggctgcttctccatccgctagtatgctgcttctccatcctcctcgtcatggaattctttatcaagtgttctactcggttgtggcggaaccagaggctcgagttgtcgctggaaccgatgaatcttagttcggcggaacaatcaaccaaagtagacgttttatcttgttcagcagcagctacaactcggttagcttttgtcactattcttctggtttggcttcttagcatcatctccaatctgccgctgttgccattgaacaacacgaagaaggagctaaacctaatgttgctttgtctctctcttaatgggcctagcccaagaagtttcttctttccctgaagcccaagacgaatcctatctcagcccaagcttaaactaatgggcttaagcctttattctttttggtcttagtttgatctctcatttctcttgcttagtctaatgctagaactattctattcgttcacggaaggcaatggacacctttttgtttcaatagcaatggttttagcttggtcttgtcattatcattctcgaaacctattagatagattttttcgattgatttttgttggaagacttttttcctcccattgcaatatgcctgttagagtaaataagtccgacattatgatcccgcctctatggagtagggattaccgacgctttttcaactctctttccccattacctctgattactgagctctatcacgcgaccatcatttgtttggataatttgcaaacttttgttagtttgggaagtcacggcattatgaccccatctccaagaggtggttaccgtatctccttcaaattgttctaccttttagcatctcccgtggagcaccttctcaaaggctcatatgcattgtttgcaataaccgtctatgaccacaagttggtcgaagatctcgcgaagcccgtcttcattgtcgaatccgccaagggctcaatagatttttcaaaccttgtaaacttttttaaaagtgaacacctctttgcaaaactcatgaaacctatatctttatttccttgttctatcctatttgtaatttgtatgaacttccctcttttgaggcttaagtgaatggaaattattgtttgacaaaaaaaaaagctatgatttaggcattagctttagagtctatttgttatttcgagagtcttttctagtctttttcaggttattacatgtttgggattcatttggagataatggagcattctggaggaaaacggaaaatatatgctgctaaaaaaatcctgagactaaaaaccgcgtaggtgtcaaacaacaccacccctggtgtcgagcgacaccaatacctgacggcacttcaaagacgaaacttattgatattttgaagatttccaaatccggctcagaactttgtactatttttaatcaattcccatcacgtttttaagacatatatagtttttaggtcaatgtttagaccctaagcttggagaggctattctccttttttcttttgttcttgggagccaaaaccttgtggagactccattttgagaagatctttctaaattgtattctcttatcgtttcttactttgatttctactttatacatgttttgttctttcataatcatgtctaagtaggtgtcttggttggtttagggattctcaattagagatttggatgaattagtagatcgaaaacccagttaagataatatatttagaattcttcatcttagattgttcttaatgctagttttagagtaactaactagaacttgattttaggataataggtatacccaccataggtatctattactgaaactatcttagatgagcctagtatttaaatgcgtgctagcgtcgattacttaggtgaacttatcaaacctgattataatgcttgcttagttctaaggatttacaagagagctgggatcaatactattaagcatagtgagtagcacggcacaccactggttacattatattagtgatttgtgttctagaatggttcgataatattcgtaatttacttctagatctactattctgatattttcagagaattttcctaaacccgatatctgcatcatttgaatatacacccaaactcgtttattgctttcttgtcttttattttataatctatttgtttagcttaattcaaaaccttagtctattatgtgaactgagagttttgtggaattcgacccgaaagctta

SEQ ID NO: 26757 - DNA, 1368 bp, Arabidopsis thaliana landsberg
gtccaaatcgatctcattttcatttaaccatacaatatttttggccaaagatttataaagtcaacacaaaatgcaaaagtttgacattatttttgtaaactatatagtatcatcgatttagattttcgaaccttttttttgaccaaaaaaaaacttacttaacgattaacaatttgaacttttgtgaattttatttataggagttttgaataagtcatgtacatatgtggaaatgaataagttttatatgtagtgtatatggcattttcgcaaaagcatagtatacacacacacacacattaaatgtggttgatacggctgataaagaaaatagttgtgattgatacgtatatttatgattgttttctcaaacaaagataaaaaaaaaaaaacttcataaagaacaagaccaatcaatcatgtaagttactaacagagaattatgatgttgatgataaattttgaaaatgatcgaacaggagttatggatgatacttttttataatgtgaaattcaaaggaccatgccgaatgaaaaatgattgtatcgcgacttgtggaggcaaacctagtcgtgctttgtgtattcctaatcctagtgtagacactcttcaatgttgttgttgtctttacaactaattttattggaattcttagtttctactattgaaataaaaatgttctaccaatatattattcaatcgtgccatataatactttatcatatcttcgtctttaaacatgaataaaatttcatgataatttttttttctttttatgtatgatcatgtaaatgttggtatatagggtgaatgtgaatgtgatttttgttgttttcaaaattctctaaccaaaataaagagttttcaatttgaccaacaaaaacataacaggagacactgagtatctgattatgatataaacagagaaagagagtaatagggcattgagataatgaaatgggtaaatgattgtttcacaccaaagaaatatgtacaaaaaccatgacctgaagagaagtaccaaacacattcacacaccagacttaaaccattacattacatccatgtttttcgaccccaaagaagctactcttgttcttatcgtcatcatcaaagtaattcacctttttgttttgatttaacggtcgttttgggcgctggctcggatgaatgaatcccgccgctgtcccccgacaaatgcttgttttagtcgagagattggccccatcaatcttccagctttctgcaaccaaagagtgttgttacatagttaagactcacatcataccatggaggttcgaagaatagtgatcctaaactaaatacctcgtttccaatgcttgattcccacttttgctgcaaaatct

SEQ ID NO: 26758 - DNA, 1090 bp, Arabidopsis thaliana landsberg
gtgatttgtgtatgatttacggtttagatatgacgggcccaattttgggagctatcgactctaggcattttggtaccctctctctgagtcacagcgtcaacgttgaaggttgcaccgcacacgtcacctgagctgtccactctcggcactggcttcaactcattttttgggtgctcaaagctcctcaatccacccgacgacgtaaagaaacaaccttcaaacaccaaaaaaaaagccatataatcatttagtgaactgctgctctacaacaatcacacaaaccaaccaaagtcttggatcagattatcaaaatcataatacctatctttctaataggtaaattctatttatcttaaaaagagtcaaaaacatttggagtaaagttggtacctttagggaaaggaccataagatttggcgcaacctttcttcaccatctcggtgttatcagaaaacacaaggtgcccttcagcatcggttccccagaagaacggcacactcccatcggcgtcctgcacattgacaacaagtaaatcaagttccgcgacttaaacattgagatcaagaatgtatagctgctggacttacagcagcagcaaagacagttttcttgacgctatcgaagagtataaacgcaaactttccatggaaatctctaacaactttgtccacagggtaaggacctcgatcacgtagtgtcctgtaagcctcaatcacaatgatggcctcgtttgtgattttgttcagtccatactgctgcttcagaaacgggaggttctcaatgtgtccttggaagagacagaaaatatcatccaccacagcaaataatctgtcaaattcaatagaaaccaaatcacattaccaaatatacaaaatcaagagccacagattactctaatccagtgtagatcttttcaatcatcttctatcgatgaaaaatagagttaaatagactctgtagttccgtattccttcaatagctcacaataatatcatcatcatcatctaatctactttgtagaacaataacactatcatcatcatctaatctactgtgtagaacaataacattatcatcatcatcttcatct

SEQ ID NO: 26759 - DNA, 2522 bp, Arabidopsis thaliana landsberg
tatttggtcattggttaaggcacaaatcttgaaggagatatatggtttcttttagactggagttctctagcaagaatgcaatcatactcttatatatcttatactgaatatcacacctcctcaaagaatgacagatcttcgatcaatcagtttatgctctgtgttgtataagatcattcaaaaatattgacgtcaaggttgaagaaacacttaccgaatatcgtatctccatcttaatctgcgtttgtgccaaaagattggtttctgataacatactggttgcgcatgagattgtgcataatctaagaaccaatgacagaatctctaaggaatatatatatggcagtcaaaacagatatgtccaaggcttatgatcgtgttgaatggccttttttggaatacattatgaaggctcttggatttaatatgcaatggatttcttggattatggcatgtgtgtctttagtgtcttattcagtccatatcaaaggacatgcgtttggttacatcaaaccagatagagggataagacaaggtgaccctctatcaccatcagtatttgtgttgtgtactgaagttttaattcatattcttaataaggctgaaagagcagataaaatttcaggaattaaatttcaggctgctggagtttcggtgaatcatttgttatttgctgatgatactctttttatgtgcaaagccacaaggagtgaatgtgaggagttaatgtgttgtttatccacttatggtgaggtatcaggtcagatgatcaatttgactaaaacaactgtgacttttggtgcaaatattgatgaagacactaacggggtgttattggtttgtgattttgaaagagttttaatgacttttaaaaaatatagaaagtagataaattaaagattttaaatgattactagagagttttgtataatttctatgattagtttttccaaaatcttataaagtttttctataatcttgtaaaatctccctgaatgtaattataaactttgatttgtgatttctccaaaattataacatatttccaaaatactgtataatattctcccctcttctatagaagttatctccaccaaagtgaaaatcacacgcataaacacaataactatcgtattcgtaagtaatgtttatgcgtgtgattttgttggatattttacttttcatgtgttggatattttgatacaataactatggtattctaatttctgcaacagatcacatatgagaatattatttcatgaaagctcaaggcaacacactattctccactctatatttagaatataaagaaagacatggattcatcgttagcacaatttataaaaacacatttgtttatatttattgtaacagcaacatacatttttagatgacattgcagaacacaaaatcacaaacaaacctaagaggctaaacatctaaacacatgtctatatttcaaatgagacttttctttcttatattttcacccaataagggtttctttcttcaagtttgcacactgaagtacacattgtatgtttcatctcttaagctaaacaatggcgataacacaaagttcctctgtgttccgctcatcacgaaactcattggattgtattgatgcattcctgtctttaaactaaagcttgctgcctctttaaacttctcatcagtcgcatccgaacgacattctagctttagttttgtcccttgctttagggtttgatcgctgtacacaaaacaaccttttttgctctctagtcttaacgaaacgcttcctagcttcccgtcaagtccagatactaaccgaaagctagaagctcctttgtcactaggagaagaagcttgaactgtgagggagctatcagttgcttgctttacaatcatgccagggaaatcaaacggctcaagcatgaccagccttccaattagtccttctggacccgaaatccgtggtttagaattatcagtcacgagcctgaaagtcgctgcaacggcatcttgtgtccctggctcgggtgatactctcattgtgatggtttggttgctatttgaaaacacgtaagatatgtttccagatttttgtgagagtgtgacaaggtaactgttttgagtttcaggtataggggttatccagtttccagctttagcctgagttgtgatgctccagtccatgctcgtgtgtccggctaacaagtaagggccatagagtatggcttgaagagatgcgtactccggccgatcatctgacataatgtaaaatcagttctgttgttattgctttgacactacagagttgcatacaatttatacacaataatcaagaaccaactctacacagcgtaattgtgttttatacctttaatagcttcggttctgatactcattggtagctccatggttacttgatcaccagatttccatttctgtttgattgataggaaattacctgcaaagaaaaagacaggtacaatatgattctcatttcacaaactagagactgtaacagtcaagcgagt

SEQ ID NO: 26760 - DNA, 705 bp, Arabidopsis thaliana landsberg
acaacgagaccaacctaatatcatcattgatcaagagcaacccaaatttctaaaaacagagcaccaaccagaacctttgggatcgtttacagatcataagaggtggggtactcacgtgatgggagctccggcagctccagttgctcatcctgattaccaacaggcgggggcgtgggtcgctggagataaccagtacactcagtaccaaccgtacgtcatgtactcttctgctgaacatgcaacaactaacaaccctatcgagccaatcatcagaatgttccatacctggagtctcaagggagaaaccttcatacgtaacctctggcacaatcgtaagtctccttccacttaattggagcatttggacaaagcaagtttgagtctttgacgaattttgttggtttttttttttttttgcagtgaagacaggaccgtctatgtcggaaacggcgtgggggaaggttaatttgacggccaaagcgataacaaaaggaggattcgagtcgcttttcagacagattttcggaacagagccaaacgagacgctgaagaaaactttcgcttgttatctctcgacgacgacaggtcctgttgctggaactgtctatctttcgaatgctcgtgtcgctttttgtagcgatcgtcctctgtacttcacagcaccttctggtcaagaatcttggagctactacagggtaagaaagt

SEQ ID NO: 26761 - DNA, 1388 bp, Arabidopsis thaliana landsberg
gagcattgttcctctgttatttatgttctgttttgctcaacctttttctttgttgaatgtaagttaaataaacaacaaagatgttatgttacgtgtaatagtacgtttgtaccaaacattactacaaccctagtttgataatttttatcttgaatcatagaaaacgaactagatcactaaaatgttaaattcaagaagcagaatacattcattggctacaaattatctacacactttaactttttttattaaagcaagaagccaaaatagttttatctttaaatgttactaaagtaaacaaaaaatgcttcccgtttaacctccacaaccaccaccgcagccagcggcgcaactggatccattgacatcgtcgttagtgtgaggtttagaagctcggtcactgcatgagaaaatcacggctgctatgacggagaaagccacaacagctgcccaaatgtagagtaagacttcaccattacccgccgctattaccgcgagttctcctctcaccattgaaagagtttttgtgcatcgctttgtgacaattgttgagactagttgataaagagagttgtaattggcatattttcaaatgtgtggttttgcgttttcgagtcagaagtcaccaaaaaaaagatgcgacgactctttcttatatatactgccctttggtttaactctagggtcagtggatcacaagctagtagttaaccaattgtgtgtgcggccacttgattgtcttaaaaaataaattaaaaatttcttagttagcaaaaaaacataactaagagcgagtttttataagtggtcataaagtagaacaatataagaaagtagcacttcgaatgacataattacatacatgactatatttacatagatgtctatttggactttgaatgtatggatatacgaaaatattttggagatttgtttttctgaagattcaaaaaattgattagaagactctgattagcaacttaaaacaatttgaactatctaacatataaatggtaaacagttgtggaataatgcatgagatgtatgatagagtagcagtaagcaagagtgattaacaaaaatccgatcaaaaaaccaagaggtatatattaacttaatttggtttacggaaaaaaaatacatgaatagagacaagaaaatagatgagtctcgatgagtctttctagtaagaaatcaagagctgattgcatgtgaagcaacatccctagtgaccttgacgaagccaaagaggtacctaatatatttttattttcttttatcaccaaagaggtgcgaggtgcctaataatgaaacgaatatctgttgaatatatccctgatataaagttagacctcaaaattgcaaaattttagactaataaatcgttg

SEQ ID NO: 26762 - DNA, 3956 bp, Arabidopsis thaliana landsberg
  unsure (1)..(3956): unsure at all n locations
gatagatagtatgcggaggggggttattttattaacatgaaattaattatcaaatttgacaaattaataagacaaacataaattttatcaaaatcagaattatagaagaaaaacttaaaagaattattaataaaaacttaaatttaaattcaattaagttaactaacaaaaattaatttcaacaaaaatgtaattaattttattttaaatattaaacagatttttatatttaattatcaaacataatagatggtctaattaaatgttttaacagttatttaaataaatttagaatattcaaaccaattcgaattcaaacacattaatttgatatttataatatcatatatataaaataaagcagatttgttatatttaattaggaaatgttttttaaattatcttattggattagtagtatttaaacatataatgagttttcatttaaagatgctcccaagcgacttttccgaaacggttttcgctaactacttcggaaccctagatctccttctgccggcgatctaatcctcctttccggcgactaccttccccctcagttccgcctcctcgcttctacccccatcttgtagtctcctttgcttaccgaagctcctcagatctgacgagtttccagatctcctcgccttttcccgatgtctcgtcgttactctcctagcgatcgcagatccaccctggatccccctttccggcctcctcgccctccgagagttaaagtcccggcttttgacaactctgagttgttgcgcagacatgccctcacggccatcggcagacttaccaatccggcggaacaagacgtctgggcagtactgcctttcctagccgaccactggaagttttccacccgacctactggagcagatcttgggaatgggttattccaattccaattcgcgactgagcaagaccttgctagagccctaaagtatcaaccctaccatttttcgcaatggatgataattttccaacgttgggagccgacgattgataaggatttcccttcccagatccctttctggatcaatgttcaaggtgtgtcgattcatctttggtctgaaggaatcctggttagtattgcgaagagtgtgggagttctagagaagactgaagtttcgtctaccttctttcgaatgagggtgctagtaaatgggctgaagcccctcgtgttgaagacgattgtggagtttgaagatgggagtgaagtggaagcctccctagtttacgagaagctgagaaattattgcaaatcctgctacaagctggatcattcccatctgtcctgccccctccttggtagaaaagagagtagaagactagaagaacctatcaatccaatctcgtgggaggagattagaggcaaaagctccaactcgtcctctgcctcaagaatcttcaggatatctgaggatagttcctctcagagaagagatgtgcctgcctccaaccaccgcacccgtaataggcaaagacaccaaacggactgctctagacgattccgggaatctggtggggatgtaagaagaagagatggtcatgaacctcagagggaaaggattcgaccagtgctctcccccagacattctatttcttcttctgagaatgatatgcgttcttctctgtccagaaggcagagatcttcggatcctgccccagttaatcgacgatcacattccttccaagaggactcccacccaggcccttctgtctatcgaccccttattgataagggtaaaggtgttcaaagaaaatactctcctgttctagaggataacgcaagtcgaagccaggaagtgcaaggctctggcctagcttcaagtcacagagacaaagacaggcccccgccaggaaaggatgcactgaatgctgctatggatgagctccgaggggtcatgacccagtatgttagctgcccggatcctacagagagtgcggccagacgcgaaagagtttgacaggcagaggctctaggagagcttgaagcaactgctgagcaaatggttagagcagctcaaccagctccttcttctacctcagtccaaatccctgaggaggtgacttcatccagcgtggagagagttccggtatctcaacgtctaggtccagtcaatcagcctaaacccaagaggaaagtcaggtccaagcagtctcctaaaaggaaggtaggaagacctccaggcaagcgtgctagtccaaagcccctggcaggagtgaagtcaaagaagctgaaacttctcaaccagcanaccatcccgttccccagaagaagactaatcttggatcaggatcatgtttcagaggatcccatgagttcacatcgggatgaagcacaaatgggtggtccttcgatacagaatcatgtggattttcactccccaagaagccggctcacgtaaccatgagctggaactgtcaagggattgggaaccccaagacagttcgcagagtgagagagatactcaagaaactctctcctgatgttatatttctaatggagacgatgaatcaagatgaagtggttttgaagaagctagatttcttgaagagatataatcacttcctagtttccccttctggacaagggaagggaggtttggccctgttctggaagcacgacgtggagatggcaattgtttcctcctgcgataacttcattgatgccagagtttcattcaaaagaatctcctttctggcaacctatgtttatggggaaccagaacagtcaaagaaaggagctacctgggaaaagctgaagtgtcttgctgataaccgagaggagccatggtttctcacaggggacttcaacgagatactggataattctgagaaatcagaagggccaccaagagctgagggatctttcgtcgagttcaggtcattcatgtctgaatgtggactcttcgaccttaagcacttaggtaactccctctcttggcgtggagtcaggcatactcatctggttagagcccggttggacagagccatgtcaaatagtgcctgcctagagctcttctcaagaggaaggtgtgattatagaaagtttgaaggctctaatcacagacctatcattactttcctaaggcaagataagcaacgcaagaaggggctttttcgatatgatagaagactgaaggagaatgaggagatcaaagacctcatagctgcagcttggaatgaagatttatctgattcggtggagaagaaacttagtcgatgcaggagggctatcatctcctggacaaaggagactcagagaaacagccagaagatcatagaggcgctcaaagtaaagctggaacaggccatggtaatccctgttaatgatgtctgcctcctagtccagattaactcagagctcagtgcagcttacctagctgaggaggccttctggaagcaaagaagcagacaaaactggctcagtttgggagaccagaattcagggtacttccacgcggttacaaaagggagaagttgtctcaatgatctatcagttcgggaaacagacctaggagagaaggtttttgaagatagccagtttgcagaagtgatctctacctgctatcaagctctcttcacctcccagctctccaatccagaagagatttcaaggattgttcaagaatcggttcaccccaaggtgatagaggaggagaatgacttccttatatccattccttcagctatggaaattaaggaagcactgtttaacgtccatcctgataaagccccagggtatgatggtttctctgccagtttcttccaaactaattggactatagtgggtgagtccattgtgcaggagattcagggatactttctatttggacaagttccagcttccatcaaaaggactttcatccggttaatcccaaagattcaaggacagaagaaagtaatggactataggccgattgctttctatattgtgatctagg

SEQ ID NO: 26763 - DNA, 1363 bp, Arabidopsis thaliana landsberg
  unsure (1)..(1363): unsure at all n locations
atttatttgtgagttctctccttcagttgcaaaaagtatttgatgctatatgtaatcttgtttattactctatttgcctcctctagaaagtcatcaatatattggagagccaggcgggaccaggtggtttgcatgagaatactatgcttatagtaatgggtgaccatgggcagacattaaatggggatcatggcggagggactgcagaagaggtaagatatcggcttttttctttgactcactctgcttcaagattattaatccacctttacttctaaatccctttacaggtagaaacaaccatgtttgccatgagtacaaagaagcatacaactttggttcctcctgagttcgatacctcatcttgtaaacaaaacaaggtaattgtaacctgcgaaacatattccttggtgatcataagaattgtttttgagatttcttattactggaattctattgggttcatcttaatgtcaggacgggaatcagatgtgtatcagctacattgagcaggtcagtatcaaatttgatgtgatgtctttccatgtactctatgcaaacctcattgcaaaacttaattgttttgggttatttgcagcttgatttnnnnnnnnnnnnnnnnnntttgcttgggatatcctttcctttcggaaggtgccttgtaaggatcattgtcaaattttgtttcctgcttctattcaggaaaatatccatccgcacatattaatattcgaaatatttctatgtatatcaaatttcagcattgggcatgtcaaccctgagttatatgcccttggttccagtagctggaatttggataagtcagatttgggcaattctggcacccaatcggctgctaacgagtggatgaaacattacgttgatgtactttgtgtgaatgcttggcaggtaacagttcaaaaacttgaaactatatcttgtcacgatgttctgttttcgggctctcagtttccaattctatttatatgcaggtgaaaagatatatagatgtgtattctaattcatcggttgttggtttctcttccgatgatatgtcaaggatatcagatctctattctgcagcagaacagaattggtccaattctgtcaaacacatattgatggatagaaatggagatgacggcagtacagatatatctgcccttcttaaagagcaaattgctgaatatttgaatttcttctcaagcgttgttgaacttgcccggtctaagtggacagagttcaatctgaatctaatgattactgggtttgggatattggttatatcactcatccttcagattcttgctgttttccatggcgacaattcttatgcagtgggttcttggatatccactggtgc

SEQ ID NO: 26764 - DNA, 1910 bp, Arabidopsis thaliana landsberg
accatggctgacaaacatttcctcccctcggtttaatgaaagtttcttgctttgcttttttggtttttacagtttggctggagctgcaagtgattcaagaaaggtagaaacggagaaacagaaggaacaagcaaatcagtcacaagagtcacaaaaaccagtagcagatgcaacaaatcagaagcagtcaatgtgtaggtgcttctcatgttttcctcaatgtccgtggtgttgttcttcctgctcttgttcttgattctgttttgatgtttgattagacaaaaacaaaagttgtggagtttatctcctgtaaagaaagtatgtaggtcattagaaccttaaatcaattcgattttgttctctgctttgttcatgagaagatacagagatcaaagagtgaagaaaaatgttctagatttatccccaaacaatatcacaaatcaaaaagatcaacacctaagatatccacggaaacaaaaatttgttttaacatcgcctaaaacctcagattctcaaccatgagcaaagcttagaagaagaaaaaactaatctagtttttggcctcagtattgccatggccattgttctggtatgctttaccatccccattagactcactgttccgtctcccatagcctcgtcctccattgacgccactgcccctaggtttgtatccatcacgtctgaaaccatcctcatttttataaccactgttgtttcttgtagagactctgttgccattttgattgttacctcctgcataatccagaaaaagtaagattaggattttgtttttacatttaattaaagttacaatctttgagacaacaatgcctttcagaaacttgcctcgcttttcttctatagatgctcttcggtttccgattctgattggtgattccctgtgagcctagagttctgtagtagaacatcaaaagaagaatccagtttataaccaaaaagtttgtaagaaacatcgttgatgttgaaacatacctggaggaccaatttcacagcttcagcagatgcgaatgtcacaaagccaaaacagtttcccttgagctgcaaaagaagaacttaatgaggatttcaaaaaaattggctgtgaaacaagtttcttcaaaagatccattcaataaacaactcaccctgtaacttctcacttggataccatctttcgtaatagctccaaaacctttgaatgtttcatttagttgctctggtgtagcgtccatgagcaagttggcaacaaatatcgtataaccctcagctgatacacgaaaaatggtaaaatcatattaagacatagaaaaaggtgaaagaaaatcagtttttctgaaatgttaaaacattgatttaaaaccttgttggtcgattgttgcagcagaagagtgttcagaaacaggagcaggagctttggattcacgagcagcactcggctttgtaacaggcttagacttaggctttgcaggagaagctttggcattgaatgtagcaccgttttgagccaaatcttggacctaagggtaagttgcaaaatatttagattatatgagcaaagattaggctatagaataggatttcacacaaaaaagaggactcacaatatgtgcaaatgatttcttgggagcatcaacaccattgcttttatcgttcacaacattatcctcctgtgttttgggatgtccatttgctacagctctttctggaatcttcactgtattttcggttgtctgtttcgccttgggttgttgggtagggatagtaaccggctctgcaaccttcatctacctgctctggtggttggaccacttgaggaataacctcctcgacttcttttcttgttagcttctggttaaacaatcttattagtcagcatacctaaagacattgttgtgaaccaaaatagc

SEQ ID NO: 26765 - DNA, 973 bp, Arabidopsis thaliana landsberg
atctaaattttctgcagcagtcacacaattgaaggcccagcaccggcttatccttagtggaacaccaatacaggtttcatttgagtgctcgacttcccagaaagtttagtacgcgttcttttatcttgagtgatattgtttcctttttgcagaataatatcatggagctgtggtccctttttgacttcttgatgcctggatttcttgggacagagagacaggtagcgcttatacattttccctgtttatatgttgttacaaatgaccaattttcagggtcacttttgaaagttatactttgaagaagtatttttggatattctttgttttcataaacgagacatatgtttcttttttgggcagtttcaagcatcttatggaaaaccattgctggcagctagagatcctaaatgctctgctaaggatgctgaagcgggtgtactggcaatggaagcactccataagcaggtaatgctgtttcttgagttcatcttttccgacttcttattttccgttgcaattgttgagaattggtaacatcatgacctgataaaatcttcaaatcacgtaggttatgccattcttactcagacgtacgaaagaggaagtcctctctgatttgccagaaaaaatcattcaggacagatattgtgaccttagtcctgtccagttgaagctttatgagcaattttctggttcaagtgctaagcaagaaatatctagtatcataaaagttgatgggtcagcagattccggaaatgcagatgttgcgccaacaaaagcatccacacacgttttccaggtatattattgtttgctgcattgaaggaaacactcccacctaacaattttacagtatggggagacctgatttttgtttgagttttaattttccacccactacagtacctgcttaaactctgcagtcaaccgcttcttgttctaggcgataaggtcacagagccggcggctt

SEQ ID NO: 26766 - DNA, 10015 bp, Arabidopsis thaliana landsberg
  unsure (1)..(10015): unsure at all n locations
attgtttcaacctctttccctgaaaagtcattagaagagaatagtcctctagtcttacatttttaaaaatttgttttttatatcaatcattatgatgttgtttgtcttgacttgatcacaccactatttccaggtcttggttattaactagtgccctagacaatacaccaatattattggtaaagctttaagtaagtacacatggttgaaagctgaatgtgatctttgacaaatcagttaccaaatacatatatatatagttagtcaagaattccgaggtggaacttacaacatatggttttgaaaatacgtcaatggggcattctgagaatcaaactcacacccaaagctgaaatcataccactagaccaaatgcctggttattggtgtttctcagttaaatcattctctttgtttccttaccctttgtggaaagaacagttcatgttttgtaattcttctttctaaacaatacaatggaaatgcatgttgttcaagtctcataatttaggcagaaaattcaaatcttgtatcccataatttaccggaatttgagaattaggctaggtagctgttgcatccagagttaatgcatgtgcttttgtatatcatttaaaaggtttcagtttgctgctcggcttgttcttgactctcaaatttctgtaaatgtttttctttacattgaaatttgcgtgtgaatgtgtgatactttcccagttgatatgggtgagctttagagaatctaatgaaacaaagctgttttaagtactacctcatgttttctggtttaatctgcagaaggggtgcttactggttgaacagatcaaagtcaacggatgtgatggccaaactttggtgttacaccatttagtttgtttgggttcagcacttaacgtcaaaaatcattacaagagttccaagagctgaagtcagaaacataatcgtcagactacatatccaactcttgctacctttctgtggaaatggtaaggatctggtcccctttgtttgttaaaatgttaacgagaaacttgtggcgtctctaatctactcctgctaaatgcaagggacgtcattattgttcaattgctgaagctcaatgactaatgacagacgttgtcaaaattgagcaaaggtatttgacggcctgtcaacaattgttacttttatcagaatgtagtctgtgacaaatcagaaactatagacctggcacattaatatatgcaactgttctgagctgctatttcctagaaaaaaagagtcaatggggcattcccagaatcgaagtcgggacctgttgttgataatatataactcaatgcacaactgtcgttgttgaacttggataccagttttaagctgtgttcttttttcacttcctgcagttatctcttggataaattggcaacattcagctagtgatgttcttggttcattctgacatcgagaaactgttttcttgctgcacaatgtgatcaagtcaatggacgtgaaagccaaggtgcgttgtgattctcatttatttgttgcatttcagcagtttataccaaacatgcgtaatgggaaatagttttctaatttaaacattctagaaattgtgagaaaatgcactatagaacatattttgccatgatagctcttagctggtatccaaaaaggtcaagggggcattccgagaatcgaactcgggacctctcgcacccaaagcgagaatcataccactagaccaaatgccctgttgttgatttagttctattcaaatatttcattgttctttgatcctttgtgtgagaaataatatatggttccatcttttacaggaaatttacccgccttacttttcctcttgaggatttattcttgacatcgctggcaacatatagttagtgtaagctcaaactcttctaactgattcatgaatctgatgagaaaatatttacttgtttagataatctaaaaataaagctacattttagatctagatcgttaagttgactgtcaaatactggaggcagattgtctataattcaaatattgttgaaatgtaaggcaatcattgctgaattgctgtattagagaaaattctatatggaaaaattcttagctgtcatttagtccacataccttgcaaaatttaaaaggggcattccgagaatcgaactcgggacctctcgcacccaaagcgagaatcataccactagaccaaatgccctgttgttgatgtaatttagttttaaaactatagataatggtgttgcctttggatctcttaataccaatcaatttctgctctctgactttattgtgcatgaaaagccaccggtgcaactgacgaactagtataggattgatttggttcgggataggtggctgttggttataggaacctaagctagtggatctgatgataaggataaactttgcatattgttatctgttactttgatcatgaagtcaatcttgaaagtcttattttcatgtctgaaaatttgatttttccttgttaaaatgcctaaactagtgaccgtaaggatgtcaccatggtcttgcttatcatagagtcctgatatgctctatgctctccacatcctgtattacttagatgtgtgaggttgtaggtctcctgaatgcccctgagacttaaaaaagaatgggggcattccgagaatcgaactcgggacctctcgcacccaaagcgagaatcataccactagaccaaatgccccgtttatatgttgttcagttaatgcctcctataagcattctagcctttcgttgagagatattttgttaccgtttgcattccgttatatgcttaatgatgactcctttattatttatgcagatcatactttgtgaaatcggcagcttacaaaatgtgaagggccgacctatatgtagttactcgttaaaacagtggtacgttcttatcttccttggcactaaagctgttaaataatgaaaccttatggggaggtgttactttgtttcctctcgctgagataaataaaaaatatttgtacatgcattgttttgttgaaaaattcaatggggatatgtagctggcatttagaacgaatgtttttggaaaaagtcaatggggcattccgagaatcgaactcgggacctctcgcacccaaagcgagaatcataccactagaccaaatgccctgttgttaatatagttacattgtagcactgtgatgttgttaatcatgtggaaaagagaattcatgcttcagtctattattacaggaaattcactcttgatggtttgtttatcttttgagggctctattcgggattaagcaggcaagatgcagtaagttcaaactattctttaattaattttgaatatggcgttcaaatggtttcttgtttagatcttctaagacagaaattactttttagatctgggatctatcagttgactttcagccatcagggcttaattgtaaaggtggatagtctggaaatttagtattgatgaaatgttagctggcgtttagaactttggtttccaaaaagtcaaaggggcattccgagaattgaactcgggacctctcgcaccctaagcgagaatcataccactagaccaaatgccctatttgatgtatcgtttgacataattaaatatatatagtaactaaaatatcgtttcacggaactgagcttttcaaaaccattcgacacagctctgtactcgtctctctcccgccaatcacctcgactaaagcaccaatggaacctctagggtttcttctctgattccaaccgtatacgaatcggaagcttctagcgattccatttcttcttggacagcattgaaattcgagtttcgatggtcaatcttatggaaaccgaagatttcgcctccgatttgcagtctccttctggttcttcggatcatagtgagttttgagattacgattcatttacattttctttttcttgctgataattgtagatttttgaggtgatagattcgtagtaccaatttcatttttggattctcttagggtttgaggttaatcggattctgggatgtggggaaattgaagatacagaggcgattgatgaagcattagtacttaatagctcgttacttgaaaccccatttcaagtgctctacgacgatacggagctagtagataacggaaattgtggtgacgaggaatcactgaaccaggaatgttacggtctcgaccaagtggtggtggatgatagtgatgatgaagatggaagtgtcgctgctggtgagccgatgtgtttgccggagctaagcccgaaagctggagatatacttttggagtctgatggatcaaatgatcacgaatgtcaaacaggtaaacatatccttgtgttgttatgttgcctctatcttcttctttgtattaactcagataaatcttactacatctctttcttcaaggcaagcaagaatcaaattgtgatacagtgaccggtttccaaggttcattgcggattactgctagtagccatggtccagggcttgattttttggattctcaagaaccaggagagtcaacacaagcagatgcccttggttttgttgaccactttttgatggacaaagatctaaatttgtctccagttgatctcccggttaatagttgcagaaggaagtcacctcctgtatcaggtgcaaaaggatgtcaatctctggccaaaagaattatgagcagaagtccaaccaggaaaatgagtgtctttgattggagtagtgatcagtgtgatgtgagtgaccctaaaacctctccagtcactcgtgcaagtattacatgctccaagataagagaagatcaggttgcaggtgatgattttggagtgaagaaacgatctagggatccgtgtgatattagaaaagtctcaagtcatcccacacaaagagttatgaagaacagttctgcaaagcatctcaagatggaacaagcatcgggtttgagtgagggcattatgtttatctcacagaaggatgctcagttggaggataaggcgccaaaggagcccttggaacccgaggaagactttattgacattggtattaacactcaaattgctgctgaagcaatgagtgctttagtgtatgctccctgtactacagaagaagcttgtgaatcagacccaattcctgggagtgtatcagaaatgagggatcaagttagtaatctttctagaaggaacaatgataccattgagggtgaacctgaaagagacaaattgaatggtctgtttagtgctgctccacacagggaaagaaactctaagaagaagagaaaattcaccaatgaagagagaaccagagctaacgtctctgttaaaacatgtcttctcaacttatgtgaatggaggcatcccagagccaaaagatcacgtcttatgcaaagacatcacatcccacctaggagatcttggggtgctagtttagttaaagacagaagtgaaaccaacactttgtcaagcagcttacgaggatcgttaagtgggacaagacaagcctcttcttgccaatcaggagtcattgacttgaatgttgcatatcatgcttctccaaggaaaatatatgacggaagtcatgaaagcccttgcaataaagatttccccaggttattccttcagaaggagcttactacgagccttggaggacctggtaaaataggtgacttcgtgtggaaagacttaaggaaacgaagaaacttggcacatgttcgagtcttattcagccagaatctggatgatgaaacagtcaagcagcagaagaaggttatagttctagcctcctttttatcaattttaacagtgtaagtatatactacgtcatcattggttataattgatcactcgtgtcttccatagataatggttcgactcggaatttctccggcatcttcatcagcagattcaacacatttcatagcagacagatttgctcggacaaggaatatgttggaagccatagctcttggtaaatttgttgttacgcctatatggctcgagagctgtgcacaaacaagatgcttgatagatgagaagagttacattttaagggatatcaaaaaggaaaaagacgggttctgcttgcttacatctttggcccgtgcgaagcagcatccccttcttaaggtcacaatctatctcatttgagcttttatcagagcttcaaaagatcctttgttcatgaatatctgaaatcatataacttcacatttattcataggggtttaaagtctgcatcacccccagcattaaaccaagcagaggtatgattactgatttagtaaagatgactcaagggcaggtacgaacaattcacttcagctgagagattttgtttcatagacttcttagcacttcttcaggatggttgtttatgagttcctttatcaggtagtggaggcaagtgagataattgctgcagaggatagaaactttccagaagatgtgttgattctttcttgcaaagaagatcgagatttctgtcttcctttcgttaatcaaggtaaccgtcaatgccaattttacactatgaaaattactaagaaagaacaattacaagttaattaatgtcatctttccattaacaactgtaatgtaggagctgtaattttcacctctgagcttttactgaatggaatcgtgattcagaaactggaatatgccaggtttgcaacgcattatcaccaaaatcagagattataattgtagtgtgtgtttgtgtaactacgaaccaatcaacgtaaatggatagaacataaattggtcaaacgcaaatctccttacaatttttggattctctcttgtttcaggcactgtctcttctcaatttcagagaaaaggaaccaaagaaacacataagtttacagcagcatgtctacttctttctactactgattggtacaagcaatgaatgaatgaagccttttaataaatctttcataaaccagtttgttttagagataagaaacctcagattttccttttcatgactctaatggatacaatcatctaacacataaaagtaactcatttcacatacgttagttctaaacctcttcataaaaattggagtagaaaaggtaggatattgtgttaaacaagagctctgagaattttttggcaggagaaaaatgattcattcagacctactaactctactcattgctttcaggagattcagcactgggattcggattgttgaggtttggattgttgaaattaccacttggtggagcagctggatttgtatgataaggaggaggaggaggtagtccattataattgggaggtggtccgccaccttgacctggtatgggagccattcctggtggtccgccaccttgacctggtatgggagccattcctggtggcctcagaataccattttgtggaggtggaggtagaggagcaccaggcggtgccatcatctgtggtactcctggaggaggcatataacctgcaaatgtacaatattacatttcacttcaaacagttgtggggaaaaaaaggatgtgaatatctatgtatgaaacctactaatcgatgtttgagtgacatgatttaaatgaatgaaatctatttcgtaagggtctgaagagtcatgatacacagcacgtgacaaccaaagctcatattcatcagctgcctaaagtttcatgcaatgtcaagtttctcaaatcacctatatggatgacgttctttattatactctatttcatctgtagtcttttgtaaagattactatgaaagttacctactaaaactttcgaatgttgaatccgcacagcaagcgggaaactaatttaataacagaaattacctggagnaggcatcatgggtctaggcagaacaggaggtcgcatacccataggcatactgccaggtggtagcatcatgggagggcgaggtcttgcaagcatatgctgattaaacacagcaccaacctgttgataccctccagtttggccaagatgttccttaattctctgatcaatcaaactttgggtttgttgttcctcaaattgctgatagtatattctcacattcgcctgaaaaagatcatcaaactcttaacatacattaaggaaaaccatgtatacaaccacacaaaagaactcttctttatgtaccttgtgtttgtaaccagcattgtgctgcttccttactgatggctgaaaattatcaaatataaaactttactaatacgagaagacggtacaatacaatccgtgaaacatgattacattcttaatcaaacacaaaaacatcaaaaccatagataacataatgcaactataaattggtaacaaaattggatctaagttcacttcacaaaacaaaaatcgaactcgtatagtagaatttcagcttaaccacaaaaccatgattccaagtactaaattgagctaaatccagtcaaaggcaagaagggaaccagcgtgatatacatatgtaaatagcatactggttttaaactagaatccaaatcggaaacctaatagacacctccggagatcgaattcatcacctaaaacgagttcacgattactagggaagacaataaaacaaagaggaggaaacttacggaatcgtgagtgagataagtatcgcaataatcacagtaatacctgcgaaaatcaaaatcaaacaagtaattaaaaaacctaatctcgaactacgtaactatctatgtatcagtagtataactctgaggatcttaaaccctatacctcggcatcgttcagaaagttccagagaaccctgcgagtgagagagacagaagctttcggtagcgacgggaagaagaaagtgcaaagagggagtcgaatttacttttcgcctactttaataaaaaaaagaatgatatcatccgacggtccagattcatttatgatatctaacggctatcaataactggagaattatctctgaaagcgacgtcgtttcacacgacgtataaacagaccatttcccaagaaagaataacggaaaaaacaaaatgatcggagatatctccccgccggtgacttcaatcccaggttcgtcggatctttttgctctctgtatatgcctcaatttcaatcccaagatcatcgaatcttttgatttgctttcgcataaactaaaacatgaaggtgttgagttttctccatttagtataaagttcgagattatatttctgcatttttgtttatttcaataatttggctgaaatgtcgcggaatttgtgtagttgttgaagggaatgaagaattgaggaagccacagaatctgattccgccgttttcaaaggtggtgtctcattttggcactagcggaatctccgtcgcattggccactggcgtgactcatcctctcggttagatcctgatgccttcttcttcactcatagttttgtatgagtagtccaattttgggtttgaattagaaccgttggctccaattttggatttgatatgctgcaatttgctgcagataggtgttttctgtggatgttttctagcacttgtgatggattttcaactttcttcgatcttcgatagtgatatttggataatgtagctgtatgttctagctcttgtagtaggtcagtgtataagtatgtctctgctcaactactatggtacataatgtggcattttaaggtttaaggactgagaagaaaatggttctctttccatcacactcttcttaaatgtgttattcttgtcgttttcgttgtccagatgtagtgaaagtgagattgcagatgcagcatgtcggccaaagaggtccgttaattggaatggtaataatgttctagagaactgctcctattgatgttactggggatgtgttaacttaacttacatttgtatttttgaaatgtcttttttcagactggaatctttcttcaactgatgaagaatgaagggcgtaggtctttatacttggggttgactcctgctctcactagatcagtgctttacggaggtcttagattgggattatatgaacc

SEQ ID NO: 26767 - DNA, 1843 bp, Arabidopsis thaliana landsberg
ggccacacaacgaaagaatcaaagaccagagagaactttgtgtccatgtgaaaatgaattaagtaaagttattggtcttcggcccattaagtgagtcggaaagttattgggcttaggcccattaaatgagtcggttttgttaggtttagaccaaaaaaaaaaaaaaaaaaaactaggttatatatattctctttctctgccacaaattgtcttcatacagtaaagaaaataaaaagttgtcgaaggcttgagcgttgttccttcttcttcaggtactttttgatcttcatcttttttttgggttttaatttgtccttatgaattcgtaattgtttgatttgattattcgatttgatcgattgattctgtgatctgatttgttttgcatgtggttatcgttgttttaggtttcgggaattttagattcttaagtatacttgtttatcggattttctcgttttgatatcatagcaatcgatttcgtgtgttgaattaattttaatctgaattaagattagttattccgtaatatagaattgaagagattggtttttgtaagacagatccatcagctaaatctattattgtctttgatctttgaaattaatatgtaatattttgagtattgctaatttcttttaagatttattagtatcattattcattactgatgaacgcatgttattaagattattgaatttaattcaacttttatggctgtttttttttaatggtaaattgcacaaaatttattgtatgattaaggttacatgacacactttgtattattacagcttcggttattgtttcttgaggattttatatccgtattccagttttgagttatattactctgttttcggtattaactagcttatgtactgttgttgtaggtttatgttctattgttaagatgggagacaaaaacgatgacgacaagaacattgagatatggaagattaagaagctgatcaaaggacttgaaaccgcaataggtaatggaacaagtatgatctctcttataatgcctcctagagatcaagtagctcgtgtcactaagatgcttgctgatgaatacggaaccgcctcaaacatcaagagtcgagtgcatcgtcaatctgttttatctgccattacttctgctcaacaaagattgaagctttacaacaaagttcctcccaatggtcttgttctctatactggaaccattgttactgatgatggtaaagagaagaaagtgacgattgatttcgagccttttaaaccgattaatgcttcgttgtatttgtgtgacaataagttccacaccgagcctttgaatgagcttttggagtctgatgataagtttggtttcattgttatggatggaaatggaactttgtttggtactttgagtgggaatacaagagaggttcttcataagttcactgtcgatcttccgaaaaagcacggaagaggaggacaatctgcgttgcgatttgctcgtcttaggatggagaagagacataactatgtgaggaaaaccgcggagcttgccactcagttttacattaatccagctacgagtcagcctaatgtctctggtcttatacttgctggttcagcggattttaagaccgagctaagtcaatcagaactgtttgatcctcgtcttcaagctaagatattgaatgtggttgatgtttcttacggaggagagaatggtttcaaccaagcaattgagctgtctgctgagattctatctaatgtgaagttcatacaagaaaagaaattgattgggaagtactttgaggagattagtcaagacactgggaaatatgttttcggtgttgaagatacttta

SEQ ID NO: 26768 - DNA, 2413 bp, Arabidopsis thaliana landsberg
cgtagtatgaatcaactcattcttagcattcttaacatctgtaacacctcctttcttaggaaccacatggagtggactaacccaatcactatttgaaataggatagatgattcctgcttcaaacaatttcatgatctccttctttacaacatccttgatatttgggtttagtcttctctgatgctcaactgagggtttagattaatccttacggtgaatcctatgcatacacaagtcgggagagatacctgtaatatcatcaagagaaaagccaagagctttgcgatacttgcgcagcttgcttagcaattaagtgagctctgtgttgtttaaagaaggattaacaatgacatggaagtagaattttcaccaagaaatgcgtaccttagccttgtaggaagtggttttagatcaatattaggagctttttctgggctccactcgccaaccgttgctgcttttgtagatgggccaattaactcctcttgagtaatcaattgcattacatgctcagttctatccaacagcttaccatacccgtcgggaacattgtctattgaagggattagagcatgtttcaaaggatcagcatgtgtcatctccatgagatatcgttaaccagagacgagatagtatccacatagaaagtctgcccatcgatggtaggcttcttaaccaccttattcatgtcaaactacattgtaagatcacctacattcaagcctattctatccttcctgacatcaataatggaatcggttgaggctaagaaaggccttcccatgattagaggatacttaggttctttctcataagataaaaccacaaaatctgtaggaatgtagctagtaccgacttgtacagggacatcgcataagataccattgggtctacggacaaatcgatcaacaagaacaagagtgatttgcgtaggctctaaatctgtcaaaccaagtcgtagtgcaactgatcgtggcatcaagctgaaactagaaccaagatcgcacaagcatcgctcaaaactctcgttaaggtaccacaattgagaacaaagctacctgaatctggaagtttatgtggagtcttgttctgaataatgtcgctaacctgtgtagacatcctcatcacagctttctcaattagcaaatccttagtaaccatcctcctcacaaactgtctgaccataggagaagacttcacagcatctatgagtggcatctctacaatcaacttatccatcatagctttgcatctagcatcctcaagctcctatatggaattcctaggactcttgggaaaaggaaccttgggtttggttacctttgccgcagctgaaatcgggttttggagaattcgcaggtttgggcagggttggtgtcgatcgacaccctgttggtgtcggtcgacactgtcgcgttctgtagtgtctgtcatggctggtgtcgatcgacacgctgctgtgtcagtagacactggtgtctggtctgcaaaaactgcaacatcattttcttccaaattaacgattttggttgaaggaagttctcgttgcagcactggatttagctgttttccactccttaactcaatagcacgaacatcttctttgtttgtagtcaattgcttgatccgattgttcaatatttgaatcttcctattcatatcgtcggataatgcaaccagtttgtgatcaaaatctgttgtttgcttctcttgacctttgagaatctgttcgagaagagattcaatcttcctagtggtctcgtgtggagggtgggctagggttaagaagcataagttgaaataaagcttgtagattgctgaaacagtgtcttagatgtagatttgtgaatgtagctcatgtatcccttgatcggtcttcactgaagtggccaaactgtcaacctgtgcagcatactgaacttgttgattaccaagaagaaaattaactttggaacttaacaaggcaacctggttgttatcagatctcttagcctgcatcttccttgcaatgtcaacgcttttggtactaatgctagaagctaagctttcaatgagcattgttgcatcctctggatatcttgacatgaaattaccattactaactgcatccaaagccatctgataacaccaatcaactcctctgaagaagatacctaacagttgaacctcactaaaaccatgatgcgggcaatctctcttatattctatgaacctaatccaagcggctttaaatgcttcagctgcttcttaagagaaggtctccttggaccttgcatcattataaaagttgttcacaaaagcaacttttatttcttttcaagttgtcaatgatcgaggcttcaactgcttaagccaagaagctgctttcccagcaagataatatggggagagctgtaaggaaggtagtcataag

SEQ ID NO: 26769 - DNA, 1227 bp, Arabidopsis thaliana landsberg
ggagaacaaaccgagatagacaatgatgcgattaatacaaagcaagaaaattagtttgatgaaggtactcgagaagaagaggtggggaatgtgaacaacaatccggttcaagttgaaaacgtgttgagaagatcagagagaccaacttcaagacctaagtatcttgaggactacgtgttacttgcagaagaggaaggagaaaggctgttgttgtgtctgaataatgagccaagagatttttatgaagctagagaatcacgagaatggatgcttgcttgtgaggatgagatttagtctacaaagaaaaatcagacatgggagtttgttgaacttccggttggtgcaaaagccattggcttaaaatgggtcttcaaactaaaaagaaactcagacggaagcattaacaagtacaagacccgacttatcgcaaaaggatatgtccagtgatacagaatcgatttcgatgaagtttttgctccagtggctcgagttgagacaataaggattcttttaaaccttgaagcgtcaaacaattgggaaaatcactatctcgatgttaagacagctttcttacatggtgagttaaaagaaaccgtatatgtcaacacaaccagacggattccaagagaatggggatgaaagaaaagtttataagctgaagaaagcattgtatggcttaagacaagctccgagagcctggaataacaagctaaatcaaattcttcaagaactacagtttgaaaaatgctctaaggaaccatcgttctatcgaagagaagtaagtgagaatcttctagttgtggcagtttatgttgacgatctatttattacaggaactaatgttgcgatcatagacgagttcaaaagggagatgagcgcgaagtttgatatgagtgatctagggaaattgacgtattatctcagaatcgaagtgtgtcaacatgaaggaagaataactttgaatcaaaggcgttatgctttgaaaattttagaagaagctgggatgatgatgaagtgtaacttgctgaacacgccaatggagtcaggattacaattgcgagaaagagatcgacgctacatggtacaggaaaaacgtgggctggcttcgctacctaccacacacaagaccagatttgagtttttgtgtgggagttttgagccgttatatgcaagaaccgaaggaaatccacagagcagcaatgaggcattgtttaaggtatctacgag

SEQ ID NO: 26770 - DNA, 1311 bp, Arabidopsis thaliana landsberg
  unsure (1)..(1311): unsure at all n locations
ctcaagcttattgccttgtagattctccattgatacatcacctccattgcttccttcaacgccatctcctttttcttgcgtgaattctgaattttctccattggtctccaccatgttactgcccgtagtaacattgttgtgttcagtactactgctttcttccgacgaagcctcacttgaactttttgacttaacctctacaacaatcttcacgattcgggtaatcgtttgttcccattgagttatcgaggtttctaccgcgttcttttgttccaaggaaagagacattgcttcatcaccttttatatgtttctctataataactctaccgatcgcagcatgtaactcagttagtgatttcatcacttcaaacatctcctttcttatacttgaactcaactatcatattcacaaaataaaaacattgattaggtccataagttcataagctataacgttataactatcttcattgtgcatggacataaaatgagactagaactttggttgttccaaatgcaaaatatttttggtagtgtttacgttagaatttgtgttcatagctttgaaatatttttgttcaagataactcaccagttctctcccaagcataaacatcgtttgcaagagattttcggatttcgacttaagatcaaacttgaatgtctttggttcgttgtcctcgattagcggcgtaaccgaagactccaacttgaaaagatcctttagcttctcaaagaatgatcttagctgttctcttataggacaattattctccaacttcaacacaaacccaagggatctattcgagatgtacggctctatatctttgatcgtgtttggaggattcacgaccgtctcatgtgctaaaactacattgagacttatactatttgcaacaatgcatcaaaacaacaagaaataaacttttctcatgattagtgatgatgattatgggaagtttccttcttgatccgttcttcatatagtgcaagtgtgtctgttacaccactaaaattaaatttttggaatccttgacttagagactttgatcgactgctctttgattcaatatatcaaannnnnnnnnnnnnnnnnnnnnnnnnnnnnnnnnnnataccagtcatgtggctttgaagaactcacataaattgaaaaaaaatgaaatacatatatatctatcattagagaggctctccatctgcggtatcaacatcagccaaacactttcgcctaatcttcaactttaatttcaatggtcatttaatgcatatctttttatatttgaggtacatataatcaatattatac

SEQ ID NO: 26771 - DNA, 1716 bp, Arabidopsis thaliana landsberg
agattcatgtaaagcaatgtgttatataaattatgaccattttaacgacagtatatatatttaacaatgtaattattaaatctacggttaattttgcaaaaagaggcaaaataatttaattagatgaatgacaatttggtagataagaaacttaatgtattatttagttgatagtatttttgagttttgaaactattccatctaatattttggtagatgcctatagtaataaaataagatgcaaatcttagttaagaaaatacaaatgtaaacttacatggcgataacacaaatctaattaaaattttgaatttccacagagaaatcatataagttaccatataaacgataaccctcaaaaacttagatgattgataaagttgctaaagacgaattcacgatcattattatagaggattacagttctaaatatttacagatttattatgtttatatataagtcatgcatctattcctattcaattctattcgaagttgaaaatgcacccatttcgcgtagactatagaatccatatgattaaactatatctagctatatgcatatatttacggaaaaagagactataagtcaaagaacaagagtttctagaacaaaaatgggagacaaattaaaaacggcctagacatggaaattgatgcttactttaagatgaagtcaatcttattttgcaaggagtcgtaaccgtatatgtatggtcttctcgatatcgacgttgctccttacgacgcacgcattttcatacataccttcggttattttctttcttctaactgcactttctatagttgaggactgagtatgtttgaacaaagttgttcttttatggttctcgactaattttatgatgggcatatatgtttcgattggtataaatgtacaaggaaatgtcggaattttaataactaaaaaaaactgtgtaacaagagaatccacacatacacattttgtcgtcatcgccgagatttagtatactggccggctcagtgtttatcatttatttttttgttccagtgttcatcatcttgttaacggaaagtaaaaatatttataatttgaagtttattttctttggtcattatacattatgcaagttctgaaaactcacttggtttcttacccaaaatttctatcataagaaagtcagaattttgtatccctttttcattagaaattgaccactttataaacttcagcaaattatccaaattcaagaagtaaattaaaatagctaatgatatttgattggctgtagagggaacatttcaacccaagtcacgacaaatcaagatgatggtttgtttcctgccctttaatttgacctattaattaaaatatataaagtgataattggacaaatttttacgcaagtgtttctttacgttaatgattatttaagctgaacacttttaacctttttcaaaacaaatgatataatttacttagaggtttagaaaactaatcaaatgcagaaaagcaaaaaccctagttagaaaaatatacatagggttgaagttgattatgagaaaacattaaacgcgggaggacttatatagatttttttaatattacttttcagtatataatcataactaaatccttttttctcgcttatatatcatctatctaacattagacatttatcatacaccaacataataacacttggagagaacacacgacagatcagaaaagac

SEQ ID NO: 26772 - DNA, 984 bp, Arabidopsis thaliana landsberg
agcatcataaacaagtacaagaatccattaacctacatcaccgaaaacggtatatgtagcattcaaatgttaaactttaaccaatgaaaaaactattttgtgttagttacaaatcttatgtcaatttgtaggagtagctgatgctgattttggaaacgtaacgatcgcaaatgctcatgccgataatggacgaattcaatttcaatgcaaccatctttcttgtctcaaatgcgcaattgagtgagtttaatatatcattcgtatttgatgtgatttactgtcttcggagaattataaatttatattcatatcaaaactacttttctaaaatatattatagggatggatgcaacgtagcaggatattttgcatggtcattgatggacaattacgaattcggaaatggttacaccctccggtttggtatgaattgggtcaatttcactaatcctgctgatcgaaaagaaaaagcttctggaaaatggttctctaagttcctcgcaaaataagttgaagccctagatttataaatccaaacctcgaatgtaataacaattgtactgtatgtattttaagaccttatgtgttttgtatatgatgttaataatgttgtaataatcggatcctaatttcgtgcacagttcataaataaataaaaatgtatacaatgtttgtaactgttcttgttctacactcttgctgaatataacatctccaaaaacaaaaacaaaaaattcaacgctttacaggtttacatatttgacaagtataaataacaaaagctccaagccaaggtgtaactgtgtaataatcaaactttttttaacgtgttataatttttaaacctaggaaataattatttgaaataataacgtgtgatatgagccctggatataacaatttggatcttttttttctatgtcgatgaacccctgccaaaatccttagcccaatgtttttaattttttttaccctctttaattg

SEQ ID NO: 26773 - DNA, 2422 bp, Arabidopsis thaliana landsberg
ttcaagatagagtctatttcattattgactgcttccttccaaaaaggtgcatcacgggtagacatggcttctgaataagttcttggtacgttttcagctaaaaacgccatcaagaaatcatcaccgaaagatttctctttgcgagctcttttgttccgcctaggttgttcttcaggttcatgttttgtttcttcaacagtaatagtggctttcgaggttgctgcatcttgttgatcacgagttcgtttttgagttttcctacaaggaaaaatatcttcaaaaaaacgatgcattctttgattctataactgtattttcatggatatctggaatatccgatttataaacaagaaatcgataagcactgctgttgtgcgcatatccgatgaagatatagtctatagtcttaggcccaattgtgacctttttgggaggtggtacagccacttttgttagacacccccacacttttaggtatttgtacgagggtactgtacctttccaaagttaatgtggtgactttgcagtcaccttatgtggtatcctattaaggatgtagttagtggtaagcaaagttttcccccacatgttctgggttgataataggtttttagtcaattatcctaaaacaccaatcatgtcgttgtagtattttaggtatcaatccaaatgggtgtgatgctaacaatcaagatgtgatcagaagtcactaagtcaagccaagcaataacagattttggtgtgttctagcagtcctaagtgaacatgcagaaaacagaaaatcaagtagaaacaataaaacactcgaccaacacagctcgatgcagctcaacacagggtgtggtcgagtgacaggtcgagtaacggacagaaaatgtaacagggatacttgactgcagagtctgttgccagataactgggtggtcgagtatcaggtcgagtaacagcaaagaattgcagggactaagcaacagatgacaagatgcagtaaacaacggtagagtaaaaaataaaattaatcagataaagaattctcgaggatggggtaattgagtagttttgtttcctcagtttacaggtgattgacatggctcaataaattatccctacacaacaagttcattaaccaaatctaagtaccaccgcaacagagaccctcaagttaacctagtcccagactcaatcaccattgacgagagctaacctaacaggcattacgaatcaacaagttaaaggcaaaacgctccctgcaaccaatactttggtacatggacacgaatctctggaattagttgtttaaacatttcatcgaacaccttttgggcgcggaaatgtctgggctcaaattctggttgatcagaaagcaataggcattaagaacaactaatccagaagggatctatcaatcaaactcaaccacctagcatactgagaattctaaactactctaatccatcctcagaaacctattcactactcagacatcattgaagaaaacataaacgttgaatagaatgaaaacatgataacaaacagagtaatagcaggatgataacaggatgaacaatagtaaacgaaatcaagaacaaataccgaatatttaatactgaatagataaagagaaatccggattacaaaaggtcaagaacacagtgtctgcggaataaaacttagaaaaaacttgttctcgaaaatgtaaagtacgtgctacttatagcaaaaatattccgaaaccctaatactcaaaacgacgcagtattgagacggattaagaactgtactcgacccaggtgttcgagtgagaggtcgagtgataagctagaatcttctttttttccttgtgctcgagtgtctggttgagtgcggaatggagaagactctgaagctcgacatcaagtatgtagtcgagtggtggtgatggtgatactcgacttccaggtagagtcgtgtgatcgagtgatggtgatgtggtggacgtgaagacactcgaccagggggtcgagtacagagatcgagtggtggtcaggtggtggaggtgaagacactcgacctcggggttgagtgatgtgatcgagtgtctctcgtgatggtactcggccagggggtcgagtgatgaggtgaagtggtgatgtcctctactcgaccagggggtcgagtggtctgttgaggttgtgaagcgtctactcgacctggggtcgagtggtttggcatgatcgggtccgcttgttccaattagctcgtcaacagctccgagtcacctcaaaacaacacaaatatgcaacatgcatgcaaaactatcctaaacatgcaaagtgatgacaaatgatgagaaatggtatccaaccccgatgatatgatgctaaagtgatgaaaaatgaaaagctctaaacatgcaaaatacacagttatcaactccccggaa

SEQ ID NO: 26774 - DNA, 1394 bp, Arabidopsis thaliana landsberg
aacacccattatatatgatatctactttccaggtatattttggtaaagatggaatcatgaaaccttttcctttttgatgctagagctcgttgattgctctattggccatccatatagggaagtaatctgatataactacgtacttatacttatgtaggaagaagatttttcatttggcggtgatattcctcatgcactttagggctcatatatgagttatattcaaatttaaattggttttaacattaatatagaaaaagtattttttccatactctagtaatttcattattaatgtcattgtggttgttgatttggtcacaccagctatatatattttgttattttaaattttgcatatagagagacgactatatgtatccaaatccctaatttgatgggactcacgacggtttgaacttcaattttttaacaaactacagctcattgtagaggtcatcgcaataattaacttacatgtccaatacgtcgactttgcaaactaatactatgttatgatgtgatcgttttatttaattaaataaaatcactacaaggttcttcatgaagccaaatataacgtatcagactcaaattcgaaaatgaaaattaaatatatttttctaaaacaccacgagattttcctattatgataacttatcattttctcatcacaactcatgtacaagttgacttttgaagttcgaagatatctccaaaacaacaaacaaacgatccacatacaagttgaatattaaagatctttctaacaaaatcaaatattaaacatccctggtactaatttttaattctgtctatgtcgcgctctatgtatgcttatatatagacttttctcattacgtatacttcaaagttgccattttatctttctgttaattgttttccaaaaatggccgataaaatgttcaaagcattgttgtgggcttttgccacggcggttgtgatggccgaggctgttcgtggacaactagtcccttgctatttcgttttcggagactctgtcttcgacaatggtaacaacaatgagttggataccctggccaaagtcaactattcaccttacggtattgattttgctagaggtcctaccgggaggttcagcaatggtcgtaatattcccgactttatcggttagtcccagttttggtttatctctttgccaatattgtttttgataaaattgttgatatagatatctaaagaaaaaggtagcaaaataatatctctttgccaatattgcagcatgatatacattgtttgataataataataaaactatgatatacattttccgatatgagtttgatttcaacgattttatttcagctgaagaattgagaattagttatgacattccaccattcaccagagcat

SEQ ID NO: 26775 - DNA, 1344 bp, Arabidopsis thaliana landsberg
  unsure (1)..(1344): unsure at all n locations
tgtttaggttaatgatattttgaaagagattaaacaaaaatggtatttgataaattttctcaaaaaaaaaaatctattctctcatggaaactaaattaaatttaaattaaacaaaataagaaaaattaagtttggaaaatataatttatttctaagttattctaatcaaaatctgaaatgtgatgctggcatagggtggcataatgtttgtttataaataatgtttaatttagataaacctcatccgatttgaataagaaaaaaatcttatgtgaaaaaaccaaatttgtaaatttcttttgatgtccgaatcagtttactattgagagacaaaaaataaatagaaactctgccaaaatgcagagattttattgttttctgtaaatcaatttagtaataagaaaaaaaaaacaagacttatgtcattgtcccaaaaaaaaaggctaaaaacgtaaatgaatatttatctgtgactgtgtaatgtagtggcacgtgccagcttttgcaaacagtaaagctaaaaaaccgttcatgtttggatccgtcgaccaatatattcccgtcatcaccggtgacccctctcttcctctccatccaacggctctccttcttctcttcacttaatcaaccgtcagattttaatccaacggtctttattaaatctaattttatctctttctctctttaaattaaacccaaacccggtctaatttctcttctcctatttctctcttctctctctctttaagtgagcttcgccgttaaactttctccggtaccgggaaattaacgaagaaagcgaaaagtcactgttacactaatatcacaaatctctctctgtctctctctctctctttgtcgaagtcgtgcgtgatgctagttacggtggtgaagcagcggttagtgtactctcgccggagaaattggttatgaccggaatctcacctnnnnnnnnnnnnnnnnnnnnttcgttttttatcggtacggggaaatggaaaaacaggcgaagctaacgaggacacagtcgtcgttactccggtcatcgtcgaatctccgttcgtcatatcaaagcttatcttcaatcgtcgaaggcgagcaagatctataagccggagagaaagaagagaatcagagaagaacgccacctgaaccattcggctcaccccctgctaaaaccggtttaaccagaatcaatcccggtttacctttgacaatggaatctctgtctctgctaaggatctcatcggtcttcttcttcgtcgtcttctcacaaaccgatgagattctcacatcggagaatgtgtgactagctctaagacccggcgacgtagctctcttcttcgc

SEQ ID NO: 26776 - DNA, 1281 bp, Arabidopsis thaliana landsberg
caccccctaggcgtgcaggattaccttcaccaatgaggattggaggatctcatgcagccaatcacctggaatttccatcacccagatcattgtcccctcctggtaggaaaaaattgttaccatctccacctgttagaagacgcaggtcactgacacctgacgaagagcgagtctccctgtcaccagctggacgccatacttccccttcacatatcaagcaagatggatctatgtcacctgttaggggtcgaggtaaatcttctccttcgtctcgacatcagaaagcgcgctcttctgttcggcgcagatcaccaacacctgtcaaccggcgaagtcgaagatctccatctgcttcacgatcacctgatagacgcaggagacggtctccatcttcgagcagatctccttctaggtcgcgatcacctcctgttcttcatagatctccttctccacgtggaagaaaacatcagagagagagaagatctcctgggcgtctatctgaagaacaagataggtatggtcttcatgactccatttactataatcttcttcttatctgtacttgttaactccttgaccctctgtctgctttcgcattgtgacaggcttcaaaattccaagctgttaaagagaacttcagtgcctgatactgacaagaggaaacaattaccagagaagttgctagaagttgggcgtgtacaacattataaggagcaggagagaaagaggtgcattttgtttcttttcattttccaaatgattttcgtttgacttcaaatatcaaggtctgataaatgttggtttattcaacttcttaacagtgataagttgtcagagaggcgatctgttcacagacaccatggttcacagatgtccccagtagaaatttcacaaggaaggagtcggcctgtttctagtaaagtgaaagacagtgagcaggttgagaaagaggataacagcgacctggatgcaaacctttcctgtgattctaaggataccatcagacatcaaactaaggataaatatcgaagaacgtataaaaggtcttcaagggatgaagtatctgcagctgataatggcagttctgagtccgacgtagatgataggaaggaggctaaaaggaggaggaaggaggagaagaaaacgagcaaggaggagaagagacgtaggcgagaggtgagacatcgtaatagggaagaacgtcgtggtggaaaggagaaacataagaatcgagagctttctgatactgcagaggatgaagtcgagaccagtctcagggat

SEQ ID NO: 26777 - DNA, 1022 bp, Arabidopsis thaliana landsberg
ttagttgtcatcgtatgggtaacggcggggtggagttcatgcactcggaggctcggtgtggcgaagaacaacctccgagtgtctttgcctgtatccatcacagggggatatgaatgtgcccttggaaattttggcgtacctcaatacggcgtaagcatgtccggtgcggtggtttatcctaaaactaatcacaaagcttgcaagaactttgacgattttgagatttctttcagatccagagtcgctggattgcccacattcgttcttgtggatcgaggaggtgtctctctctcttcctctttgattattttgttacaatgcaaagagaagacttgtcacacaagaatttcataaaaggtgacttgtgagacaaggcacctaatatatatatgttattgtctcagattgttactttactttgaaggcgtggaatgcgcaacgagctggtgccgcaaccatcttggtggcggataacagacccgagcaactcatcaccatggacgcaccagaggatgagacgtcagatgcagattacctacaaaatatcacaattccttcagcattagtgagcagatctctagggagtgccatcaaaacggccatagctcatggcgatcccgttcatataagtctagactggcgggaggctcttccacatccaaacgatcgagtagcttacgagttatggaccaacagtaatgatgaatgcggatccaaatgtgatgcacagatccggtttcttaagaggtttaaaggagctgctcagattcttgagaaaggaggctacactcgcttcactccccattacatcacctggtaattcactcagtatcttctcttcaaacatgtttagtaacataacatttttttttaatgttcgatatatatttaggtattgtcctgaagcgtttctggcaagtagacaatgtaaaacacaatgcattaatggtggaaggtattgtgctccggaccctgagcaagatttctccagaggatacaatggaaaagacgtaattattcag

SEQ ID NO: 26778 - DNA, 1547 bp, Arabidopsis thaliana landsberg
aacaaatatccttttttggtacgatacgccgatctttattttttttaccgacctatgaattatggcaaaatatatattactaatagattccagtaagaaaagaaaaacggaaatattaaaatccaacggacagaacacaacaccagtggcacttttacggttttacccaatcaaataaatatccagaccgaagaagcttttactttttttgttttctctctcttccacaaagtcaatcacatgaaaagtcgaaaagccaagtggaaattacttattatggtaatgcgttactttcccattgaagggaaattttcaagattttttcctcttctattttcataatgattaagtaactttggattatttgtttatgggacgagacgacctaccgtttcatattatataacgtaaataaaatattatataacagaaatttaatgattttttgcttttttagcaactatatatgattggattgctaatataatggtataacagtttacataagagggttgaataaattgtttcgaatcatgaatatgatacttatacatagtgatatatctggtaagccttattcataatcagtaattccatgcatggcttgggatgccaatgtcggtcaattggctctctgagcttccgtctccacgactctgtgattcttcgactttttttgtgagttgacttagcaaagttctgagaatcatttgatcaggggaagcattaaacaatgggctggagttcttggagattaaaccggattggttggtttggttctgtgacaaattattggagaagcagggtacgtgctcattgatgatgtagtgatgatcatcactgagataagaagagggttcttggtcaaagttgatgtaaggatccatcagtggaggaagcgatgcagaggctgtctcatcaaaacagcttcccatgttgtctctacatataactccttccgtattcttatggaataccctacacaagacccagtcttcctgattccctcaacaacacataaacacgtatattactcgttacagatttgcttagaagagattaactgacgatcaataactggattatttaactgtgtatacctttggagagctcagagaatgattgggaggatgatgagatccttggagacggaattcgtgcatgacccaatcggttttacggcctcgaggagctcgaccttgatagaaaaccaatgtcttcctcatcccaactagcttaccctttcttagaatggttctgtctttgccggtggctttccaatatccggtggccgttgctcggttagttctcagccccgtcgcgtattttcggtctctttggctgtagaaataccaatccttccctcccacgcatgccatttctaatcatttgtttgaaacatacacacaaacacgcttagttgtattatacactacaggataatgaaactgatcatgtgattaaatgttagcgccaaaatttttcctcccaatagtagaaattttgtccttttgaataaaaacatttagcttttaaaacttaacttg

SEQ ID NO: 26779 - DNA, 804 bp, Arabidopsis thaliana landsberg
tattgattactatctatattattcaaaaggaaagattccatctgtctgttgttataccacgttcttccaaaaaaacaatttatttaggtaaataattaatcaagcattttcatattatattcatgggtgttttaatttatatataaaagattattcaaggattcttgatatttaaattcatctgattttcttcactttgagcaacaaacaatgggagagataatgaacgttgactttgtaaactgtttgatcttaatcctcctctgcctcctttcaatcctctgttactctttcttcttcaagaaaccaaaggatggtttcaatttgccaccgagccctccctctctaccgatcattggccatcttcatcatctcctctctctttttatgcacagatctttgcaaaaactctcctccaagtatggacctctcctctatcttcacgtcttcaatgttcccatactccttgtctcctctccctcaatagcctatgagatctttagggcacaagacgtaaacgtttccactcgcgacttccctacgaatgaggggtctctcttcctcggatcatttagcttcattaccgcaccttacggagaatactggaagttcatgaagaagctcatcgtcacaaagctcctcgggcctcaagcactcgagaggtcacaacgcatccgtgcaaatgaagtagagaggttttactcaaacctattagataaggcgatgaagaagaaagtgttgagattgctgatgaagctatgaagctagtcaacaacataatctgcaagatgattatggggagga

SEQ ID NO: 26780 - DNA, 1098 bp, Arabidopsis thaliana landsberg
tccggctatgtccataggggcattgcgcacttgatctagcacgtttatcatgtcggtccggctgcgctgtagttggtctttgcgcggacagtttcatggtgtagactttcgcggatagtcttttgaggaagacttcagttttgagcatttgttgtgctagtctggctgcacccttaggcgacttttgcgcggatagtcttttgaggacgacttcgattttgcgcacttgttgtgcgaatccggctgcacccttaggcgacttttgcacggatagtcttttgaggaagacttcgattttgcgcacttgttgtgctagtccggctgcacccttaggcggcttttgcacggatagtctttttgaggaagacttcgattaacgcacttgttgtcctattccggctgcacccttaggcgacttttgctgtcacacccggttttagaaggcaaaccgaatgcgaaccatgtacgtgccaggatcagttattcacgtacacagcagttacataacatggacatcatcacacagtgctcaaaatagtattaaaagggaaataatagtcgattacatcatacgtctgagacgtccatatagtccttacaataaatcaaagtgcggaaaagaaacgtagataaccgcggccttcacaggcagccaactgggggttgccgctaacccacacctagaactcgtcgtagtcttggaactcctggaagtctccttccacagcttcatcttctcctgagcagtggttgcaatgctgacaacctggggatgggggggtttggtgtgtagagcaagggtgagtacacatcaacatactcagcaagtgtcctgtttggctgtagtggactagctttatgtggggataagtgaagcagttgcttttagttggtcagatcattatttactaatagaaagccaggttttagcattaacccaagttattagcccgatgtaccctttccaaacggaaagaataccacttaccagtaccatagtcataaccagaaccatcgatctcatagccacctgtaccataatgtctctgatcaagtaccactaatcactggagctcccttggccgctcataaccgcga

SEQ ID NO: 26781 - DNA, 1557 bp, Arabidopsis thaliana landsberg
tccgttttcgcagttcgatcaaaaaatctaattaacctgattacttgcgcctgccaagaaaacaaatacagtgtaataatgttcagaagccaaatcttaataaccacttaggagaagtgtatccacaagaagcggttgaaacagacaacacacaaaccctttgaatgtcattctgaaccaggagactctgcaacagtgggaggatttcctctgatgtggaagattcacggttcacatgactaactatatagccgttttttggtttctcctgataaggaacattgttttcaaatgtgagtaccaaggaatcacaaactaagaaccgcatgacattattatattcaaagtaaacaaaaattacctgctcatttcctggttttctaacttgctttgtatccgctaatggttcctttgataatgtggaagattcacggttcacaggactatctgcgtaaccattttttggtttctcctgataaggaacattgtttgaaaatgtgagtagtaccattacggtaaggaatcacattctaagaaccgcatgacattattatattcacagcaatccaatactacctgctgatcacttcctgcttttctaattttctttgtatccgctaatgggtgtagtacttgacgtggctcttcaaaagcgagcttctctgctgctctatcgctcgagttacatgcattgctttcattagaaatgataccaacttgatatctggttcaatatgtttatttcaagcttgtgtaagcaaactaatgagatataggtttgtatagagagagaaatgttataagagtacccaagagccgggaggaatttgcgatgaaacgaaggaagtaatgaaccggttaattgactgctactctcactcaccatatcctgtaagttgttggaccatgatatgtcaagacaggcacgcagagatatgccttcatatgacaaaaaaaaacacttgccttttctgagaaatattccaaaggcatagtctgtgacctttgtatcactggttttccttttggtacatctccatttctgttcagttcctgtatctctgaattatagatttcttcatttggaatctgataacagaacactgaagcattgagaaggtacgaaaaaaaactagttttacgtttactctaagatatgaccttacttacaattacaagtgatgcctgccttctcaatgcttcaagatcaaagttccaagcactaattcctctcatatactcatgctgagacaactgttctttgtcaccatttatgcctttgaacaactcagcctctgcctcctgtagagcaaacataagagaaaatgcagacctttagtcacacctactaatatataaaaggtaagtaatgaaaattcgaagttccaaacagataaggaaattctttgaactccaccttgagctttttaaaacgttcaccaagtggagaaagaccatgaagaattttacgggacaaataatctgtagaccgagcatgtttgaagaaaggatgtttcagaagttctgcttgcagtggacgctttttcggatctttaa

SEQ ID NO: 26782 - DNA, 1793 bp, Arabidopsis thaliana landsberg
tctagatcttgcaggaaccttttaatctcaccgctctcctcacatgacaaatccccagcatgaaaaacataaagtgaatctttattttcaatccagctacaagctcgttttttcacatttccaatacgtttcatctcccatagaagagattctgaatcttaccatcaaacaaaaacagcataagcattggataatgctatgtacgcacttgtcacgggctgattagattgtattaatggcttgctcgcttcacttacaatctcaactcttccatgtaacctaccagctgagagaagagctccccacaagagcgcaccttgctctgctccaacttttatagttttcgccaattcataagcttcatcaacacgaccaaatcttccaagcatatcaacaacacaagtgtaatgcctcgagtcaggaaccacaccatacttctcagccattaaactcaagtattctaggccttcgttaaccagacccgaatggctacaagcgtgtaacacgccaagtaatgttacatagttaggctttattctccctgcaaccatttcatcgaatagtttaaccgctgcttctccaagtccatgctttgccttcgccatgatcatagatgtgtacgaaataacagaatgacaacgaattctcaagaagattttctccgcacagcttagagatccgcatttcgcgtacatatctagaagagaggtagcaaccacagtgttcgattcataaccacctcgagtaactaacccgtgagcaactttcccccattgcagcctacctaaactagagcatgcgctaattacactagccagcataaactgattcgccctatccgacgtcaaagcagcattgaatgatctaaacaactcaatagcttcatggccacgagcgttctgcgcataagcagtgatcatcgaggtccaagaaacaacatttcttccatagccaatcatcgagtcgaaaacccgtctagcggtttccacatcgttgcatttcccatacatgtcaacaagagaggaactcactacaatattccttctgagccctgaaatctcaagacgggcatggatgtttttaccgattcttgattcagccaaagcagaacatgctttaaagacactagcaaacgtgtactcattgggaggcacaggtctatcttcatgcatcttctgaaacatagaaagagcattttgaggttgacccatgtcgttatacccagaaatacccgaagtccatgaaaccacatttggttcacacatttcatcaaacaccttgcgtgcagtgttgatttctttgagcttaacataactaataactaggtgattcacagtgaaagtgtcgctcgcgaacccaagtttcagagtcagagtatgtagtaaattcctgaaagcagcgttggtagattctgaaagcttgtgaaccaagaaagctttggttttgagatgaaagaactcatttttgaactgagggacgaacagagaagttgcaggggctaaatggacattttggatgaaccctttcttcattgggtcaattggtcatgttacagattttggattttcataatctgactattgttttgagaaatggtggacgacaattgtgttaatagtttaatactatatctctatagaggggatatattgtttaatgggcttcctccatttgatttttttgaataccggatttcataacattaaatccttttctttttaacactaaaaggagaaagactgatcgaaagagctttaatttcattttatctgagagtaaaatcttaggtttat

SEQ ID NO: 26783 - DNA, 738 bp, Arabidopsis thaliana landsberg
tcctatcttttttttttttggggtagattcgcttctcctatctagctatccgtctcttcgagatttcttctactcacaccaaaaaagaaaaaggaaattttttaaaaaaaacacaggctatactctcaagagaagttttctatttatttgtgatttaatattgatatatgtagttttattttgatggaaatgcacgatcatgaacccaagtaatttgaattcttcctgatttattcacaacataaaataacaatttaagagagagatatataaggaacaaaataactaaaaaaaattgtcaataaatggtcaaatactccattaatttttgttgctgtcaacacagtactccaaaatccaaataatttcaactttcatgatttgattattgtttataatgcatcatttaaatactccataaacatcactaggccagaaagatcctttaggctaggttttgcctacacacaagacaagttggtatttaggtccatttattctccttccaatgaactatttttgttttttttactccattactgttttcattattttattttaaattgcactaaagtgattttaagatgtcaggatacaattcagaatctctgaccactaagttagattaaggcgctcaagtattaaattttgtactatgtacatgtacactgttttaaatgctttaaatgatagaatggtaatgttacaaaaacaatttttaaagcaaaaaaaaaaaaa

SEQ ID NO: 26784 - DNA, 1993 bp, Arabidopsis thaliana landsberg
gcggaatgaaactaccactgacatagcaaagcttatgtaagtcttttattttattttgtttttggttttgttttttggcctaagaagttagttagctgtatcacaacagaagaacctttttgcacagaggatttctgacccacagatgcaagcacatcagttgaggtccttgaggatttcagacccacagatgctgatagcagttactgtgatgagtttctgttacagcaagacaaaaataaattagatatgctgaagaatgcgagtttatgtttaaatataaacctggtgttgttctctgttcatggttttaacaatagcccgagcttttgctaaaaatcttctgaagacttctggagacagattaaaacaattactaaatgtgcagtgaagccgttcgaagctccaaggaattgacttcatagacacgcaaccgtgcacattcaaatgtactagactttggggaagctctgagagggatttgaggtttttgcaatggcgcaatctaaggctttctaatttagggaggagattgatgctttcatgaattgtgctgaaaccgtttccgccaagatccaatatgtttactgacggaagcccacatatctcttttggtatatccaccaagcatgcgtcagaaaggcataaagatacatgaggttgttgttttggatttggcagtcctgaaacgagacgatagcacatatagaagttccaacagttccaagaagcccacattccctccaatgtcgagggtgaatcattccattacacacaaacgccaaacccaaataccctcgtttcaattcccagacagtcaaaatgaaactcaaacacacataaacaaaaaaaagaaaaaaaacaaagaggccattcttacctggcacgacggctagagagctaaaagttgatagtcaagctacacatcaaacgaaatcagcagcactcaccaaaatgagtggggttaaaacaatcatcatgcacgaacaaataaccatttcagattattaacgtgagagaaaattatgaaaaaaaatttcttcgtacaactgaaaaggagtcttacagagagcttaaatactagagtcatacatacaagggccaaaaactattttaaaccagaaacagccaaagtaggtctaaaacaaaagattaactttctgctcttaaacttgacagggctcccactcagaaaatcttagccgtgtgcatgatcactgaatttatatttccttcttggagttccacttgcatcctagtttgattatcatctcttcctgatctctgcttcttctttggccgtccattatccattcttgtttttttctttttctttactcttccatcaaccccttctgtagtttcttgaaagttcttttcaacaggcataacgtactttcctttcgttttctttacccttccatcaaccccttctgaagtttcttgaaagctctttccaataagcatatcgtactttgtttcaagagcactatttttgtctttatccttagcatacaccaaacttaaaccacacttaaacaccttgtattttccattctcacttgtacctcctgtcacagtaaatgtaagagaggcttcggtaggattgcattcatctgagttaccttcttcatgacattttatagtgtgtgggcaactggtgtatccaatgaagacatggtctagctcaatcttatctttcccgcctccatgtatggtccaacttcctactggacaagaatatgggacccaagacttgtcttcatcttttactttaaaggtgcaggtcactgacaagcggctgacttgatcttgggggtcaagacatgagattacagcacatagagcaatcccggcaagcttcttgtcatgccaatgtgggaggagttttacttgtactcagatccaactgtgtcatgacacaaccaagaatgcacttcacatacaggaaagcatgtgctgaacatagattctgaaacacgaccctgcaaag

SEQ ID NO: 26785 - DNA, 1426 bp, Arabidopsis thaliana landsberg
aacatctgtttccttctagactcttcgcatttacatcacactgccgttcatataaaacggcaaagttcgtcgtcgttggatcacaagaccatcaacaccataaggctataaatccaagctaaaaggtagtgattaactccacaaaaccagaaaaactacatttctaacatatagaagaaacagagaaaaagagagagagacccctaatggctgagaaagaagaagtgaagcttttggggatatgggcgagcccttttagccgtcgggtcgagatggctctcaaactcaaaggcataccgtacgagtacgtggaagagatactggagaacaaaagccctttgcttcttgctcttaaccctattcacaagaaagtccctgttcttgtccacaatggtaaaaccattctcgagtctcatgtgattcttgaatacatcgatgagacttggccacaaaatccaattctccctcaagatccttatgaaagatccaaagctcgtttctttgctaaactcgtcgatgaacaggtaattgaattggttcaaacatgcatgtcaaataataaacaattggttctgctttgttaatttatcaaacaagtatttttctattaacattagcgattatatgtctctgtcattgtagattatgaacgtggggtttatatcaatggcaagagcagacgagaaaggaagagaagttttagccgagcaggtaagagaactgattatgtatctcgagaaagaacttgtcggaaaagattacttcggaggcaagactgtcggattcttggactttgtcgccggaagtttaattccgttttgtttgcagagaggttgggaaggaataggattggaagtgattacagaggagaagtttccagagttcaagagatgggttaggaatttggagaaggttgagattgttaaagatgtgttccaccaagagaggaacatgtagaacacatgaactatatggcagagagagtgagatcttcttaagaaaacaaatcatgtttagttcttgatcatgcaatgtttgtatggttatgttgttgtttattttattgaatatctttgtatgttgtgtggttgagaagtgaggttttatcatcatctctcacgttatcttatttggtcccagccactatttagaattaatggtaaagctttggctattttgtccacgttatcttattttgttcttacttctcacgttatctcagattctcaatatggttcccagacaaatattgaatcagctacaaaagatgatagaatttgccacaatcttatctgatacattccgtcacaaattttataaggaaacttatacagctatcttttgatgtcaatcaatcacaaaatttccgcgccttaaaaagaaaaattgtaataagttttcaataaagtatcttttgtgactcttt

SEQ ID NO: 26786 - DNA, 1237 bp, Arabidopsis thaliana landsberg
aagtgaaccagaagaatttggtgaaaaaccaaattgaaaaatctatataatatgtatatgagcttgaaagttctaagttctaccttaatggttggaatattgacttttgggatgcttttcttcaggttgtatgctataagcaaagattcaatgcgttgcataacagatgggataaaagtatatgaatagatcatatcaactgatattggggacaaaatgacatgacaaagctcaggaggtagttcaacaaattccctgtcatgctctgcaagataaggaataaggaattcaacaagaaatcatgatgcaatcaatcacagattgtggttaagagattaaacctttctccttcttcttcttggccatgtgaagataactatgcaacgtgaaaatgtgtcatccatttagaagaggttcatccacaaaatttaattgaatcccatgcctgcaacaaaattatagaatgcacttcttgaaaggagaataaaataagcagaagtatatcaacagtgagaattatatgcacctttcctcgtagtactcaatgtaagtctgatcgccagaatttctcttggtcaataatgaatttccgtttagattgttgagaacaccttttgtgcagtagacgtatccattatgtggtgtgtaaaccaatgcattttgtacgacacaagtacaaaacaagccgtcttttgtgtgtagaatgcgagaagcaccgttggtagaacaattttcgtgtttttccaaaacctcatgagaagttagattcacggatctgatcacttcccaatcaataagagatgtttcatgtgaatgagtggatggaactagtagataatcaagtgccaccccatctctgagatgcaatccattcaatgcctccatcaaattttccacactgtgatctaaaagaactcggaatagagttatctgaaatcttctacagaaaaggacctgaacaaaagaaaatacagagactgatcgaatttggaattcaaatgagaaatgattcataggaatttaactgagatgaatacctcttcttgtgtaaggtgaaaagctcccacataactcaatgtcacagctattgtacccctatgatcttccaaccggaagcttgtgttcccaatgtcatcttcaagcacaactctggtgcctagtaaaacatcgtttaaatgaaaatttcttggagagtttggcttcattcttattaagtagaagtggtatgttgtctccg

SEQ ID NO: 26787 - DNA, 979 bp, Arabidopsis thaliana landsberg
gttgcttcgtactttcgtgtgtgatcgtgatcatgtagttttcatgatcatgatcatatgtaagtttaatattggtttgggatctgctgcttgtggggtctttgttcattttgtttaaatggtggcaatgcaggacctgaagtcgcagctgcaagagttaattccggaacagcaggttagattagactctgtttgctttaaatgaaaatttgtgttgttgacttttttttttcattgaatgtgtgtattatttgttatgttagctgagattgtttctaagttaagaaggcaggctagttgtagtgaatctctttgcttttctagtttcctcttttctcacaagaattttccaatttcaggaccgtctgaagaaactgaagtcagaacatgggaaggtccaactgggaaacatcactgttgatatggtagaaacaatcatgattttcacgtttttggtttgtttatatgattttcaccttccattgcataactcatcataatcccctttgaaataaaggttattggtggaatgagagggatgactggattgctttgggaaacctcattgcttgatgcagataaggtatggttataattttgatcacatagataattttcaggtcagatcttgaattagaattatataacatatgatattatcttttgtatcagggaatacggtttagaggcatgtcgattcctgaatgtcagaaagtattaccttcagctgagtctggagaagagcccttgcctgagagtcttctgtggcttctgttaactggaaaggtgtgataatcttaaaaacattttatacatacaataagtttcaactttatatatgaatgatctaaagtatagttttccctcctttcggtataggtgccaactaaagagcaagctaatgctttgtcaacagagatggctcatcgtgcggctgtgccaggtttgtagttcacctctaggctctgtttgttatgac

SEQ ID NO: 26788 - DNA, 903 bp, Arabidopsis thaliana landsberg
ttgaaattaaaacatcacaaaaggtaagcaaacgctttataggttattaccggctttttcctcttctcgcttcttggcagcttcttctctctgttggcgaatcagagccaaacgatctgtacacacacaaagaggacaagataatcgataagcaaatttggaaacgtagaaagaaacaactgagaacaaaagatatattcttgtttacccaagtccttccttgcttgttcggttttgccttgctcttgcaacctcatgtatcgctcatgagctcgctgcttctctagctcctctctacaagattaattttaagacgctaataatatttagaggattcctgaacaagaactgttgaagaatatagagcttaagagtgttttagtagtagtaacagacctttcacgccttgagagttcagtggttttactagcctaacaaaagggaagaacagaaagaaaatcccaagttataaatacagacaaacatatataacagatttacagaaactgactactgattagatgacttacatcgaggtcttttgctttcaaggtcttttgtcttactctgttagggttatcaacttcgataacagcttcagctcctttcttcttcacctgatattataaaccaagtaaagataaattgtccaacaatcataatcgatgaggccgcagacaatgcagaagttttcactcacatcagcttcagctagggattcttctgcagactcctcctatgactcttctacaacattttctctcgtactcagcttctttctgatgatgtcattagaagaacaatgattcacccccacactcgcactcatcaacaaaaatgtaaaagccaacatacagaaatacctgtttgaatgatcgaggacgtgcagcaggtgtgccagca

SEQ ID NO: 26789 - DNA, 1279 bp, Arabidopsis thaliana landsberg
tgtttgttcacttttgtaattaagattctcttgtagtgtatatggagatcgatttgggagctaacgcgtttggtatcgacttccatccatcgacgaatctagtagctgctggtctcatcgatggccacttgcatctgtaattccttctaaagcccttctctttgcttcttcctttcgttttccacattcccaagaatcatcaacaatctatgtaatctccaaatttttctcttgcagataccgatacgactcagattcttcacttgtcaggtatcaaaacgctcttttcatctccaaagtttgtctctttcgttgactggacagactaagaagagaatcgctgaaatttgtgtagggaacgtaaagttcgtgcccataaggagtcttgtagagctgttcggttcattgatgatggccaaagtttgttcctttaaacttcaactatctgagctcaatatctgagctatgttttacattatatgtttttttgttgggttttaggaatcgtcactgcttcagctgattgttcaattctagcaactgatgtagagactggtgcgaaggttgcacatcttgagaatgctcacgagtatgcaattattccctttcgttttttaaattggatacatctttagctgactcgtaattgtttattgattgataatgtttcgctttgtttactctagggatgctgttaatactttgattaatgttactgagacaactatcgcttcaggagatgataaaggctgcgttaaggtctgttacattctctttcgtctttaatcacttttaaattgtatagcaactataatccaactcactctgatgctatctctctaatttttgtgactgaagaattaagatctgtgttccttagtatttttagatgtgtcatgtgtgtgtgtcttcagcctcaagaacttagttattccctacctgaagattctttacccaatttttatttggtgcattactcatttggagtgaaattatgtgctttgttttctgacactgtatgttcatctcctcagatttgggatacaagacagcgctcttgctctcatgagtttaatgcacacgaggattacatttctggcatgacctttgcatctgattcaatgaagctaggggtaacaaggtttggatttttgtagttatctgattcgatgaagctagtgtcttttgagttctcatagaagacttttctgcttatttgttattttggtttctttgacactggttaggggagaccggactttgtctggctccatcctta

SEQ ID NO: 26790 - DNA, 1203 bp, Arabidopsis thaliana landsberg
  unsure (1)..(1203): unsure at all n locations
aaagaggcgtgccacttgagtcttctagacgatatcgacacaaagaatgtgcttgagaggctacagaatgcttatctctatcaattacctgaactgaaggctagctgcatgagatatcttgtgaagtttggcaaaatatttgagatccgagacgagttcaacatattcatgcaatgcgcagacagagatttgatttctgaaatcttccacgaagtcctcagtacctggaaaggattttaggggaaatcagaaagggtatgtgtgctataattatacaaaatacatttatggacactgattttttgtgcaaaaggatttgttggtctttatgtacagattaaagtattgggggttttaactcaaaacccaagtattgtccttacaaggataagacagcaacatgtaaattcatgatttgattgaatgtgagcttcttagcttgaactttgaattgttaatctataacactaatatagntttcttaacttttaaagtaaaatctacaatcatcttttagcaaatttacccgattcatgatactaaagttataccaagctaaaaagcttaacatacatatcctcccatgatctgtaatcttccctagtttattgtaatggtgacagatgttataacatatcatgctacaagcaaattcaacaggaatggttcagtagtttcagagaatcaaccaactagtttcttagctaacatgaaaaattcaaaacagaggaatatatacattcttctactctaagactagaatctgtgctacataccaatgtgagtactacatggtttacagaaaccaaatctccggaaaaaaataatcagaaaacaactccctgaaactgaatcaatagctacataagcgatttcagatcgtcttcaatggaaacaaaatnnnnnnnnnnnnnnnnnnnnnnnnnnnnnnnnnnnggaaaactaagaggaaattacatagaaacgaactcgaatcaggaaatctctgtgactgccaaataatcagaaactagaatgtcgcacgaatctgatatatggaatggatggtgttcatgcgtaggaaaaatcaaagtgaaaaagaagaatcagacaagttaaccgatatgggtctaatagaatcgcaaaatgaaaacgacgaaaacaacaaatggaatttccttgcagaggaaacttacctttgacagctacctatcaccaccacca

SEQ ID NO: 26791 - DNA, 562 bp, Arabidopsis thaliana landsberg
aaagtgataccatctcttgctcatactgaggtccagaacttccccagaggtgattgtacagttctaagcttatggtaacttgattcaaaaaattcagggcataatctgctgacacaacacaaacagaaatgtcgattctccaagagtagtcttcacacgtcatatcttagagtgctagcaagtccttgtaaacaagaagtgtgacaaactgtgcatcaacattcaggctattgataaaatataagtctgatcttttgtattcagatcttattattgcttcttactgctcctttctgcagagagacgagatgtcagagagaaaatttgtttttgcaccccacttttttttttttttttttatatttctcttatcttgttgcagggtgtattgatgctctttcttacttgttctctcaatgtttttgtttgacatctcttctctccaaagtgtaggtgaacaaaatttctcctttgttcccatcgggttagtgacaagaatactcctttgtcccccgtaacttagataagctcatgcttcatcctgtgaatacatgcaattttc

SEQ ID NO: 26792 - DNA, 1521 bp, Arabidopsis thaliana landsberg
  unsure (1)..(1521): unsure at all n locations
ctccgccaaaagatataacatgggcagatctctcagcgggtgtagccacactttctagtctcttccataaagtctgcgtctttgttccactttaatcagcatgtattgttggaaaaaacacacgtgaagattgttgttgttacaannnnnnnnnnnnnnnnnnnnttctgtattgacgtgtaagctacatcaacgtcaagaagcgacacgtctccagagatggtcggttgcgatttgttgtttcatggtgattgagttccgtataagaagaagattcgggaatctcaggataggatttgacgacttgtcaatattattcgagtaacatcatgtacaaaaaacattattgaatccttctgactatggttgtgacacatgcgcacagacttttgtgaacagcttgtcctataacagacagaggatgatgacatcaattctagcaagttttttttctttttctcttgccatttttaaaatctaactttaaatcagacatgcaaatctatatattatacaatacattctgattatgtaatttgaataccatcaaatttttcatcattttctactgttgtgtttcagctagaaatggtttgaatgtcaatacaactccaagtgccaaaaccacattcagtataaagaataccatttgggtgcctgcacattgatcaccatcttttagtctcacttgctcaagtttgaattcgcaacttatatatagctagttaagagatggacatgaacatgaattaggattaacattaccagggagaaaagcagcaccctgacgtttctcgctccacgaaaaactgtcaacaaaccgttattaagcgcaaaacaaaactgagaattcgataaaccaacaagttcatgttgttcttgttgtttgttttataacaaaatgttgaagcatatttaatgtaaagaaggaggtagaagaagttgcatacatgattcctgctgctgctggacctatgagcttgaaaagagacatcgctgtcatggcaattccattagctgctcctctttggtcttgtctctattattattgctaaagaggttctacttattgccggtttcttcacctaactaaatactaaaacgaatcaatgttttgtaaaaatacttaccacagccttgttttgaaggatgaataatccagttatagcagaagtctacacacacacacatacacaatgttgagaatataaactaaagtcttacttacacattcttcttattaaggttatcagaaacttacacctaaaacactctttgctacggatgcagaagttacagtcacggtaagggctaaaccagataactttgctattagtgggtaacatgataagacgaccattgctaggctctgtgagtatcaaaaacaatcacaagattagaactgtcctactaaagaaaacacaaggttttgcagtaagaacaacagagtatatagtgcttaccccagatatacgtgtaactatgataggtcctaaaagcctctctgcgtaagagtagagc

SEQ ID NO: 26793 - DNA, 1670 bp, Arabidopsis thaliana landsberg
  unsure (1)..(1670): unsure at all n locations
tgatgcttggaaatgattagttcttgatctcagtgattacaagtccaagactcaaaacactttggtttaaactttttttttttttttaacttatattccatttccattgtttctatatctatggaaatgaaaaataattcattgatcttttctatctaaataaaaaaattctccttcggtttcaaattattttttactgtttgtattagaaacagtcaatttttctaacatagtattagttttttaagcatttaaagcaaaaaaaaaaaaaaaacagttgaccaataggctatatatatgtgttggtggtatacaaaaagtgagatttatttgtataccaattctgaaacatttccaaatataccacaagaaaaatcctatttctggaaaaagccctaaaaacagaacagaggaagacgagaaaaacagagaaagagagagagagatcgtcttcttctacaacctctcaataatcaaacaaaaaaacgtgtttttttttttttttgcgaattcgatcttcgatcaagaagatcttgatctcaaaatccaaacttttcttcaccatttcatgagaatctctcgctttcaatggcggatttgttaagaaaagtgaaatcgataaagaagaagcaggatcagagcaatcatcaagctctgatccttggcaaatacgaaatggnnnnnnnnnnnnnnnnnngaaccttcgctaaagtctatctcgcacgaaacgctcaatctggagaaagcgtagcgatcaaggtaattgacaaagagaaagttctcaaatccggtttaatcgcacacatcaaacgcgagatctcgattctgcgtcgtgttcgtcacccaaacatcgttcagctattcgaagtcatggcgacgaaagctaagatctatttcgtgatggagtatgttcgtggaggtgagttattcaataaagtagctaaaggtcgtcttaaagaagaagtagctcgcaaatatttccagcaattgatctctgctgttactttctgtcacgcgagaggtgttttatcatagagatctgaaacctgagaatctttagttagatgagaatggtaatcttaaagtctctgactttggacttagtgctgtctctgatcagattcgtcaagatgggctttttcatactttttgtggtactcctgcttatgttgctcctgaggttttagctaggaaaggttatgatgctgctaaagttgatatttggtcttgtggtgttatcttgtttgtgttgatggctggttatctaccgtttcatgatcggaatgttatggctatgtataagaagatttacagaggagagtttaggtgtcctaggtggttttctactgagcttacaaggttgttgtcgaagcttttggagacgaatccggagaaacggttcactttccctgagattatggagaattcttggtttaagaaagggtttaagcatattaagttttatgtggaggatgataagttgtgtaatgttgttgatgaggatgaactggagtctgactcggtggagtcggatagagattccgtggcttctgagtcggagattgagtatttggagcctaggaggagagttggagggttgcctagacctgcgagtttgaatgctttcgatattatatcgttttcgcaaggttttgatttatcggggttgt

SEQ ID NO: 26794 - DNA, 1004 bp, Arabidopsis thaliana landsberg
ttcaccaaattggatttgagtctgatgctgtggatgggttttaaaaatttgtgcctaacacttatgttatcaatagatgaaacatgatctaaacaataccaaaaaagtgaaaaaatatatttctaatttatatatattcacaacacaatagacatatacataatgaaataattacgtagatctaaacagtttcatatctccattagcgagtttgtattagagttttcactgattgtacaaatttatgttgtcggagccatgaacagaaacaaaacatttatatgaatatatatttaaaatacgaggggagatagagacgtggcgaaatctgataaggagttagagatgccgaaagacgtttgcctaaacaaatccaaagtataatcctgattagcatatcttaatgcttttgttaacctaaacattgcatgtgcatttctatgtcttcactcttcttcaaacttaaaataaagcactgatatataaaacttaaaaattatttaactcgacataaaaatgaaagctaaatctatgaagcaaataaataaaaactaaagattccaaataggcttttataaagtacaatagctaactattaagggagcttatgtttttgtgttttactcgtcatgatatgctaaaattttgttataaacagttttttttaagaaaagtgtacatgtgagtggagaatgacaaatttcactcgtaaaaagctacattttacttaattttaagaaacattgaggaaacaaaactttcatcaggttcatcccttctgcttgtagctaatcactgcctaatacgtaacattcactgtgtacaacggagcgccgtcacttatttgtttccttctttttctggtaacacctaaacctttggactgagaaagagggtcacaagtcggtcaacgcgatttttaatttgtttgaccactcttactgaattagctggcacgccacgtcatcttctgacgctgacatgtcagcgttaaacacacgtcc

SEQ ID NO: 26795 - DNA, 588 bp, Arabidopsis thaliana landsberg
aatgtgcaaatacgaaagcaaggagtcaaagttaatttgcttggaatgcgattattctatatgcttccgttgtgctacttttccgtacaaggcaaggtataaacatgatagtcatttcctcacaatttgtgatgggaaagaggaaagtgaggaaccagattggtgtgaggtttgcgaaggcaaaatagaagaagtaaaagagacagggtataactggaaaggtaaaaaaacagaattgcgatattacaaatgcaatgactgctgcaccgctcttcatgttgattgtttatttgggagagacatgtacattaaacctggtgaaacagaaaaagagtatctctctttttccgatttctcatttagcgaagacgtttggaaatggatggatgttcgggctcttctcaacagttccctctctcgaccaatttgcaatggatgcaagtgccgttgtccattcccaatattttacaaaggggacaaactaatattctgttcttggtattgccttaagattgagcatccaccgacttcctcccgtgtttcttggtaatttgaagtatttttgacatgttggcttttttttttttt

SEQ ID NO: 26796 - DNA, 2039 bp, Arabidopsis thaliana landsberg
cgattaaaaaggattctttttgtgtgtattatttatcgctacaatcttaaataattatactaatcgactctgcacgatggtgatggtgtttagttggcaatactacatctagcggaaatccaaaaacacctcactgatctatcgaaacagtactatttatttttacagattcaatagaacataccctgataacaaaaatagtgacaaaccatccgagacctcctgtgtttttatcctaatctctctgcttcctctttcacgtgattgaattctttttctttgttagacattgcttaaatcttcacaactcttttgctttatatatgtctcttctcacattatcctcttcttcatattcaaatctcctctccctaactgttttatggtctcttggattctgaatttgggatcttggggtttcgggttttgaaccatctctttagactttagttacacttttttcattcttttttaagacaaaagagatacgatgaagtctggtctcatcataaccattgctctgttactatacacaagcagctttgttcttgtttctgtagcgaaagagtgtaccaacactcctacgcagctctcatcccatactttccgcagcgagcttctgcaatcaaagaacgaaactttgaagacagagttgttctctcattaccatttaactccaactgatgactctgcttggtctagtttattgccaaggaagatgttgaaagaagaggcagatgaatttgcttggactatgttgtataggaagttcaaggactctaattcctctggtaactttcttaaagatgtctctttgcacgacgttaggctcgacccagactcctttcattggagggctcagcagacaaaccttgagtatctattgatgttggatgttgatggtttggcctataacttccgtaaagaagctggtcttaatgctcctggagttccctatggaggatgggagaaaccagatagtgaactccgtggccattttgtcggtataaacctctgcctttttccccaattcaatacactttcttgattcatgctgttgatagtatgcaggaaaaggttttgagatttgatgtttggtatagattgcataggcccttataggaatcaccttttgacatttcatagacacttgaaaggattttcactcttacattgcatagaaccttaaaggaatgaccttttagttgatggctcaaaaatctgtctgtttgttttgaaggtcactatttgagtgcaacagcttatatgtgggcaagtactcataacgaaactctcaaggcgaaaatgacagctcttgtctcagctctagcggaatgtcagcagaaatatggcacaggatatctctctgctttcccttccagttttttcgaccggtttgaagctataacacatgtttgggctccttactataccattcacaaggtgaatagtcagaccctttgactgagttgaatattgatatgcttatgttttgcaagagagtaacatctctgtcttaattttgacagattttggccggcctggtggatcaatacaagttggctgggaatactcaagctttaaagatggcaacagggatggctgattacttttatggccgtgttcaaaatgtgataaagaagtacagtgttgaacgacattggctatcactaaacgaagagactggtggcatgaatgatgttctttatcagctatacagcatcactgtgagttaaaatcttatcagactctaaactccaaccttagatttctatctagctttgtgttatatcatagtgttttggactctgcagagagattccaagtatttgtttctcgcacatctctttgacaagccttgctttctcggagtcctcgcaattcaggtaatttacttgatgattagcttgaagccttgaagagatgtgaatggtaaggtcacataacttgacatgtttgtttgcaggccgatgatattagtggattccacgctaatacacatattcccatcgtcgttggatcccaacaacggtataaat

SEQ ID NO: 26797 - DNA, 1303 bp, Arabidopsis thaliana landsberg
cgtatatatcaggtatgatcaatggcacatggttttcatgtaagcagatcttcaacatatcggcgtttctcacgaaatcatttacgtcgttcaagttttactttacagttccattgttgtcccatggtgcatggtatgtcactaaaggaagtccatatgagtttgattctccttcatcagtcacttcttccacaatattcgctccttcccccgcttttcgccaagtgtttttctcctttggctaaagtacatgacataaaagacttggattcttcatagccataaccaaaagcgaaagcatgtcctgctgactctcttccataccttgaactctgtcttctaaatgtaacatcttagtatccgtcacctcctgatactgcctaactttgatcaactcctgccccaatacctgcttatcacctttcaaaatatcaacttccttccacaatccactcttttcctgagcatatgttgtacttgtactctcatgtttgctctgctcactactttgaacattcttcctcctgataacattcttcagcaaatccttttgacctctcacaaacccgtcattcgcaaactcccatcgatctgcatcaacttttctaaaaccctgtaaacaaacacatccacgaatcaggcacaagtctactcaaagatccaatgagccagatttaccctagatcaaccaacttatactatcatagagtcttcaagattgtgactagtactagttctaaacactgttccagataatagaagttgaacaaaacatctttcttcatgcttcataaaccaaattcataatcaatcttctctaaaacctatccacacgttgtaaaagcagagaaaaaatgaaactttgctaaatacaatcacaccatgtaagagtaagagacataacaaagaagatccaattgtacaaaattgaaaagagagaggagaagagaggactaacgtagatattgagctgacgaatgaagctagagaaattgctgtgtttaaagtatttaggcaagagttgaacagagaagacggtggtgtccaagataacgaagctattatctgcacttggactccatgagattatagagtcagtagtagaatcatcaaccatatcgtaacattttctcaagaacggcgccactgaagaagaagaagaagacccaccaccaccgtccgtcgatttcaccataatcgagaaatctctaaactttagatgaaattttgcattctgaaattggggatatgcccgattagtcgcatgaataaggtaacctgaagagcatttggcattggggtt

SEQ ID NO: 26798 - DNA, 708 bp, Arabidopsis thaliana landsberg
attttctagggttgaactattatgttacacaatatgcacttgacgcacctcctccgacacaacttaatgcaataacggatgcacgagttactcttggatgtaagtaaagctaattttgtgttttttgtgtgtgtgtgtgtattcttagtttctattatcaatattcatttatttatttttttgtttcagtttatcgcaatggagttcctattggtgttgtggcaagtatcgacttaaatttgataaagaaaacaaatccttttcatatttaaaaaaattattaatttggctctatttttctctttcttttacaggctcctagcttcgtctactatcctccaggattccgtcagattctaaactacatcaaagacaactacaaaaatccacttacctacatcaccgaaaacggtatgtacatatcattttatgttgcatttaaatatgtttaaccaatgaaacatccatctagatgtgtttattatcaattttatgtaacatttttaggagttgctgatcttgaccttggaaacgtaacgcttgcaactgctcttgccgataatggacggattcaaaaccattgcagccatctatcttgtctcaaatgcgccatgaagcaagtattaaatcttattctatttattcgatagacattcctcggacaactttaaatcttaattacttcccaaaactacttttctaaaatat

SEQ ID NO: 26799 - DNA, 650 bp, Arabidopsis thaliana landsberg
ggaaaatggtttagaatgaatcttttgcttgtggaaatactggatttggtttcgaccacacaaagaaactctaagtccttgttcatgatttggtaatacttccatctctttgtcttaacaatatgtagaggaagaaggatcacaactgagaattcaagccttggcctctcctctcctactggaattttatttggatgtgtcatgtttccatttaacttgtattgtatgttgggtaaatttcttgtatttagaagagccacaagaaaatttggttctgactagtgattgtatgctattttgaacttgttccaaccacattgtaatttggggctcagttccatgatttccctatcattttatttggaacattatctgcttttcccactatttaacaaatgtcttgagtgttgttgaccatacgccatttctcacatccaaaacacaatgacataaacatgacagacggggctctagcagtgaatcaatctataagattagctcacgttctctaagcccaataacatacaaatcaaggcccaatctaataagtgtaatccaacgtgactcagaagtcagaacatccttgctagttactatagttgctacttgctgcgtgtccatttgtcatttgcaaaattgtccttgtacgc

SEQ ID NO: 26800 - DNA, 2757 bp, Arabidopsis thaliana landsberg
  unsure (1)..(2757): unsure at all n locations
acccgagccgatgatttgtaatgcacgatagctttttgtttcaacttcctgttaagacaagctaggtgaagttaacataagagtataagatcaatctcagaccatacattgacgagatctcttttttctaaatgtaaatgttaccactcacaactgatgaaacaaaccagtttgatgtgaattaaaaaaaaaatatcatgagagggcttactaaatataagaatcttcttacactttgaactaatattttcagataacagagaaagaaagtatgcacaatacaaacagagagctatcaatgaccctaaaatatnnnnnnnnnnnnnnnnnnnncctaaaccctataatcaaattgactattaactgatttcatttcatgattgcgtcaaaactaattgactttgagagttgcttttcttaactatatcatcaacgttaggatcaaacaaagagaattagctaaacccaaaaatggaaagaaaatttaaaggaggattcgattactcttgcttatgaaatcacctggcatccaccaaaacgtcgacgagagtgagtgacggtgatcgcaatagctccgctgtcgtcgcgtcatataatcttcttttcgactttactgaaatagaataatctggtataataaatatgtattaatggtttcaatataaaccgcagtggagttttggtctaaattggttaactttccgctggttcagcttcttattacttgtgtcacacgaattgtcaaacaaacacaaaagagatttatattttcacactctctttctccaaaattgatattatctccactaattcacaagctcaaccatcaaccctcgcagtttttttttttaagttcttgagcttgattgatagggaaactgataacgctaagagatgtctctgttttcaaagtttgcaacgtcttcttctccattccacaaacaaatcaatatcaaatcttatccttcagacgttaaaggttaccaactatttaaccaagtcttctcctaccaaccaacaaacaaaatttaatgccatttcattgtaaaaaggtcacaaattcttaaaattagcacaagaaagtttaatgagaatataaagtcttcaacaactatcacttatttgcactagaaaattcaaagagaatataaagtcttcatctaaaaagaagtataaggctgctattttctcttcatttttacacaagtgaaaaaaaaaaaaaacatcatatgtctgtttaaaccaatcttctccatctctttgcttaaataatgttcttcttcataaaagttttcatgacgaccatactgtcggtgctcttactgttttttatctttgcttcaagcttcactcttgttgttggacttgttggttgtcgtcccgatcagattcaagcactgacacagttcaaaaacgagtttgattccagcgattgcaaccaaactgactacttcaatggagtccagtgcgataacaagaccggtttggtcacaaagctacaactcccaagtggctgccttcatggatctctgaagcctaatagtagcctcttcggcttgcagcatcttgtttaccttaatctctcaaataacaacttcacctctgcttcgctcccttctggatttggaaatctcaacaaattagaggtcttgtatctttcctctaatggctttctaggtcaagttccttcctcctttagtaaccttagccagcttgacattttagacctttcccataatgagctcacgggtagtttcccatttgtacaaaatctaaccaaactctcgattttagtgctttcctataatcacttctctggagccatcccttcttctctcctcactttgtctttcctatcatctcttgatctgcgtgaaaactatctcactggttctattgaagttcctaactcctctacgtcatctaggcttgagttcatgtaccttgggaataaccattttgaaggacaaatcctagagcctatctcaaagttcatcaacctcaagcatctcgacctttctttcctaaacacaagctacccaattgacttaagtctcttctcctctctcaaatctttgttgctcctcgatttttccggtgattggatatctcaggctagtttaagttcggattcatacatctcatcgaccttggaagcattgtatatgaagcagtgcaacatcagtgatttcccaaacatcttaaagacccttcagaatttggagtctattgacgtatccaacaatagagtcagtgggaaaatcccagagtggttatggagccttcctcgcctgagctcagtgttcattggagataatttgttaactggcttcgaaggttcatcagaaattttagtaaattcatcggtgcagatcttaaatttggattcaaatagtttagaaggagcactaccacatctaccactgtctatcaactacttctccgcaaaaaacaatagattcagaggcgacatacctctttcaatttgcagtagaacgttgcttgatgtccttgatctaagctacaacaactttaccgggccaattcctccatgtccaagtaacttcttgattttgaatctccggaagaacaacttggaaggaagtattccagacaagtattatgccgatgcacctctacggtcactcgacgttggctacaatcaattaacgggaaagcttccaaggtctcttctaaattgctcagctctacagactataagggtggaccacaacggagtcgaagatacatttatct

SEQ ID NO: 26801 - DNA, 1076 bp, Arabidopsis thaliana landsberg
gcttttacttgcaattaccaagagttgttaaaagcagaactagagtaagcagaaacagcaagttgtatcatatgacatgttttgctccataaaggcgctaaattattttcactaaaaatgagtacttcagacattcatagactcatcaggaagagtagttccaaagttgagagagttcctcatagttctccgaccaatccctcctccagtgccatttcctttcctcatcattgccacaaattctccatagtctatttgtccatcctacaaaaaaaaagcaaccaccataaacatttcttccaagctcttcatcaaacaaacagtaaagatcatttgtgtactactcacattatcttgatcaatgtctttgatcatttcatcaagattagaatcgtttataccaaactccttccatgcctgttgaagctcttcgatagtgatgtaaccacttgcatccttatcaaagaaagagaatgcagctactagattctcctctctctccagcttgttcaagtggattgttgcagctaagaactctccatagtcaattgttccactctcatcaacatcagcctaacacacacacacacaatgagaagatgatattacttccagccacaacaaagatgttaaaagtgaaagttgataataaaggagtagtagctagtttaccgcacgcaagagttcttggatctctgattccataagctctgacccaacacgtctcatactatcttttaactcttcaaacgtgatagtcccacttttatctgtgtctatcattttgaacagttctttgagaccaccgatttcttcctcagatagtctctctgcaataactcgtaaagccatcttcttaagtttgttcattgcagagaacttcttcaggcgggacactaccgcgcagtccaaaggtttatctggagcaaccttatcatccacaatccacggatgacctgacacaagaacatatgaatcagcttacaagaaaaaaaaactcatcaactttcgcagacatgacaacttacacaacacttgatgagcagttagcctctttttaggattgcttttaagca

SEQ ID NO: 26802 - DNA, 1068 bp, Arabidopsis thaliana landsberg
atcatccatgcacttttccgttacaaaattagagtagctctcatgtcagtattggtgtgtaattaatgccattctccgtttctttttctaatctccgagtcgaccctgagtataaagtatttttaccaatttcatttcaattttattgtataatcggttttatagaaaaaaatgtgattcattaatttaagttttaggtcacacagccaataagagttaaaagagtaattaattaaggattttaaaaactaagaaaatgaggtgaaaacttaaaacaaaacagaataacaacaatggatggtgaaaatctaaataaagggaacagtttcgtttcatcttctttgtccttgatttcctgaagaagtaaaagattcttattcatacgtttgattgataaacccttttttagagtttcagaaattagaaaccaaacctcccccaaaaaaacaaaaaaaagagagagaattagacaagaaaaatagggagaataatggttaatagcgaaacgccgtcgtatcatagtcgccggcgtctcctcctgatcaccgtggggcttctgatcacgtcgagtttggtttctttttctcatgcagtttcgtcttcttgtcatcatcgtccatcctcatttcaaggtaaaagttttgtttcttttttccatacttttaaaccagagaaaccccttttttcttttggatacaattatacaaatttgattaaaaaatggcttctgataaaaatttaagaaaatgattttaggagtgaggaggcaaattttggaaggagggaatgggaccagattggtgttagcggcggagaggacacggcgacctgaccctctcaaccatttcaatatttatgtcgatggttggaacgttaccaactctcattacatcgccgtgagtctgtcttttttaattgatttcaatattctaaatgtcaaaaataaattcttttttcaaagaaatcctatattttcttgaggcatttagacgattaaatcagtttttgggtaaaacattatctgaccacaacaaaagatatagaattgtatttatttttgaaacgatt

SEQ ID NO: 26803 - DNA, 1140 bp, Arabidopsis thaliana landsberg
ctcttttgtctcgcaaacgcctcctcatcaacataagaaattcccaagtgatccttaatagatgttattttttaccaacacagatctagagtactttccttatcatctagttcttttcttagccttttaattctcctctgagcattactatcagatgttttttccaaacactaatagctcttctacattcagtgagactaaaaatggatgaagaagtacctcgagagatatcactattccaagatgccaaaatcctttccgtgcaagaaggttcctcagcccatcttttatcacaacgaaactgtccttggaaaaattcatgatccttgataaatttaaccaataccggcctatgatcagaaccaaaaatcattgatgaacatttgggaacaaagaaatccacgatggattaccaaaacatctatccagcttgcactaagttcattgattatttcttgtacctccacatgtgaagttatttcctgtacttcctagttcctgcatatcacatttattcaacaagttctgaaaaccttgaaaagaaacatgtagtctttgaggtccacctaacttttcatcaggagatttaatgtcattaaaatctactatcatacaccaagcttcgtttatattcaaatcaatactactcaatctgtgccacagctcaagtcgatgatgtgttaccggatgaccataaacgcaagaaacaaaccatctcttatttctctgagttatctgcagatcaagcaggtttttgtcttcataaagaaaatcaatttccaaaaaaaaatttcaaaatatagctaaaccaccactctttcctttaggttctattgtatgcatacaatcataacccaaccacctgaagattttggagacaaaaactgaagtgttcatcgtctccatgaggaacgaaatatgtgggaatagccctttttcatttccttaagatgacgaattgtcaaatggttcctgagaccttggcaattccatcttaaaacgccttagtgatccaacgacggttcctggggaaccaccgtggagatgtctctcttgatacacttcgaatccttattaatagaagcctctgctttccatttaacaactttctcaaaaggatattagacctctcctgactga

SEQ ID NO: 26804 - DNA, 1711 bp, Arabidopsis thaliana landsberg
ggcaggtatataaatttcgtgttgtattgtatttgtttcttagtttgtctatacatcgtattttttaaatttcatgaacggtttttatatagatctgcaccgagatggtcatgccaatagggtatgacaaacaagacacgatgtttcaaacggcgccatttaacataacaagttacgttgacggatgtaaagcttgttttggtgttgctccgaagccacactggatcacaacctattttggcactcaggtagatttgaacgagttttatagtcacattatgaataaccaagcctatcacacaatccatttcatatcgcttttaaattacctcttacgggaaaaaactcaatagtttgatgaatatatacttattgcaggatgtcaagttaatcctgcgaagatatgggagcaaccttatcttttccaacggactatcagacccttacagcgttggcggtaaataaaccgtttgaatattgtatcattatatacaagattttaatgaatctgtttttcatgtattttcagagttttagaagatatttcagatagcatagtgtccatcaaaacaaatggtaatttatcaaaatttcagttttaattaacgaatctactgaacaagtcatttaagaatataatgatctctcatgtaaattcgataatttttctaatggaattttaaatataatcaggttcacgctgtgaagacgttggctttaaaagcaatgacgatccggagtttctcgtgaaacaaagagagaaagaaatcaaaataattgaatcttggatctcaacataccaaaaagatctacgaggtcttaacgtatcagtctaagtttggttataatatattaatataaatcaatatataaatataaatcaataattgatattagtaatctacgaaggatcgattataaatcaatttgcgctctttcgtaactgtgatttactgttattgctggtttaattactgttatcccatatgcactgggcttgacccaacaaactctggccgagctgacctgtaaaattttctactttaaaatataattgcaaaaccctttatcaaaaacaaatatatttagtttatttgaacatagccgaggcagagaagaaacattttggaatttggttggttgttttgtgctagacaatgtcactacaaactaaatatatccactaattgcatgtttatattacgatgatatgttgttttgaaattcatcaaaatatctatatttaaatcaatattaatagatttgagacgtcaaataccatcaataagtaatttttttattagcctttgatttcataagtatcaaaaagcgttgtaactatccataatacattgagaaaattaaggtttcaaaatcagggtaaacattccaggaaacattttctttcacactctttatcatggcgacatttgccgaaacagttacttaaacatgcagggtttggaactccttgttgaagtgttatttccatcctgcatatatccacgaatcatcatgactacatatacatatataataatgagctgcatatagcactgataatcacatatggtgtagacattaattcattagttaaaaacttaaaatgaaaataaagatcaatacgatacatacggtgaggaagatgttggtgagtcagggctttcctttgacatgttttccattccgttgcatgcacttagatgacatc

SEQ ID NO: 26805 - DNA, 1094 bp, Arabidopsis thaliana landsberg
taacgttatttttatccggtttcgtaacacgtaagactaatcttcattggtagttgacaaaaaattatgtttctgtttttcctttgatatcgaaacttatgttgtgtttacttgttacttccgtctattattaaaactttagtgaaaagaaactattgaaaaaatggaaagaaaaaaaaacatagttgacaaaagctaatgattatcattaacatagaatagacctcaaagatttcttaattttgttttttttgagaaaaatactatatccaaaatagacataagatagaattatagaaccatgcatctaaattatatagaaacaaagaaaaagaaattcgaaccagattcatgagagactggaggttgaagaagaggagaatagaaccagattcctaacagaaacttttgccaaaattcttgttctttttttacagcaaagccaaatttgcttacacattatttattaaagaaactaaatcatatatatggtctatcatcactggttgtggctgtaatttgttccctgattcgaattgttgttttaaatgtgtatcatcaatttcatgtatccggacatcaaaaaaaagaagaattatggatcaaaagtataaaaattcttcattaaccaaaagctatactatttgatagcttaatttgatcggcgatatatagttgaaagatatttgagttataagtttgaggtgaataaatatctactattattcacgatgggcgaatttatttatttcaactcttaaacacgatgaatgaaccatagacgaatctatgttggggccttggtggtgggtgttataaataaacgtacggttatatatttatcatgcttataattaaaaggttttgttttcaaatttcaatataggagattataacgaataatttaacggtaatattaaaatgtacaattaattacgtatctatttttatctccttttatattttaagtgacaaaataaaatagtctgtatagtgcacaatttcagattacattttgatcagaccaaaaaacttcctccccaaaggccgacatgtgtcactgcggaataatctaagattctcgttaacttcgg

SEQ ID NO: 26806 - DNA, 1240 bp, Arabidopsis thaliana landsberg
  unsure (1)..(1240): unsure at all n locations
ctaactcctccttggcccggttaagtttatttttgtcaaaaaacagcttcctctcagcatcgtgcaggtcctcttcccttttcaacaaggccactagcgcagcctcaaggtcagactcaagcacgccaaggtttgaataggggagatcatcatcgtcaggataaaccgagtgttgattggtttgtctctccaatctgtgtgtccgagcaaataatttatcgaaaagaacatttgcagactcagctgagccattgtcgttgatgttgggtcttgtattgtgcaagactgattgaacactcagtaaaagatgtctctttctccttgtaatgctcgggaatgcgacaagactcttctgcttatggtttactactcttgtcaaacaatactgcataagaaaaaatcatatggccgacatcaaaatcaaaatcaaaagtttgattattttggacagacactaatcaatatggatgcaagcaaacttattcaaattaaaggaacagtattgaaatttgcaatctttttaagccagaacaaggaacaatcagaacaaggccagcaaaagtcaaaaattcaagtttgataaagttaagagtaagtaaagtgttgtgaatcagcagcgatatataaatgaaaatataggggataatatagagaaaggtaaggaaacaaacatcgcagggagagggagaggagaaggaagcaagattcaagcgaatggcctgagagaaacccatcctgagagcataattatgcaatcgccatggagcttaaagacggaacaaaacccaaatccactggatcaaatttaacaagtgggcgttttggagaagaatgcttacgagaacaaatccaaggaagaagaagaagaatctagctagggaatggatattgttacaaaattcttttaccaaaaaaaaggatacaaaataataaatagaggctcgcgttggcttgcgagttgtggtcgccagtaannnnnnnnnnnnnnnnnnnnnnnnnncataagatgcatgtcggcattgtccaaatacacggccaagggatctatttgtaaaaataatggactcttaattacgtacgtggtaacggttttctagtatgacaattctctttctttcgcgtagtcggctagtcgcgtggttagaaatgcttacacactaaagagtatgttatattaaactggaatataaatttaagaaactgaataaaagtcatcaggcccatgacattggcccaatag

SEQ ID NO: 26807 - DNA, 1529 bp, Arabidopsis thaliana landsberg
  unsure (1)..(1529): unsure at all n locations
taaagttttatatttagtatgttggactagtatgactgattcatggagtcaaatgtattgtggttctggttttcttctttttatagtaaacaacagttcacatttctggaagaatcagattcagttatgatttttgtgtgtgctatttttgttgtttatgatatcagttttgattatgtaatttgggtaactgaaaataatttatcttagcaaaaactggatgacatataggataggcttttattccatggtctcattattgaagggttgctactacacatgttgataacttgatatgaaaagttcaaaattgatcaaaatatagaaacaattaagaaatacagatcctagaaagcaaaactcgagtatatatggattttgtttcattgttacttcagatgaaaaatagggtaaagaatggcctgggcaacaagaaaactagctcttcagctaatagctaaaggctaacaccgactttccaattgtaaatgttaccattttcatacgagggaggcagagagagaggaacaacacacacacactcacaacacatttttgacaaagtaggcgaattcagggaaagtcgggatgatcaagatgctcaaccatggactctgccaaggagagataaacacataaaactgagatcgatgagagaaacaaagcgcaaaaaaaagttgtgagatcaatgagcaaannnnnnnnnnnnnnnnnnnnnnnnnnnnnnncctaaacaatgtcctaacgaaaagttaacaattttctaagcggtattctgtaacaagatcttcaaacaacaaagagtgttgcatcaatcaagacctaaagaaacacatgtcaggttttggtatatacccattctctttgaagaagaaagagagagagagaagagactgatttatgtgtttaagcgagccagagcttttgactgcgtaccttaaatgccaaggtcaggggaattctattgtaaatccactactggtaggctttacattcatgggtccaaagccatcaaaatctgaatctgaatccatttctctgtaatcattccactttctcggagaatcctcatctggtccactcattgtcggaggcacatagagctctgaaactggaactggaagaggctcttcacttaaatatttgtcattcagcatctccatagtagtagctctactagctggatcataacagataagcttcttgagcagcgatatcacatcccctgaatggttgggaaggcatccttcaataccaagaggagattctactttagcaaatgagattgacttgtagtctggaagatcaacacaaccaggccagacctcttcatttaaatttcccagcacattggtcactctgctgatctgatcaatatctgaaattcctgggaacaaaggctcaagagacaagagttctgcaaacacacaaccaagcgaccatagatcgacctctaacccatacatcgtagatccatagagcagttctggtggcctaaaccatcgggttcccacacaagatgtcatcaa

SEQ ID NO: 26808 - DNA, 887 bp, Arabidopsis thaliana landsberg
ttagcctccttgtttcttccaagatttttagggaattcatttttcttcaatttgtttcatagagtcaaagtttgtgatagtcgacgaaaaaaatctttgtaaaaagatccaaaaaacgaatttggcgtatatttttgaagatgatatacaatcaaagactcaaagtaaggaaggtaaaaattttagaaaaccaagatgataataatatcttagatgtgtagaggatcaaaatgatatcacgaagatgtaaatatttgttttgtatttatgtagtgtaaaatgatataactatggattttatgaatttgggcttttaaagttttgaacccaacgattaaaatgaaaatccataaaatctaaaacacatacaaaaacaatatccgcaatgatgagaacacgtgtcaacgcactgacgaaacatagtcgctgagtccacgtcagcatcttcgccgtctcttccaaccccaacgacggtttaaaaaaaaaaaaaaaacatttcctctcaaattttttttcaatcaaacaaaaaaaaatcatcgctcccaattttacattcttcttctcgccaaaccctaattgtttcgatttctgctacattcttccggaaacttgttctatctctgacggatctcgaatcggtattctcagctgctgaaatctccggtgagcttttccatactgtggtcaacttctagggtttcgattatcgccatttaattatcgttttatttcatttcgatccctttcttttgattgatttttaggctaaaaatgtcaaattgatttgggttttgtgtgttatgtggtcaagtttatagcttttttttttcccggtatcgtttccaagaaaatagaggaatttgagctaaattactctgcaactttgt

SEQ ID NO: 26809 - DNA, 2589 bp, Arabidopsis thaliana landsberg
caatgaatgattttgttttagcatatgttaccgattctatttttctttagattgacattcgcatttggaagtggggtgtccaacaactagcaaacccttcgctttttaaaccaagatcagtttttctacatagtttcgactttttgttattttacttcccatcatattttgttttatttactactgacattttcataatgtacggtacattttcatatattagcatccttatctaaaagctaatcaactccataacgtacttgaaatagggatattttagttgagttaattattcaaaacaatcacacagtgacacagactctatgtagaccaagcatgtgttatgtaattagaaaaaataaactgtgattaaaatatcttttaacttgttaacttggctgcctaaagaaacttgatactgtatcatcgttcatcgtattttgtaattaataaaacataaaaaagcaaggaaaacccatttgagtaaatgatatattaatattacttcgtaaaaagctgcgtccccacatattctattgattttaaatactattcgtattaatataaacctgcatataagcgtacatatacatttctgattctatatataggtgtgagaccttcttctccattctacacttcactccaacgtgaaacctgcaaactgaacttatctcttcatattttctttagcttctcttaattttacacttagggttttcaaaccagtagagagagagagaagtgtgtaagagcgatgatgcagactccgtacactacttcaacgcaggggcaatattgtcattcttgtggaatgttccaccaccatagccaaagctgctgctacaacaacaacaacaactccaacgccggttcttactcgatggtcttctccatgcaaaacggtggcgttttcgagcagaacggtgaggactatcatcactcttcctccctcgttgactgcactctctctcttggaactccttctacgaggctttgtgaggaagatgagaaacgtagacgctctacttcatctggtgcttcttcttgcatctccaacttttgggacttgattcacaccaaaaacaacaactccaaaacggcaccgtacaataacgttccttctttctccgctaacaagccaagtcgcggttgttccggtggtggtggtggcggaggaggcggtggcgtaggtgactctcttctcgctagacgctgtgccaactgtgacactacttctactccactatggaggaatggtcctagaggccctaaggtgacttatttattttaatttttattaaaatgcaacttcttttaatcaacacatgaaatgaagatttacaataaccaaaaagacagttcatccctttgttttgaatatttgcctatctgttttttcactaaaaccaataaatccctttctctatagtttaatttattgaaagaaacattaaataatgattttgatggttcagtaaatttacttgaatataggttttaaaacagatatttcaataaaagacattaatttattttcttttcgaatattttcatcactatatagagatttatgtattgaacgaacattaaatataagatatattgatggctaatgatgatatggatggttttggaatttgcagtccctatgcaacgcatgcggcattcgtttcaagaaggaagagagaagaactactgcggcttcaggaaacaccgtcgtcggagatgcaccggttcaaaccgaccagaacgggccccacacctctggctacaataattaccatgctgccactaataacaacacatcataatggtactccgtgggctcatcaccactcgacgcagagggttccgtgtaattatccggcaaatgagatcaggttcatggatgattacggcagtggagtagcaaacaacgttgaatccgacggtgctcacggcggtgttccgttcctttcttggaggcttaatgtagcggatagggcaagtcttgtccatgactttaccagatgaaaggagaatagaaaacgacgttagattctcttaaaatttccatgtggtttaattatgtctaattaaaaaaaaaccaagaaaatatttctgaaaaaaaatagaagtgtatatcgagagacgatgttgatgtttattgatagtgacggtctaacttatggtttatctataaagtaccgttctggtcaatttttaaaatcattttctaatatttattttaaaaatataaccttctttttatggaaatcttctcttctctagtctataaaataaacactatagttagattcttctattgattacacagtgatcgtcataaaacattacagatgtaatcaaaacattagaaagaaaaacaaaaaatgaaagatgtgcataagagaaaacacacagaccaaaaatatagacataggatataactcttttaatgtatatagtttagagttgaacggagaagtttcagttccacctgagtccctgaatttcacaactgagactttaataataataatattcttactattggctaataaaaaatagagaaaataaaataaaaattagggtgtttggtagtga

SEQ ID NO: 26810 - DNA, 1640 bp, Arabidopsis thaliana landsberg
  unsure (1)..(1640): unsure at all n locations
cattacacatgccgtttcagattcagagactgaaaaaaagaagagaaaattgtattagaagaggcgaacgaatttaaataatggaaaaaaactcagaaaagatgtaatttgtcttaccacataagatagtccatccttcccaagagcagcaaagcaaccctttccattttttgacataaaactgaagatacccattttgccatctccaggaaagctttctaccctaagccaacagcaaaaggaaaaccccttgtttgcaggccactgaacaggtgttctgattacaatcccctgcaaatgaaaatatgatttacaaaaaaaaggtaagaagtaagaatcaagaaatagtcagagtttgtctactcaccaagaaaagtgtaacactttagcatcaataatctcctatagagtaccatcatttattaaaacaaatattcaagagctttccacctctacaaaaaccccacgatgtctaaacatttaccatttaattttgtggcatgttcaatacagttatggcagcgtaaattaatcactggaaactgacgtcatccaaaagaagctttaaacaactgatgaaacaatttatctcaacgctgtagcagtaagatagaactattgtaagcatgaaaattttctcaagtgggacaaagacttacagattcaaccccattcatgtcaaaaaagcctgttggtcctttctcattcagcattgacaacaaacaagccaataacagtgagcggtatctctgttgattgcccactctttcactccgaagaagagcaaagatcttacgtatatccttcccagaaatactgtgaccaccaattgtctgagttagctgtgttattttcaagataacactatcatcattttccagagaaaaccaatcaagaagaaggtgaagcattcctgcccgaacacatgaagcacgattcgatatggaatccctaaggagttgctgaaacaaatttagcccataacactgcaaagattcgctgctctgccaaatcatataagtccacagtaaggatatattccaaaccaaaatatgggaaaaggcaaatccaagtaatgtgcaccaaccttctgaagtacatttaagtaaagtatgataacatcttcattctgagtaagaaaaacaatttaaacatggaaacaggacaatagagttagccccagtgaactaggtattaaaatacaaatcattaacgaaaaagttatgaaaactacatcaccttgataagggcactgcctttatcatcaaattttccatcaacaagcatatcaagtaatgcgtctaatagcctttgggtaggtttccattggaagaaatccaacaataagctttgaagtgtctgataacccttgccagcaagggctttaaatgcaaactgaagggcacaaggaagcagtgggaaaaaaaagtaattatactagtgcaagagacctttaggttcaatgtagctcagaaggtcttccaaaacaataaaaagttcatgtgtctnttcgtctactaattgactaattgagatcaagttcacttccaagaattctttcactatttcatcatncatgtgtctttcccaaattaaagcaaaagtttacagaaacataatnttaatgtcgctaatatgct

SEQ ID NO: 26811 - DNA, 1201 bp, Arabidopsis thaliana landsberg
  unsure (1)..(1201): unsure at all n locations
gtcttagcggctatggtgccgctatacgtggctatgatattagcctatgggtcggaacagaggggggggatattcacaccaaaccaatgnnnnnnnnnnnnnnnnnaacgatggggttgtcgcggctcctctactatatacgcattgcatctgcttcaatgatccttatgcattgaattaccacttcctcgctgcagaatctcttcagaaagtcgctattctcgccgcactctgtctttggcaggccagtctctttcaataatctctctatgcacataatctatcttcattaagtgatggtagtctactagtaattgctatgatggtcaatttttactagaaaacatattggttatcgaaagcttatagtatagtaactatgtcatttaacacgggtaaatattttagttaacattttagctcttttgtaatatgtgtctctaaacacacacattctcatgtttgtgtatatattgtgatattattttttaggcgtttagccgcagaggaagcctagaatggatgataacgctcttttcactatcaacactgcctaacacgttggtaatgggaatcccattgcttagggcgatgtacggagacttctccggtaacctaatggtgcagatcgtggtgcttcagagcatcatatggtatacattaatgctcttcttgtttgagttccgtggggctaagcttctcatctccgagcagttcccggagacggctggttcaattacttccttcagagttgactctgatgttatctctcttaatggccgtgaacccctccaggtatgaatttttcactgatgacctttttcatatgtttgttcaaattaacggaccggttaactcaagtaaactagaaaatgggtagttactagttacgacatgactacatgtcattttgggattcctttttgcctatgtaaatctataacaaattttgagttttgtctgagttcctttttcagaagtcaaaaataatcttcaaagtgacgtgttacattattcacgcagaatttaataattagtacaatataagaaatatcaagttattaactatagtctagttgaattttcattctttttgtaccgattcggttatatccggtttaaatcacatcgactcgaaattcatcacctaaaaatatggatttatctttcattagaccgatgcggagataggagacgacgg

SEQ ID NO: 26812 - DNA, 1036 bp, Arabidopsis thaliana landsberg
agcattattggtctgagaggaaaattgaggaagaggggttaatcgagatgaaaatggagtttgaagtaattttgagaacgttgcgctgatcgaggaagaacagaggataggatcaacacaaggatcttgtgaaaatgaaaatggctgaggaaatgaaggactatttgttaaataagatataatattatttctgaaatatttccatctgactcctttaatttatacaagcctccttttttgaacatctattttcagaagatccaaataattgtttcttctatttgtgtatttttgatatttaaacgtaaaatctttggattttgatcaataatagacaattagccaagttcaattttcattaattagatttataattgtaattatttttagcattcttctaaaattaaataatgcggcgtaagaggagaaattaatttttgttgttattaattcaaagcgttacaaaattccacgttggcaataaaataagcgaaaattccacgtgacatgtacctgtcggatcaaaaagagtggaattgacatttgtttctctcacactctctctcgaattctctggtagcttctagttctatgcaaaaatacgacgatagttctctatctttccagatgaatctccttccatatacaaaagcactcatgcctcctcgctctctcgcaattcacaaagattccaaacatctaaagttttcaattttacaacattatcgttaccatctacttgattctctgcaaaaagagaagacttttactgagaagaagaagaaaaagttgtctgattcattgaagaaactctacgaaacaaacccagttctcatatcgtttaaggtaaatgggctaagactcttctctttgattctcgttcttttgatgggtttgtctattgtgtatgaaagatgatgagattagggtttatttgtgtgttgttttcagggactacaaaagctaatcgaagatgaatccagagaaattcacacacaagacatacgagacaattgctacagttcatgagctagcg

SEQ ID NO: 26813 - DNA, 1589 bp, Arabidopsis thaliana landsberg
aaaggccaagaatctgagaaactttcttcatttttgttgcgtctttatctgtcattgtcatcatcgaagttctcagctcgtggtcagcttcttcctgaaatgagtctatgttcctgaaaccatcgggcggattttgtctctctctctttctccacggtaatttcctatccagatttggctgttttccatctcttgagagtcaaagttgttgttacttggtttgaagatcttggactatcttttgctgctggttactgcgttgtccttcttttgtttcttcacattttgctcgcaatattcattggatcaatcggaattcgcggcaaatgcgtttgaatttaaagtttcattttttatttttcctttcggagtttcttgctagatttagtcatacagactcgatattactgacttgtatacactttcgaattttctctttcaaaagtagttcataaagatctaatctttatgttaaggaaaaatctaactgtgttttggtttttatcttccttctgtacagaccaacaacatttatgagacattgagcacatttgagaatcttaatgaagaagaagagttcttgataaagattctatatttgttcttgagtttaagttctcgagggaatggcaagaggtagaataaggtcaaagctgagacttagccatatatacacatttggatgtcttaggccaagtgcagatgaaggtcaagatcctcacccaatccaaggtccaggatttagcaggactgtgtactgtaaccagcctcatatgcacaagaagaagcctttgaaataccgttctaactatgtttctaccactaggtacaatttgatcaccttctttccaaagtgcctctacgaacagtttcaccgtgctgccaatttctacttcttggtagctgccattctttccgtgttccctctttccccgttcaacaaatggagtatgattgctccactggtgtttgttgttgggctcagtatgttaaaggaggctcttgaagattggagtaggtttatgcaagatgtgaagatcaatgcgagtaaagtttatgttcataaaagcgatggcgagtttcgtcgcagaaagtggaaaaagattagtgttggagatattgtaaaagtggagaaagacggctttttccctgctgatttgcttcttttgtcatcgagttacgaggatgggatttgctacgttgagactatgaacttagatggtgaagcaaacttgaaagtgaaaagatctttggaagtgtcactgccactagatgatgatgaatctttcaagaatttcatggcgacgataagatgtgaagatccaaacccgaatctctatacctttgttggcaatcttgagtttgagaggcaaacatttcctctggatccaagtcagattctcttaagagactcaaagcttaggaatacaacctatgtttatggagttgtggtatttactggttttgataccaaagttatgcagaattcaacaaagtcgccttccaagagaagcagaatagaaaggacaatggactacatcatctacactcttcttgtcctacttattttaatctcttgcatcagctca

SEQ ID NO: 26814 - DNA, 1387 bp, Arabidopsis thaliana landsberg
  unsure (1)..(1387): unsure at all n locations
tatcaaatgggacaagggtacctactggtgggccaaagagaagaagtccttttccaggtgaacgacaacctttgaaaatgtcaggacgcaacaatggccaaatgaccatctcagttacacactttttagcatgctccagaccagctgcacatcaataacttatgatgagaaactccaggtgcaacagggataataatatacactgcactgaaacatcttactgtaccaatatcatcccagcggacattggggtctcgatccataatctcgttgctgacatgctctataagacgaggttccaaatttctcaacttctcgggaagctcaccatcaggaccacagagcatctccaaactagaacaggatagtaagtaaatgggcatgcatgttatctcataatataaaattaatcttttcaggcttacaggcgtagaaggctactggataattagaaacctatgtgaagtagcattctaaataagaacgagggcctaactggctaaccaccagatgagtgtagacgcttaaattgctagtcctattgacatgcatatactattttttatttacttttcatagtgtttcaatgtgaaataaattcaaacaatgtttaatatagaaacttagttagagaagggcagagacaggcnnnnnnnnnnnnnnnnnaaatcaagaaatattgacaagaaaaacagattacataagcttatttattgtcgaaggtgaggatataaaaagggtgcatgtgctttccagtttgctaaggatcttgaatcaaaataagaaattacgcaactaaccatgttctggttgagtcatccagtgcatcgtcagtctttccaccaatacgagacgtcaagtttccaacattattcccattagttttaacaggagggacaaaattactacggtatccacgtcttaatccacccgaccttgaaccatagcccctacctnnnnnnnnnnnnnnnnnnnnnnnnnnnnnnnnnnnncttggtgactcagttgatcctcgtttttgtcttacatccatttcctaaagcaacagatatagtagtcaacattagcaaagggtaataaagcacagttcgaaagaaaagactctgcaaagtcaagatgactctaagagaagtaattgtcatgaataaatctaccagttttattttggcggatacaaatccattaggagctccatctttctttacttccccatcatttgcaaggctactggtttctgcatgaggtcgctttgttccaaaaccaaatcgatgacttgtgtcaacaatgacacattcatcagaggcaccgtctttgatgttcactgaagttttgcgctgatatctggtttaccatactgtttcatacaatgatgtcagttggcttgcat

SEQ ID NO: 26815 - DNA, 911 bp, Arabidopsis thaliana landsberg
taattggaatgagacttacatagtcacattacatcgaacatcaatttctcttcaatttccgaagggacaaattcacgaagggacagtttcaattccataggagggaaaataatataagaatcaactgcatgatagggactggctcggatgataaaaaccttttccacaatttttgtttatttgtttatatgcactttctgttctgctaatttacacatcttgttcgacaaaaccatctaaataattgtaattcgcttaaacttattctagagtctactgataaacaagaatacgaaacaaacataactcggaatattatttgatatataatctatagtggttttgacttacaacatagtctacatttataacaatgtctatgagcatcaccaacgtatatatatacagagagcttcatcaaaccttggagaagacataagtgaacacagcaaagaagaaacaaaacttgcgaggcgaaaacaaaatgcagactaaggcaagaatgttcatactagagagtgaagcttcgtcatatatcaatgaaatcctcttgaccctctagattggtaaagctccaatctactctttgcttctggtaaaatctcatcaatcgtcggtgcttcaaccaaatgagcttgctttgtcgaccattcaagtactacaagaacctcttcttgagctaaagtctcactgtccggtacattcaaagcgatataacaaagtagcatcaaagccgggacttgaaccatttgttctccaaagtataccagttgaatcaaatgctttgcacctccagctgctataatcgctttagagtggttatcgcgaaggaaattctcggtacatgagaatttgataagcgctactgcggcttccattgcaatctctgcttctctttcatcaagaagctt

SEQ ID NO: 26816 - DNA, 2417 bp, Arabidopsis thaliana landsberg
  unsure (1)..(2417): unsure at all n locations
aaaaactaaaaggtggaatcgtaacaaaagaaagaatcacatacttggttcgctgaagaaagatcctgtaccgtttgtcccgttgctgagccaaaagccatagaagacgtaaatctcttcttctgcaaattttcctctctcttgttcttcctgatctcaaccaagttatcctctcgcctccgccgtccttcctccgcatcgaccgctactttgtaccgattccgtcgcacctccgtcttcgcgctaggtctgagagacatcgccgctaaaatcgaatcgaaatcggaagagaattaacgatcggaagattatttaaacacgccaagttcgattaatgagagagtgataagggttttggagtttgatgcgagtgtatttatacaagagcgtgtacttaggaggccacgattcaggagacttgttgttaatccaatattgcccctaagttttattattaataacgaacctgccactcatatttttttttcttttttgaaatttgaatcttaacgtctctctgcctttttaggtatgtatacaccgactactaattatggatttgttttcctttattttctccacgcaaatattcttttctttttctgcagcagcaatactctaatttgaagaggctttttaaagcccaaataaattattacataggcccaaacttggctaaaataacgtaatttacaagactctactctaatttttttttgttaagtcggtaaatatcatataaaatgaaagagttaggaattacaatgagaactcctaaataattagttctttggcaaaaattaagataaaaaacaaggaagtaaacaatcttcagaaagaaacattatatgagccaaaaactcataagattacggaacttctttttgtgtcttcttgcgttgatggagttaatgatttccctatcgatgatcttgaagactgaagcaggatccnnnnnnnnnnnnnnnnnnnnnatgttatttctctgcttccaagttacgtagacgacggaatgaacaacaagcttcctcagtgtggagggagtagaagtgctagaacgacgaatccatgaaagaagttcagcccaatttcagaaaaataagcgagtgcaacctaagcctggactgaaccgaactccagagggctttgctgaaacctgcaacccaacattttgtctatttgtgctcaaagaagaaatttctattcgacaatcacaatcccagtcgcagttcaagctgtcattttatctaatagtcactagaccacaagctaccacttggttaaacaactaagagtatcattattggttgtctcttagattagttcttaggataagaacatctcattttaactcttatataagagacgaaatgataacatgtctcttatataagagttaaaatgagatgtttttagtaatcaatgacaaaaaaaaatcttaagaactaatctaagagacaaccaataatgatgttctgagtagaaataagttaagatcttctctaacttttcttaactttgtaaaaacaacattttaatttaaaataaggttaagattcaaaattaagaaccaattggttctaaaccattggagttgctttaagaaaatgtattagaaaaacgtttatacagtatttaggatttaattctatcatttcaataatcaataataattcaaattcggacatcattatcggtactttttttttggataaaactactggtacttcttttcaataaaaaaatgtacagtatttggttttataaactaagaagaatagaagataacatttaaattttgcattgaatatttatgcagaaaactgtcggatagagtttgtgtgtttttaatgaactatatttatatgtatatttttcacttgtatggaacggtggaaaatgattttagtttctcattatctatatagatttaacttaggagttatctactatcttaagtatttagcgttttaggatttgaataggttgtaggaaaaaatgaaattaaattatttatctaattatagattttcagagtttataggatttgattaggatatcttcttcttttccagtaattgactaggttatttttttaattatattttggataaaggattgactaggcaaaacacttttggattatatgttcgtcgaacaattagggatgagaaagaagagttttttttgttcgacaaaactataatggataatgttcgacaaaaaatggtttggaaaattatgtgctaatcgatcacattagttagattattttttttgtttaaaacaggtaagaaaaaattataccgttggtaaaaaatttgacacaaaaatgataggctggaaaaaatactttttggaaaactttattaacaaaatggcagagaacaaatacagtttgcaagaaagttaaccat

SEQ ID NO: 26817 - DNA, 1593 bp, Arabidopsis thaliana landsberg
accaaatcgcctatgaatttttctgcaccacaataaaaaccatacaaaatctctttttgtaatagatatgtcaatgaatacaataatggagtgaaatggaacgtgttggggacctaagcgtcggtccaataaagccaactaccacttttgtatgtggaggggagagagaggtagaattagaaaccttaatgaagagagagtgtgacttattatgtcattcgtttgtataaacaattcagcaatcaccaagtacatgtttatatggacacctagatatcaataatttagaaacgttggatgataagttcgtgtgcatatctcaaccgtccattttctcatgatttgatgaaagtacaaaaactagatttgttaaggaatctttattaatccgtcctctgcacactaaatctggcctttccgtatatggtaagaccaaatcttaaaaagttttcttctcgtcatcattctctttccttacttagtaatttcttcttcttcttcttcttttttttttcacatgagaatgatgctaaataatcattaaatgcaagatttaaccaagctggacaaaaagggtcacacacagagatttacttaaccaacactacagaatgtgaagtcgaatacatcaacttttgtcacagaaactcatgagatttcttgtgaattgtccttttcagccgtagcaaaaagccaactattaccgcttttgacacaggcaagattatcaaattttccccctaaaccggatgaagttactttcgtcgggcatgatacgaaccaccacctccttgatgataataaaaccggtgacgagacccaccactctttccactgccttccccggttcgagtggatcctctgcttcctccagaagtccaattcaatatctgtgttcctaacccatttgcttcctcttcatccctctcattgtactcgagtactaacctctttatgtcttgtttctcttccaattctgcagcttctttctgttgtgtgctctgcactagagcacaatcactcgggattagcatttgcctcgtttgtcgtttgtttcctcttttcactaggacctttacttgaacctctcttttctctccattctcttcatccaacacttcttcaccgttttcacctactacccgcccaaaatgatgatgatcttttccacatccttcaaaaacactcatcggtattgtcatgttcaatgccggtctacctcgtaattctagcttcctttgctccatgctctcctgcatccacaaaacatatcagtacttaatcatgttcaaattccgaaaaataacttccctcttgcatcagtgtaaactggtttttccaccaaactaaattagagaaaatagatgcatcaatctacataaacaaaaaaagacggattctgaacttgcctgaagtaaggccttcagttcttgatcgaagaccgcttgttcctcaagatctacggttaccaccttttgccttacacgaaatttatcatcatcagatccaggtccatcgccatcatcataatcatccccatcaccactctcagatccccgctcatgatttccatcatccaactcttcgttctgt

SEQ ID NO: 26818 - DNA, 1140 bp, Arabidopsis thaliana landsberg
cgggattcaaacgggggaaaattggaggacagcccatatactatttaccccttttttatacatatatataaattttttttataatcacagtcgatttttgttcttgatatattttatgtctataaacgttatatatattgaatgggtcttaaaccaattaatctgaaaaatctggtacaagatgacagtatgttagtgttttgctttgtcatagctgattgttggatgactgctgaaatgttgaatcctcatttagaaagaaacaaaatcaatattgaatatcccacttgaaccttattctagcaaaggaagtttcccaatgctggaaaaagtgaatgttggagatctgttacctccaatccaagtctttttaatcatgaatgtatatatccggtttgctatatcagtcaactttccggaaacaaccagggccataaaccggatttttgattcttcagtgaggatgatcttggaaatcattttagatggtagaatgataaaaaaagagaagaagatcatgctggaaagagtgaatgttggagatctgttacttcaagtctttaaccatgtatactcagtttggtatattattcaaccggaaacaaccggaagccataaaccggattcttgattatcggattcaaaaacaaaactaaaaaggcttgagaaagcaattcaaagtattttaccatcagaactagtgggctttggaactgctaagattcaagcttattggcaaattggaatgggctttaaatgtacaatgatttccaattgcataagtagacggctgatttagaaaaacgtaaaagtatgaggtctaaaagaagaaataacgtaaaataagaaatagaaaaacgtaactaaagcaccgtttccttcttccacagcaagaaaagttcaaccaaatgggaatcagaatcggcgacggtgacggcgacaaatacggcggcacagaggagctagaacttttcggaaaatctgatactgttacagtaaacagtataccgcatatgtctccgtcagtttcttcgtcatccgcatccgcgaagatgagttatggattcaacgaggaagagtttgaatgggtggctgtagataaagagattgatcttgttacggataaagctccggaacttg

SEQ ID NO: 26819 - DNA, 3406 bp, Arabidopsis thaliana landsberg
cattactggatttgacacacagtttttgagtaacatgaaaataccaaaactattgtggttcagagagccatgtctatgttacaagctaaaaaataaaattaaaactcttgagaagcagatccaatatcgcctttgttctttccaacctttgatgggagaagagtctgatgaatgttgggcaaaactcctccattagcaattgttacacttccaagaagtttactaagctcttcatcgttcctcactgcaagctgaatgtgccgtggtacgatacgtgtcttcttgttatctcttgctgcatttccagctagctccaatacctaatgattatatcaacatcatataagagatcagactctagaagacaccttaacatcaaatcaaaatcaaagattcggtaaacatcgaaaaatctagtgatatatcaattacgagtgattctcatcatagagactaaaagactaaataccaaacagaagattgtttgttacctcagcggccaaatattcgagaacggcggcgagataaaccggagcaccggcaccaacacgttcggcgtatttaccggcttttaagaaacgagcgatacgacccaccgggaattgaagaccggctttgctactccgagatgtagctttcttcgccccaccggatccaagagtttttccacgaccagccattttcaacaacaacaacccacaaagagcgcaaaaaaatcgaatttttttcttgacgaaattaacagagagaaatctgattgttgtttatatatgttggaggattaagttatttgaccaataagaatagagtacgcggatcgaagaggtttaaaccgttgattataatttaatgaatggctacgatctgaagttttttctcccaccgcttgaacttttgcagtttttgttggtttcttctggacgagggaatttccaaattttccatataaacctcaatttattttatgcccttgaaaataatattatgggcttggaacgctgaacaaatcgaattgagtttacgaagtaaatgggccgcttatgggtttagaactcggcccaccaaaccccagcgaagaaaatgatttaacatagtcacttttactaattctattgtgttgttcatatttttattgaacaaccattgtggaattttatcactatataaatttgatgaattactaatcatataaataacgttggattactaaaaatgtcactatagaaaaatgttaaagtgagaaaaagaacatgcatgaaagagaagaagttttaagagtaaattgtgttcaccaaatctatttcaatatttatggatccaagtcatacggaaattaagatatatcatagctagattggggcagaccagtcaatgtggtgtggtcgaaatgatggtcctgttggttttaggttttagggcaaaactgggtaacccagaagaaggacatgatctatcaatatgtttcaaaattcaatttctaatttaatgtctttccttttgaattcaatatggctataacgacacccacacctacttccattatctaccctttgcgatatctacaattcgtaataaatgcactttcaaagtttgacaaactcacaattcagattagagttattgtgttttgatcattaacgaactgttattgtcatccattccttcatgttttgaagtcgatatgatgtaaatactaaatactacagtgttactttattaggaacagagataatgcaaaaatattgatgtactatcgttgcggttttagtttcgtttatacacataaatcttatatttcaccgtccgctcgtataaacatattatgtcaactattgttatttatcaaactagagtgataaagttacatgcatggtgtaataataagaagtttagtataaattttaatggtttgttaaaatgtatattgattactgtctttccaagaaatgtcagaatgtttcatttgctcttatgggacatttaagagtgaattgacagatgcaagcagaaagaagtgagttgaaatgaaatcaatgttcttttattcaattttatttcctatagccatgctattaattcattagtaattctcatttagttgtcactgaccaacaatttgtcatcattattgcttggattaacgtatttatgaatagtgagtgaatacatatgtagttttagcctgactaggtttcagacatcatagaagaataatcaactctttcaccatataatctcaaaggtaaatttagaaataaaatatttgtttcttcttgcgagtaaaagtacttattagaccggtgaacctgcccacgcacaatctcattgattgatgatcgtattaactgtaattaaatcctgtaagagaaagttaaaggaaattccaaaagtttagaagtatgacatgaattcaagattctctacacggtaactataggaaaaaaaaaattttttttaaccaaaatcattgaattaattacgatttatggctaatgttaattttgttaatggatgcaagttcatgaaatttagcttgttttttttttttaaattaccgtgcattaaatcaagtttaccactaaaaagactccaatattcagttaatgtgataattcgtaaatatggactagtctataaattactatttcatgatttatgaacatgttgtaaagtcttttcagtttttacacttttaagaaacattctctcgtgttattacttattacatcggtgagttgagacatcgtagacctccttcagattcatttgctcgtacatgccttctagaaagaaaagaaaaaaaaaatttggttctttaatatatctcataagacaaaatccatttattattacctatcttgcttcttcaatatttaatttatatttattatagcatcacttccaaaaatattcagaagaagaagatagagagaaagaaagagagagatatcgacaacaacaatggaagattcaagcaaaaaaagccaaaagaagaagaagaacaaaagcaagaacaacatcccaactgtttggttctcactcaagaaatctctccactgtaaatccgaaccatctgatgtccacgacccaatatccaccactaaaccgcaacaacacctctccacaatctccaccaagaaaatctccggcatatcatccggcggagccgccgtatgcggtggtggtttatcaggatgttcaagatcaatagcaaatctcaaagacgtaatccatggaagcaaaagacatttcgagaaaccaccaataagtagtcctcgttctattggaagcaatgagtttctaaatcctataactcatgaagttattcttagtaactcaacttgtgagcttaagatcactggtgtcggagacatggcttcacctgtcggaccagcggattccggcg

SEQ ID NO: 26820 - DNA, 980 bp, Arabidopsis thaliana landsberg
ggatcaggtcagtaaaaggatacaagatttatgagtaatttgttattttcttaagtatactctgttcattcataaagggagtcggatgttcagagttcagaattgatgcatggcacccaaaaatataaagaaagaaaagttgaaaaagtaagcaaaagaacaaacaacaacagctgtcactttcctccattcttttcttcactttttcttactcaaagtttttaaaaaatgatatcaataaaaccctaaatcaggaaagtaaagttacaattaaagtaagtaaatcatttcttaacttagtaatagctattatcatcaatttctctctctctttcctctttctcttatttgcattattgaagtagcagccacacttgttgtctccactttctcttgctaaactccatcatcttctctttcttttttttcacttgtcccatttttttatattttcatctttctcttttggagtttcttcttctactgactctactggtaggtgtatggatttggtaagatttctcaaccttcaaacaacaaacttttcttattctatagttttttttaatgtaataacatcttctctttcatttttattgcatttttttaattcttgcttggaattgagtagacagaaaaaaaggctttttttttttttttgttttcctttcttcccattttgtgggatctgttctagtttctatgtttctgcacttctcatttcgttttttcagtacaattagtttgcctttttggggattttttttttgtttttttttcaatatcaaaatagatcattttgttagagcttcaactacaatttcagtgtactctttatagttgtgtttttgctttttgcttatgcttttttattttccttcatatgtattgaagttgaagtttaattgagttaaagattcatgggttttatgtttactagttgtttttgctgtttgttcttaaatttagagtaccaatat

SEQ ID NO: 26821 - DNA, 407 bp, Arabidopsis thaliana landsberg
tgagaaaccatcttcaatggagatgaggggaaactcctgtgaagacgcttcaaggtgttggcctccctggagaaggacgtcaacggggtgaccttaatgagagattgtaaatgtggcttcttcttgtggcattgcatgtgactgagaatcatgttgtgcttcttcttcatgtggcattgcatgtgattgagtatgttgctctgattgctgctcttcttgtacagattcaccttcacgagaatactcttgtgggttttggctgttttcgggaatttgctccactggccttgcctcctgtgccacttcctcaactggctgagtgtcctctagtatcccctctactgcatgtgtctcatgtcctgcttcctcaactagctgaacatcatcatggttttcctccaccagtt

SEQ ID NO: 26822 - DNA, 929 bp, Arabidopsis thaliana landsberg
gtttttagataacctatattactttcttaacatccgattatatcatattttcgtataactctttttttgtgaacatcagcccaaacatgtcacgtgaaaagaagtaaaattggtccctacatatcgtggaacacttgacacttgaatgaacagaagcaaccacacaaataatatgtatttttttctttgtaggccgagccataaactagtcattctcatgaaatcgtcacttgtaactaaatcattatctattcgttaatttacttgaactgtttttgataaacataccaaaaaagttagtaaattgtatgtgtatgtgtgtttaaaacagtatattcctcaacgatgagttttcatgtaaactaaattaggccgtattcaactaaaatattaattgagaaaagtattcaatctacatatcaagtgattctcctttaaattgtcaacaaaataatgtaaaataagaaatgcatatttcaaaatgttgttaagagtgtcgacgaatatcagttattctggtagagattctaaccaatataatgagaaaaaagatttttagatgactttgtgtaagttggtttacgaaaacgactttttgtaggaatagataggtatgtatttgtctattcctaacgacgacatatagagaccttccatattcttttaaaatattcaaggataaaaggagaaatgatgtgataaactaggggtggacataaaaaccaaatacatatttcaaaaaaataaatatacctattagattctatagtattagtcaaattaaatagatatttctattattgtttatccaaatataactagaaccgaaccaagataatatttagttcattttatagtaaattgcgaacaaacctaaatcgaaaaaccgaatgcttctgacctatgataaacagtttagaaaaatcgaa

SEQ ID NO: 26823 - DNA, 1237 bp, Arabidopsis thaliana landsberg
tgtcaatctaaagatgggaatatataccctcttttctacattttcttttcttttatttcattttggaaagatgacttttctatctttcggtatatatatagatgcatatactgttttctctacagtagaaaacaactgattttatcttaaaaacttatattctttgcttcctctttttttttttttttttgtctaaaatattctttgcttcctctattgaattttctttactgtctaactttttaagcttcatgtaacacacgttttttttattattggttcgttaataaaacataacccaatatataaaagatacaatttctttttactgacatgaaaaataggcactatgaattccttacttatttcagtaaatttttcgttgtttaaatatgcatgtaagaaattccattacatcactatttcctcaaaatatatgttttcattatttttaaaagattgtaaggaagctttcactaatagtaatggattaacttggcatgtggcttacttttatctatcaaatgtaaatgaagagaagtagcagtagtgtggatttatttctagcatcgcttatctttctaattatattaaagataaacacatatacaaccaaaaaggcatgtatgtaaagacagaagcacatatatataagaaacccacaagtccacttctctaagaagatttgttcaggcacacgctaaaacacacaaacaaaaaaacaactcttcaagaacatatacatttaatatttatataaacaaaaaagaatggatcttgatttaatacaagatctgcccatcttgaatttcccaccagccatcaagatccgagccaacaccaacagagatgatgacggcggcggctgcaccactcccacttcttccgaccacaagattcctcccaccacagccaccactcctccttctccaccgcagaaaccccgtccaccttccacaccgtcgtctctcggcatcagatcttgcaagagaaagcttatgacgtcattgtccaagtatgagatcatcgtcaacaaagatgagatcgagcggttcttctcctctgtttacaaccaaacgatggcgtcatcaccaccaccaccacgacggctatcacggtggccaagcggcgaagaagtttccgttcttgtcacgaagatgatcaataattggacgtttcattaaaggttcgataatttcgaataggtttttcgattcttatgtatttttatgtaatg

SEQ ID NO: 26824 - DNA, 4167 bp, Arabidopsis thaliana landsberg
  unsure (1)..(4167): unsure at all n locations
attggtaccgcaagggctcctgaaaatgaaaacaataaaagcccaggaccaagattttgtttattttttcggcccaaaatttagctggcgacctattttttttcaaaccggtcctggtttggtttaagactagtaataagatataaatgcaatgaaacgacatcgttggaggcagtggatgttcttttcccaaaaatacgttttcttcctttttttttttttttgattattaattcttgggaaggggtttatgaagggcttttgacaccaccagtctttgtctacaacatttttcacttcgaacggtttcttgcctattaggctaagcttaaccctaatttcccaaattcgctactcaagatcttcctcccccgtcatgctaagtttccactccgctgctacgcttcccacacgtactccggctactcgatccggtctaccccggttaagaatctatgttcaagcaactgacttttctaaccggatggaaccggagttcctacgaatagggccgtcgttctttttcctccgacttggattccgacacaaagtcttcaactactactgtctcaactaaacctcacctggacgattgtctaacggtttgttcaaattttttcaagttcacaccttttttttttcccgaccatggggaattttatgatcatggggaatgtaagatttccagaaacaattgaacttggctggtgcacttcatatgctttgatttttcatagaacatagagaaatcagctcaattggcaaaattttctttatggttctagcgattggaaagttaaaactataaactttaatagcattggttggaaaattcgaaattttgaagaaattgagtgtgtttatagtatactgatcttttgatatacgcaaatttggatggatcattcctagttttatagtcaggcaaaagctagaaccttttatagcaaaaccatttcctcgagcttcgctacgattgttttcattgagctttatgttgttgaattgcaggttatagcattgccattgccccacaagcctcttattcctggcttttacatgccaatatatgtcaaggtatcttacatcaacttagctattcgaaatcatagtgaaagaatggattttgttatcttgtgttctctcacctgtatgtataagctttttatttgtctaggatcctaaagttcttgcagctttacaagagagtagaagacaacaagctccatatgcaggggctttccttttgaaggatgacgcgtcatctgactcatcttcgagctctgaaactgagaatattctagagaagttgaaaggaaaagagttgattaaccggattcacgaagttggcacacttgcccaggtactactttcttgccgcacgttagcactgtatgttttccctttatatgattatatctgtctgaatagacttagctgttgccaattttccagatttcaagtatccaaggtgagcaagtcatccttattggtcacagacgacttcgaataacagagatggtacgttaaaggaacatatctttttaaaggatcaaaagttcatgaaaagtaaagattcaattgttcagaagctctgtgtatatcttacacatgtgtgttctgcttatcaagttatggttctctgagtgtgaaaaccatgtgctttgtttctgttcaggtgagtgagagtgaagatcccctaaccgtcaaagttgaccatctaaaggtgtgtttctgttttcaagcctttccttttatgatacaagcatgggagcaagagatgcggtttctgttttcttttgaaatgctgaaatctttaacccttgtcacgtgttctttgttatttatttgcaggataagccatatgacaaggacgatgatgtcatcaaggcaacatactttcaagtgatgtcgacacttagggatgtcttaaagacaacttcactctggagagatcatgttcggacatatacccaggcatgttctcttcatatttggcactgcttgagagtaaagaatatgtcaagagtatcagtatcttactagatttatctaaaatagcatataggtgaattcaattatccaaagttagccgattttggagctgggatctctggcgctaacaaacatcaaaatcagggggttcttgaagaactggatgtaagtagttagctattagtctattactgtcacgttttgatgctgagattacctcaaacaggatgatagtccattcttagccagcttctcatatgtttttttcttcgatccaggttcacaaacgtctagagttgacgctggaattggtgaacaaagaagttgaaattaccaagattcaagtacgtcattccttcacttgtctgcatctgtccagctgactcgtgctactagatctttgtaaatgattagtttatatagaatgaatccttatctctttgaattcgtgtttaggaatccatagcaaaagctgttgaagaaaaatttagtggcgatagacgtcgtatcatactaaaggagcagatcaatgctataaaaaaggttttcagttcgcctctaattttacagctgctaatttatgatgtatagtattgttggttgatgactattaaatgtaccaatgcaggagcttggcggggagacagacagcaaatccgcactttctggttagtacgaacataaagtcttaaactatcttcaattacatgtagtcagtttatatcctagttagaaatttagaatttcactgcctcatggatcacaatgcattcatgagacgtcagtgtctttggtatgagtttggagagccgtgcactgttaattgtatgacaaccacaacttatagtctgttctttactgcagcaaagtttaaggaaaggattgagcctaacaaggaaaaaattccagcgcatgtattacaagtcatagaagaagagcttacaaagctgcagctgttagaggcgagttcaagcgagtttaacgtgacgcgtaactaccttgattggttgaccatattgccttggggaaattacaggttttttacttttcatatatctttttttttttttttttctgtttaagtaaagcagtaagtcttttggtatgagagactgatatagagacggatgagctctcatctcatggcaccatttgtttttgtgttcactgatttgaggaatctattttgttaaatttgcagtaatgaaaactttgatgttgcacgggcgcaaacaattcttgacgaggatcactatggcttatctgacgtaaaggaaagaatactggaatttattgcagtgggaagacttagaggcacttcacaaggtttgatacttatccagtaattgtgatttgatcttgttgaaaaaaacttgtccccttaaatttgagtaaatgnnnnnnnnnnnnnnnnnnnnngcctctccggccctcctggagtaggcaaaactagtattgggcggtctattgcacgtgctcttaatcgcaaatttttccggttctctgttggagggttagcagatgtcgctgagatcaaggtataatacctttgttttggtatacctgcaaatattagtcaaacatttgtgactgaattctttcctagaaacaaaaaaccattcttgtaattacatgtttaggggcatcgtcggacatatgttggcgccatgccaggaaagatggtgcaatgtctaaagagtgtggggacagcaaatcctcttgttctaatcgatgagattgataaggtaatatattttttgttttgatatttgtcatcatatggtagcttcttttattcatcagtacaatactgtttcaatctctagttaccaaagacaaatttctctgcaataaattgctatattgttcctttgcagctggggagaggccatgctggtgacccggccagtgctttgttggagcttctggatccagagcaaaacgcaaattttctggaccactatctcgacgttactatagatctatcaaaggtaattaaatgtggtcaaggaccaaattttgtatttcttttcttcatgatgttctgtccaccaatagatggatatgagtaccattttgtttcatgtgatactaggccgattgaatctaattgctgatccatttcattacaggttttatttgtgtgcacagcaaatgtgatagacatgattc

SEQ ID NO: 26825 - DNA, 1297 bp, Arabidopsis thaliana landsberg
gtgtttcgaaactaacatttttgtttctttccttttttgttactaaaaaattggtttactgtttttcgacttatttggctgttttttgctgcgttttaagatttatttagtgtttcgtttgtttccttttttgttactaaaaaatttgtttactgtttttagacttattttgctgtttttgtgcttttaagatttatttagtgtttcgactaccatttttgttactaaaaaactttctttattcttttagttgtgtgtgtaagttttattttatacatgggtattcgggccgagtatttcggattcacgttttagttatttaataaactaagatttcgggtcaggttcaaattcattaaataggggcttcgggtattaagcccatgtcatttgggcgactgtcattccaaggtttgtttgtttttgttattttagagtggttgttattttcttgtgtgtgtctagcgatttgttgtaggttgctgtaggaactacactagtcacgcattgggcgctatgctcactcacacgcccatctatacaacttatacatacaactatacaatctccccctattcatacatctatacaatcacactctaataatacatctatactatcacaccctaacatacatctaaacaatcacaccctaaatattcatctatttatacatttacaccctaaacatacatctatatactcacaccctatcatacatctacacattcacaccctaaacattatcattcacatctacatacatacatgtatctttatccggaaagaaagaggaaaatacaaaatattgcacagtcttgtcaacttcaaaggctggcacagcagaaaatggaaaatactggatatagtcccaaggcttcgttttcccttcttcaaccttctgcaaaattaattaatcaaaatcagtatttcgttttttccgttgcacatgcatttacataaaaatcaaacatttcagtcaaaaatcaaaacccattcttcctatgttttacataaaaactaaaatcttcattctatgttttcctagacagaacataaatatatctagcttaatttcaacagcaacaaaaagaacatatatctagatataaaatttcagtttatttaagacacatatgtagctaaaaatcagtgtatgtcatagttcatagatgaagtcaagacagcaatgtatataaaacagaacattaatttaaattccaagttcaactccataaaagatgttaaaaagatgaagaacatatctataagctaacaagaaccgtttatatgataa

SEQ ID NO: 26826 - DNA, 1011 bp, Arabidopsis thaliana landsberg
gtcgtaaaagtaaaagcttagtacaaaattgtgttaaggtgacaatttgttgcattttttgtttaccttttttgtctaccaatttatcagtcttagtattgcatatagcctatactttagtgcgggaactacttcttaatcagtacattaataatgttcaataagtcagtaaaactaattggatctatttgagaaatcttgactttttaaagtttatccaatgggttgatgaattcttatttcaggtcaatcaagacaaattttcttattttattgatccataaaaccctaaaaatcatattgtccctttaattactttgctgaatatttttacacatatatagaattaaggtattgatgtaaaattagaaaaatagaaaaacttgtgaatataaatcatgattaatttggagatagctgactctgactagctgttttgttcatctccttctctctgagttcttcttcacacactagctagctcaatgttttttaaattatgaactcacatgttttctataaatgttttctgatactaaaaagccagtcacaaccattatacatttatactgcataaatgtttcacagcatttgtaagttcaatacatggagtatacacagtttttgagtcatgggattgatttacttttctaggtccaagctcgaaaaaaaaaaccattatctgaaataataatttattttgtgaattgtctcctttgtttattgctcccccagacattaaaggcacttcactactctacagtaactttcttactgcattttctcatcctttgcaggttcatatcttcccctttgtctcctctcaatccctcgaggctatttggcttaccgacaaagaaaggaatctaaatgaatactattacaaaacaaagttcaacaaacagagtcaatttgtctaacgttatgggtatacgtcctttacaatcaaatccatttatccataaaagccaatacttgtcttggcatctaaaaccttatattattaatata

SEQ ID NO: 26827 - DNA, 1545 bp, Arabidopsis thaliana landsberg
  unsure (1)..(1545): unsure at all n locations
ggggatggcctgctttgaaatagtactctctcattgcagctgattcaagctggtctaatgtacaggacagtaagatgaattgagccacttagagactcatcgacgttttccacatgtatggttgcctttccgggtgggtttaggaggaaccacatgttcattgctccgaaattgagtttatccgtgacaaggtgaaaaacatgcttagaaggatcctgcacatatagggaataaaaacatttttaatttcagctctgcaatgcgtatctaaaataaaaaatacagatattaggacgaatcaagtgataagagctaacgattttaccttggcattcatgatggttgagttgacaactactgatgcagctaatacattgtcggaaaagagggcataatgataaagattagggttttctaggttttcactccgagggaattttcttttctccggagacagaagatagtaatcgatagtcaagcgcattgataggcaatggataggatttggaatggtttttgctgctaactgagccagaaaagtactctgcttctttaagctcctcacttgttcgtcggcagtctgaagcattgctctcagctttccagtaaccagcttacagtcatataactgcatcttagctttagccaagacttgacccatggctctgagtttctcatgcgcactatatgaagagtaatttagagagcatgctactttaagaagtacacaagcagtcgaaagaaggcaagttgtagaaaccaaaaggagtaagttacctccgaggaagatcagcatcagatgttgcttcccccaaaactcgttggctgtccttaagtcgggcctggagttcttgcaacaaatcgttcttgtttttcaattttgcaatcccactatagactctagccattattacttgatcccgcatcaagcgtatatttgaatcagagttgtcattctcattttctcttctccaaatactgtatttaccaaggactgcagaatcaacagacttagagcgttcaatggcagcattttcgagtttcaatatcgtgtcatcattgtgctgaactaactcatttgcccgcatctcacgccttttctctcttagttgctgaaatgtcaagatggataaaaaaatgttgataatgaaatactaaagacacaagaagtccctaaagagtatttgatgcatcatgacattgaactttaataaataatagttacccttctgtgaatctttgtaggtgtctcaactttctgatggatacctaaaatttccctgcatcagcgatatatagaagaatcagagatggacaacgtcaaatcagggaggccacttaaaataaaagccactaccttttgaaatgcnnnnncctgttttcattcangntattagatttgacatcaggagttgttggatgctgtctctcgtacatccaacgatgaaaactatgataaatcatgacttgtgaataaaaacttcgaatacaaccttatcacttcatccgcacctcactacgtctaaaggaggggtctactccggc

SEQ ID NO: 26828 - DNA, 4001 bp, Arabidopsis thaliana landsberg
  unsure (1)..(4001): unsure at all n locations
catcatcatatactggactttgattctacccacttcatattaatggataagtactaattttttatataaaaaattatgtatattcatatcaaatctatatcttagtaataatattttttaaaataagaaaacatttatttacaaaaaaaattgaaaaacacaaaaagtttggaaaacagacatttgttaaaatataatttttatatatgttttaatctcgttttgaatgactaaaagtaattaatataataaaaataggttttaaaactaaaactcctttacttacaatttttcaaaaaaaaatgtagatctaaatactcaccgtttttcaccaacattgatttttttttctccactcaatgagcaacgactaacaaaatcgttcttcaatggtttttaatattacagattaatggagacaaacgtataagaaatctccatcgatctataattagaacccttcattgtgattatacgtataaagagaaatgtcgtaggtcgtagatcgttgaaagtttccaaaatagaaaaaagaaatatcatatgtcgtagatctattaaagatcagaagatattatttatgtaagagttatcataatttgaaattaataataaatctatactattaaggagcagaaaaatatgaaccatttgagccgttttcgtttttcgtggtccaggaacaaaaaaaaattaagggtataagcgtcatttacccatcgattgttgtcattaatatttcattaaccctatgatacaagaatcggaagataaaggcaagtactacaagaatcttcagaagaaagttctcgaatctgtgaccgaggtcagtgacatcgacgccatcattgagcaagctgaggaggcagagcgtctttacaccattaatcatagctcctccacacctttgtccattaatctgtaagctttctcttcttctaatttcctcttttttattgttctttgattgattaagtttttgtggttctgtttgtataagttcaatatggtagtgtcatcttgatgttcttatggtgtgctgtttctctaatgtttttggtgaaacagagacacaaattccagctcaagtgttataagatacaagccaggcacctatcttcaagactctttcatttagtaacgactaattttggaagagaagcaaaggtgaaactgggttttactaaattacggtttgatgattttaggatgaagctggaacagcagctattaaaacagttgaactcgatgcagttcttggaggccgtgctgtccaacaccgggaaattcagggtcatgaatctgacaaattcttgtcttacttcaagccatgtattatacccttagagggtggtgttgcgtctggtttcaaaacagttgaagaagaggtgtttgagacccggttatatacttgcaaaggaaaacgtgcaatccgtttgaagcaggttttaaccattgtactctccttgtattagaacgagtgaacggtgattaccaatgtacatcaactttttcttctgttcctcttttttgcaggttccttttgcccgctcatcactgaatcatgatgatgtatttatcttggacaccgaggaaaagatctatcagttcaatggtgcaaattcaaacattcaggagagagccaaagctttggaagtcgttcagtatttaaaagacaagtatcacgaaggaacttgtgatgttgcgattgttggtaagccaattgcaccttcttcctcagtttcctttaagtcaatgaacagtgttttaatacttaaagaataggttttgtgtgtggaaacttatctatattcatactttcctgttataacagatgacggaaaattagatacagaatcagattctggtgcattttgggtcctctttggtggttttgctccaatcggaaggaaagttgccaatgatgatgacattgtcccgaagtcaactccacctaagctttattggtctgttaatttctaattttgtcttcttgatataatgcatgccatcctgatacttatatcttctgcagtagtacctattttaaaatttacttaatagattattatgatagagttattgattgatatgttgttgctgtttaactttagcatcactgatggtaagatggaaccaatagacggtgacctatccaaatctatgctggaaaacactaaatgctacctcttggactgtggcgctgagatatatatctgggttggccgtgtcactcaagtagatgagaggaaagctgctagtcaatctgctgaggtaaagaatggaaatctattaaaaacatttctccggtccttagaatatctatctcaatcatggcttctcactttttacctttcatctacaggaattccttgctagtgaaaataggccaaaggcaacacatgtaactcgtgtaatccaaggttatgagtcccattctttcaagtctaactttgactcttggccatcaggctcggcaactcctgctaatgaagaaggacgaggaaaagtcgctggtaaagattgctttgatactctaaattattaataaaacaatgaacgatctcttatccctgacttactttggtacttttcctattgtctagcattacttaagcaacaaggtgttgggttaaagggcctgtcaaaaagcacaccagtgaatgaggatattccaccattgcttgaaggaggtggaaagttggaggtctgttctgtcttctgacttgttgtgctgttatttgctcaatctaattggttattttcatccaaactcattaagctcatgtaacaggtttggtacattgatggcaactgcaagactgttctatccaaagatcatgtcggaaaactttattctggggactgctatctggtcctttatacctaccattctggtgaaaggaaagaagactacttcttgtgctgttggtttggaaagaatagtaatcaggtaatcacgtgaaaaggtgcatctttgatatttttgttcatataaaaaggaagtccctatttcttctgttagtattttcagctcttttaataactggaaagaggatagtaagacataatgtattgacaaagccggcatgtttagcttcttcctggtttgtcttgtaagacattttataagtaagattgaaacttggttgggtctataagatgtttcaaaattcatatttgtaaatgtgttgcagttttactctttagctattgagggatgctgttagtattgtagtttattgttatgagttgttgcctctcaacttttgacgtggtggtcaaagtttgggtacatattgtggtagatttcatctaatcatttttttcaattatgtatatatttgaacatgttgaatatttagccatctaaattttgttttctcccgagtttaggaggatcaagaaacagcagttcgtctagcgagcacaatgacaaattcgttgaagggaagaccagtgcaggtaccatgttttgttattgtaagtaatggccactagcagtgaaagattgttgaataacttgatcttcttgcaggcccgtatatttgagggtaaagagcctccacaatttgttgcactttttcaacatatggttgtccttaaggtatttcttttgattgttaatacagaatgcttgttgctgcaagaaaatgtattggtaattgatatagttacactaacatttagggcggtttgagctctggttacaaaaatagtatgacagagaaaggttcgtcaggcgaaacctacacgccggaatcaattgcacttattcaagtatctggaactggagttcacaataataaggctctacaagttgaagcggtaattttctacctttctttatctcttgctaagtgctttttctaccttacactgttcaaaacttggcggcctattcgtgtaatgttagaataccaaatccatgcctagatgttgtttagtttgaattaaaacgacgncatattacacaggtctgcgattgtctgtacatttgg

SEQ ID NO: 26829 - DNA, 716 bp, Arabidopsis thaliana landsberg
  unsure (1)..(716): unsure at all n locations
actatgcgttctcactcccgttgaattttcatgcttgtggttcaatgccggctcctgttgcttcgataagcgttgaaggacgcagctgtagttgtgaggttacgcacggcccgaatgtagttgtatttttattcagttttttgtatttgttcttgctgttggggggttttccccctctcctaccaaaaaagaaaaagaaaatggtgtggccgagtaactcgttatgttttttcttttaaagagttcaaaaaataaaagaagctttggctattggaatttctatttagcgttacacttacttataccactggttacacttactcaatctggttcgagttatatcacatattggtttacttctgtttctattgaaaatttgcaatcacacatatattttattcacgtatggtaattgcaacttataattatttttattgcatatacgtccataaaaggatggtgtccaataagaggtcgttattaaatgtaggaacctgagaatgggtctgtttgattgattctattaagaaggaatgattaattggtgagaacatattgaaaaggacaaaaaagagttctaggagataaaatcgctcttcaaccaacttacattagctttcttcatcctttactatattgctttcatatatcgncatttactttcattccctccatatttaaattggtggaccaatagttatttatttgaacgacac

SEQ ID NO: 26830 - DNA, 3213 bp, Arabidopsis thaliana landsberg
gagggtttcgattcatgcttagcagcagcttgcaaaacccggcttcgaacatttgttgaataaggcgaaggtgggaggccaacaccatttgtttctagttttcctgcagcccacgagaaagcctgagctccgagtttcacaggtgcaagcaacagccttgaagaagaagatgaaacaatctttgttaagacagaacagaggtttcgctgagtttttgctatggaagaagggtctaatgatggcgcttttatacctgacgtcttgtttgaagtcttcggagtcatcatatgaagaaagtcgtaggtatatagtctgcataatgtttgaaacttgaaaaacaaaacaaagcaactataatttgacaaaacttagaaactggaaaggctagtatataccagactaaggccgatgacagctataagttggagtgttttctcccactctgcgagagatagagcaatcatgttagtgcaaaacgtggatgtgaggagcttgtgtgttgtggagaatatgagatattctaaaggggaaatgagaaagaattaaacgcaccagacaaagcatacaatgctgcgaaaaaaccctgcatatatcttcttatattagtcaggatgggattattattaaacggaaatagaaaaatagaactagaagcataccacaccaactccaaatagttgcaatggagagggatttatgtcctcaaaaatcgcctcagcttcctgaaaagcatttaagatatgtttaacttactgatgaaaagatttgagagcagtttcaatttcatctagctgaagaaacagtccaaacatatttgtattcatatggtattacctcgttgaggatggtaagtgttgtctcaggttttggctctttcacacgaagaccttcctgtacccatgatctatacccaccttgcatcaagtatggcctctgtcacatcataggcaaccaaagaagagcttattcgaaaatgtttaaaggtaacttattgtgttcaaagtgaattatgcctgaatgacttgccttaatcccaacttttctcagggctcttgcaataccctttgaacgagttccatcagcatccataacaacaaccttggacctgtcctattagtgggagagtaagcaaaattatgagatgtcagcatacttagaaactgaaacagctcgagccacaaaaccatagtaagttacaaaagaagcatgaaggtagcacacctgaactattttcaagttcttgatgataactgctgtcaagatatcatctacttcacttccacctttcagtagccgtttgacatcaccgtcaaccttaaacatgaatcaagaacaagaacccataaaaaatgtgaataaagaaaagtcttatatcctacttctgttgcactgattgctgaaacctcgttgtgttcatagattacatgtgtagagtttctatattcgctgtggtcaacaataatgaggatgctaaaaccaacctcaggcagtgtcacgctagaatatcgaaatcgagctgatctccgcagatcaggtattccatctttctctctcaaggccttcaaaaagacagtagccaaaatgagcatttttatttcaacccaaactccttgatgaacattatgtgaaagaaataatcaaattgtggtgggttttgaaaagttatatatcatgaaatgggaacttgttagaaacttaagagcgtcttacttcaggcctgacatctatgagcactgacttgtctcttgattttaaaaggtccagagttgacttgggagacaaatctccagcatatccaccatatgtccaaacccgatatagaaccctgcaaatatctggtggaaaatataaattcttctatactacattgtcctctcaagaaaagcaagtttaatatccttctagggtaagaaaagccgtgtaccaaaaggttcctgtggtgcctacgaagagaaaaaggtgaaggattgggtcatctggatccaaaccgatatttctctccaaacctccaatggcaacagatacctgttcatcatgatactgttagcaactgtagtccataaagaattaattttcttctacgaaaatatgaatgaaccttcagtatataagacaaagcacctgctgcaatacagctcccacgggactcaatacttttagagcaacatcttctgacgagttaagggcactctttacatctggaggaagtaatttttttgctgatccataagagtacacaacaaaagaaactccatttgttacagatctctctccaagactaactgattgcctcagcagatcaatggcaataacagctgctctgtttgaagcttccttcaagccagtagaaaaactcgaaaacttgtctccagctacatcttccgtttggtctagcgtagaaaacgctctgttaactgcactatctacaacttcagaagcattctttgtaatggatgtcacagacgaggagaaggactccaaagtgttctttacagcattttctccttggttaagtgaagagctgaaggactccttgaccccagaagaaaagtcatcaacgcttgctttcgcatcaggaagtgagactgaactatccggagatattttaacagtcgcattggttcccgattcaacagagtctataaggctactggtcttatcggttaaagtctcagcagaaaggctttcaatgggggaaacatctggtacaacagcttcaacaggagaaacatctgctgcaacagcttcaacagggaacacatcttctccattttctacatatgtcagtccctcatcactcgctacaaaagcttcactcatgtcataaaccatgtagtttattctgtccaactcattctggcacaaacttccgaatgttgatactggttgttctgttttttcgatagtaccggtcaagaaactcccagtggcttgaggtacgaaactcttctgcaggcgtgttccattagagataccaaagaaggcattgtcacctgaactgtatctgtgaatcaactctctcctgaaggaagaacagcctcgccaattgccaggaaataaaatctgcagaaacaaacccgttatgaggtacttacttatctatgaaaatgaatccaaaaacccaaagcactaacaaagcgtaacacccatagctcaaattggatgacttcaataaatttgctaccagttagcttatttactttcacttctata

SEQ ID NO: 26831 - DNA, 1592 bp, Arabidopsis thaliana landsberg
tcacagaacatatatcagcaaggaggaagaacattttgggtacacaacacgggtcctttcggttgtttacccgtgaacatgttttacatgggcactcctgcaccgggctacttggacaaatctggctgcgtgaaggctcaaaatgaaatggcgatggagttcaacagaaagctcaaggaaacagtaatcaatctcagaaaagaactcactcaagcagccattacatatgttgatgtctacactgcgaaatatgaaatgatgagcaatcccaagaaactaggtaaacgacaaactggtccatcgcaattcaatttgttgttaagtacctattctgtagaaagttttagcgttctcattacttgtttttgcaggatttgcaaaccccttgaaggtatgttgcggctaccatgagaagtatgatcacatctggtgtggaaacaaagggaaagtgaacaataccgaaatctacggtggctcttgtcccaacccggcaatggctgtgagctgggatggagttcactatacggaagctgcaaacaagcatgtggctgaccgtactctaaatggtttgctcacagaccctccagttccaataacccgagcttgttatagacaatgagatttagtagaagcgctagatgaaccgaaataaagatttgatccttagactcttagggcaataatgtaagtgttttaaggaacaatcaatgatctatgcaatcctgtgtaacctttttgagttgtttgtcgcaaagaattcacagttggtggatcttctactatcatctatggaggcgtctagcaaaccagaagttgtttccttctagaagtagtttttagtgattgctgcttctaactcattgaattcccaagcatcattagcagaatattcacctgaaccccaaaaagaaaatattaagagtgaatcaagctttgaatgattttgaagaaaaacaaaattgataagctgacttgtgaatgaacgtaccaattgaatctcgccggagagcagtgaggtgagcacaactgcagcaaaaggaatgatatattagtaaattcctttttttggatctgttagtaatcaaaggataaaactttgtttcaccttccaagagctttcgcaagatctgcacagagagatcttatgtatgtacccttagagcatataacccggaatatcagattttgtctgcaaaagagaaacgagagatgtttagtgaggcctaaccaaaaaacattgtattcaaactgcttctgcactatacagaaaatggataaacctgtcatctaaactgcgttcaatgtcaaactggaaaattgaaattcttcttggagaaagctctacggtttctcctcttcttgccttctcgtacatcttctcacctccaacctaagcagaaatgacagttaaggcgttagaaaagaatgatacacgataaagcaagtatataagattgagcaatgctcacttttatcgcagagaacatcggtgtaacttgcctcatttctccacgaaatgatgtgaaagctttcttaatgtcatcatcttttatccgctcccaagactctcgctgaaccacctgcactataag

SEQ ID NO: 26832 - DNA, 1401 bp, Arabidopsis thaliana landsberg
  unsure (1)..(1401): unsure at all n locations
cctcatgcttattcatgggctcccccaaccataaatccctgccttacatttatttttcagaaatgacaaataaaaaattacccaaaagaggcaaacaaattcggcaaaacaaaacaaaaagttatttaaaacataatagtgtgaaaaaaaagtaacaaatctttacaagtcaacccatcatccgttgacctgtcgaaggagacattactggctgctgtgcttgcacattcccagcccaccctattgcatcaacataattcatagttggtgatattcaatacaagcattggttatataacaattatcaaacagataagcaaaggaatttaattaatgagagaatggattcataataataaaattaccaatattggggtcaaaaccacggtgtttgagctcacgatactcttgacaaagagcgcaatgctcacagaataagtgagtgatccaatcgggagccggagcnnnnnnnnnnnnnnnnntgtttcgcattttggcccggaacatgcatgagtagacaaacggcactccgatgaaaaatatcattccatacaacaacccacctgtcgcacaagctgcgtgatacatgtacacatatgttagtatgtttacacaaatgaaaatctacgcttcttcttctttctatttttttgtaaaatgtatgtgtttgtataaattaaggagttacgagtagcgccttcgtgaacgatctcagcaatctgtcccaacgtgacgcatggagctaaacatgtgatcacggttgaaccaatgcacaacaacaacaacaaaattaagaaataatcatagaatgttatgcttgtgtgtacaattgcgtaattgattgtattttaattaaaagttatctaaccattttcactgtcattcatgcaatcgaaaagatcagaactccagagattttgcgtttggttattgaccggtctgcccgtttgtatgtttgcttgaccaattgcaccgttttgggaatgtacctggttgtcccggttaaccgttggttgaacttgaaccggaggtggttgtgcttcattcggctgactacctggtcgacccatatatatatagtattaatttcccggctagatttttgcaacacaaaacgtttgcttcttcttttggtctttaagttttttggtataacgaatagctcttatcgttttttttgtgaaaagttatggatgaagggtaggtttatataaacttaagttttgaattagtttaaacttttcttgagatgctctacttttttttcaataggtattttccatctcgtatataattaacttaaattcatttgtataggtaactactttgaaaacacttatttcccccaaaaaattggttttggcttgttcaaccgttttnttaaaaaaataaaaaaaaaaa

SEQ ID NO: 26833 - DNA, 2366 bp, Arabidopsis thaliana landsberg
agtttctctattatattgtctttgttatggagattattgtaattgacctgatttggtttagtcgctctgtagattgatctgttctactcgtgctgctcataatgaagaagccgccgcgaaagctgcggcttctgttgctgacaccggagctccgaccatgtatggtttctcttaattttgatttcaaagcaatccatgtttgtgtttttgctacaaatgatcctaatctttcaaacatgtgacctagttaattcttcgttattgatttggatgtgattcgtggaagtttatgctagacgctcttgtgtatgtgtatcttgtggttttagatttgacaagattatagcaaaagagattccctcagatattgtctatgaagatgaaaacgttttggcattcagagacattaaccctcaggctcctgttcatgttttggtcattcccaagttgagagatggcttgacctcgcttggcaaggtgagtcagttttatgttttaaccctcaatctgtttcttctcgtgacttcctttggtcttgctcttagaggtctcaatgaatctcatcattgtgttctgtaactagtaacgcgtttcatcatggtattgtgccactgtttctggtcaatatatgtaaatgctgccacccacactaaaaaaggagttaaaagtattattttggtggaacagattaagattttacctgaaacatatcttcctctgaaccgccgtcgcaggctgaaccaagacacgtagaggttcttggccaacttctacatgcatcgaagattgttgctgagaaagaaggaatccttgatgggttccgtgtggttatcaacaacggtgttgaagcctgtaagtcttttcttttcttttccatccaattaagcatcatcgtcctcatacacatgactgaattaacttcctctcattcaggccaatctgtttaccatcttcatctgcacgtcctcggaggccgacagatgatatggccacccggtggagaagaaggattcatgtcaacccaaagccaacgtgctccaaaattgtcaactacaatcctttcttatatggtttatgagtttttaccactatcggattttatccagttgtgaattcctagagattagatagcttccatttccaattgttatcgaattctttttctttttttattgttagaaataaatactaacaatttatatgatatgagtagtttctctcctacaattatcgtataaggatctgtacatattaatgagagttaggagaacacaacagaacacaggtttggttaatttctgctaaagaaaaccttttaatataaaccagaaagctatcatagcatggtcaacatgttcattagaaagtcagcaaagaaaataaccggtaataaattaaccgtctggtaagctgaaccaaaccgggtcgatctgcttaagttgttattagatagggagaagttgttgtcctagtcttggggctggttgtggcggcgggaggagctgaagaacgccggtgggttctccttcttcacttgccggtgcatgatgtcatcatcttcgtgcctttgacacaccatgagattctccttaagcttgtctgtttgttgttgctgctgctcctgctgcatgaactcaaaactacatatttaataaacaagagacatgaaccactaaaactgtgaaatttgggatatgtgtgtgcttataaaaaactattttataccaaagtacatgctgtatatgaatatctaatatatatgtcgcttaaataattatatcctagagtgtgtatattatataccttatgagctcgagcaatatggagagaagattcgagttgatgctcaaaatgaagaagctcgtcgtaggttaaattattcagaccatgtcctccatacaattgaagcttcagttcaaggttctctatctctctcatcattgattctttcatctttgtacaatttgaagaacagtgatcctacaagaaatttgatattgttataaccatagtccataagcaataacaggaggaaaaacaaagtgtaatcagataaaatatgggaatgtgatgtaagaatgtaaagaacacttacaaagtcactttcttcttgcatcacatcaccttcctgagtgatttttagagcacctccataatcatcacattcatcaaatgtacccgagcttggcgcatttccgtcctctttccatgtactctgaacatcctcttcaccttcaatgtcaccggctgactcgcttccagatgataaggagtgaacctctacctgttttcaatttcgttttagcgtttctgtgttgccggttttcttaggaggtgatgcatcagtctttcccttactgttggtg

SEQ ID NO: 26834 - DNA, 1397 bp, Arabidopsis thaliana landsberg
ggatgccgttgaacattggtttaggtgaggaaattacatgaagagatgaaagttgatgtactattggatcgagaactcggaactaactacgataagattgaagttggagagatgttgcaagtggctttgctatgcacacaatatctgccagctcatcgtcctaaaatgtctgaagttgttttgatgcttgaaggcgatggattagccgagagatgggctgcttcgcataaccattcacatttctaccatgccaatatctctttcaagacaatctcttctctgtctactacttctgtctcaaggcttgacgcacattgcaatgatccaacttatcaaatgtttggatcttcggctttcgatgatgacgatgatcatcagcctttagattcctttgccatggaactatccggtccaagataacacaatgaaagaaagatatcatttttacgatggatcaaacaatccaatgaaaaaagctctacacttttataatatagacatgtatatggtggtgaaaattgatgaaaaatatctctacagtttgagattatgtgttcgttatgttgctgatgtatatattaacttttaattgtgagtttctatgatgattttgcttcctttaacattatgatgatgacaaaggaagaaactatgagactgatttgtttgagtcttttcttttgaccagaatctgatttgctctctctcacacatactcaaaatcgtatcaaacaattcctgagaatttatcttttgtagttatcataagctgctgctttgtgtttgtggtcctttaagcttaatgtgttgcgacttttgtccaactttgactctcatgtgtcattttcagttctcatcacaaaccaaacaaagcttatcccactcaatcgaaaacgtcgtcgttctgaaaagtaacagaagagaagaaacgacagcgttttgagaagaagaagacgaaaaacagaacatatataaaaagcagaaaacattaagacagctgcttaaacaatttgggagacatggcgaatcagtcctctcttccttctcctatctattgtgtttctttcaatcaagataacaggtgagttcttcttatttatttgaaaatcattgaagatagcgaattcgattctcttagtagattttcgaggaaaagttcttctcagataacgtaactcagaagctgcccttttattgttgtttgatggctgttcgattattgcagtggttttgcgataagttggaaagattccttcaaaatattcgattccactacaggcagactctgctatgaacgaggcaagttttatctgctcgttttggttctgcaggttctgtgtcttaatcaaaagtatccaacttttgttgtctatatcctttaaatcgactccgtgggc

SEQ ID NO: 26835 - DNA, 1652 bp, Arabidopsis thaliana landsberg
cgcccatgtcatgtgatcaatttctgtatttgaccccatacatattcattttccacaactttagttttgatttttcatttttgttggctaaaaatctgtaacatctttcatattcattcgatctctttaattaaaaaatcatagatcaaggtaaacacaacaactaatcaatctccacattatactaaacattttgatagaaaaacaatattttgaggataaaaaatacttaatacaactgaaaaccaaaaaaaaatgaagaacatgcatattctaattgaaaagtgaaacatttctaaaactatatatatatatatatttcaattaaaaaatagactatttagttttattttgaaacaatttatactttatatatatatataaaatgacccccatgaagaaaaactttgcctccgccactaaccacgaggaccaaactctttctccacatccacaacagccttagctgtttctaaaccaacaggaccaacctcctcctccacatctacaacatccacaacagccttagcttcatccaaactgtgaggaacaaactcctcatccacatccacattagttgtttccaaattatgaagaccaacctcctcctcctccacactcttagctacagccttacctgtttcttagcaataaacaagagagtaatacagaagaataacaaaacccctaattgaagaattggtgttcttgttcacatcttcttcgccctcattattaatacagagtaacttggccaccaagttttccatctctaaatttttgttatagtatttggtccgacataatctttattgatatttttctttccttgattttggttttaaaatctcactaacttcaagtcatgctatatattcagtttgttttgtctacactgatattggttttcagtccgctttcctttttcaggttttaaaattatgaaaataaatttcgatttggttcacacacaagtgttagtttgttttcagtacatttgaactgaaatatctatcgaatctcagcgtccgacaatatagaaattgcaaaaccaaatctgtaaagcttttactttccggttaatcgattcaagccaagaacctcgcaacacgcatatgctattcacaacattccatggaatcaaacatgattaaaatatcatataatccccattccccaatatgggttcaaagtgcttctgctccacttcttgacgcttccttttgtattaacttcaaaaccactccgtactactatagtaatttataacgaacaaaatctatattagaaaaaagtaaacagcttatgtcgactgttttgcaattgtccggttagccatggcaccattagtaccacctgaaacatgaagaaacaaaacaggatttgtgtttacatgtttcgttagtttctccttttctaggagctttatctaaaaaacagagtattcaaggcagatacttaccaccatcggttccttcctctttctcttcgtcgatggttttccaaacaatgtccttaagtcccgtggtaaggttcttgtcaaactaaaagaagagcaagaaaggatgcaaaaaggtaaagattcaaacatcagttactggaagaccatttgacagctcgggtttgatacaacctgatcagaataataaccc

SEQ ID NO: 26836 - DNA, 1252 bp, Arabidopsis thaliana landsberg
acgttgaggttcttactatctcatattcatgttccttttggttattatgtttttccttggggcatctattctaattaatatatctttcttcaagtcatcaatcacctacggttctcattcctgctcttcgaactgttgggaacatcgtaactggtgatgactctcagacacaggtatgatttatgacgaacgactatttatgttgttttgggtatttgttttgagattttgactatgactgtgtctttgcttgtcagtttataattgagagtggcgtactaccacacctttataatttgctgacgcaaaatcacaagaaaagtataaaaaaagaagcttgttggactatctcgaatattactgctgggaataaacttcagatagaggtatgcggttttttttttgctatctctaatatgtcaagaagacggctgttcatggaagatattcatttctgattctggaagaaaagtgaagaagttactcttttcttaactttttagtagagcgagctaattttagtactttcatattttccaatgacttatctgcctagaaacctaattataccctatttgctactgaaaatattgagattaattaaagtttcagaggctaaaagcaattttttaatcagtttatatatttgaaacaataggctgtggttggcgctggaataatcctccctcttgtgcacttgctccaaaacgcggagttcgatataaagaaggaagctgcttgggctatttccaatgccacatcaggagggtcacatgagcagattcagtatgtcatctctattctgaagcgcatttgcaaacaactaacttcacttcatagtgttccttcttagtcttataccattatctatctcgaaatcgaaaaatgccataacacagttttgcatgcagatatttggtgacccaaggctgcatcaaaccactttgtgatcttctaatctgccctgatccaaggatcgtgacagtgtgcctcgagggtcttgaaaacattctcaaggttggtgaggctgacaaggaaatgggattaaacagtggggtgaatctctatgctcaaataatagaagaatctgatgggttggacaaagtcgaaaaccttcaatcccatgataacaacgagatatatgagaaggccgttaagatattggagagatattgggctgaagaagaggaagaacagattctgcaggacggcgggaatgacaattcacaacaggctttcaattttgggaaca

SEQ ID NO: 26837 - DNA, 2810 bp, Arabidopsis thaliana landsberg
catttctacaaatctagaatccaaggttttcaaatcgtcaagttccaatgaatggtatttcactatcaaatgagagggaacatcaactcccggataacagttcggccaagcatcaaattattaataagagaagggagccaaaaactaataactcaccggcgtgaacttttaatgtaaccaattgcccagactctctcaaggccataattcaatgtgttctctagcctacaagaaaaaacagacattaggaaattgggattacaaatggaaggacaataaaagaaattggtaatggtgaaaaagtgcacaaggatgaagccaaagtggagatggtttagccaaggcatacaagaagcgtttactataatatgtccaacaaaaaaaaactgtttaatattataatacctgtatgtggttgcatgccaaatgcgaacggtgccatcttcagaacctgtgattataattggaagctctggatggaaacatactgcagatacattgtgtgtgtgcccctccagggtctgtacacaactttttgtttggtagtcccagacctgattcacgaaattcaactagtaaataacctgaaagcacataatgtccagtagaaatgtatcatctaaaagaccattgaacaggaggcataccttagcagtgtgatcatcagagccggtaattaaatagggcttatcaccaccggtgaaataatctacacaatttactcctttctgatgggcatccaatgtaaaatttgggtctggggaaccaagattccaaatctgaagatgaacatgcatgtaaacgtagaatgagcggactaagcagactaaaccataatgatgtttcaatgttagaccatttcagcacctttatggtacgatcaagggatgcactggcaaaagtgttggtgtcttttggattaaatgtgacttgcatcacatagtgtgagtgtccctcgaatatctgagtgcaagcccaacccttttcccagtcccaaagctttatgagcatatcatcagaagatgacagcacatatggaagggttggatgaacagccacacacctaatgtagtctgaatgagcctcaaacactttaaccttgtccatggtgttgtaattgtatacacggatatacatatcatcagctcctgcgacaacccattgctttcgtgctataaacttggctgaccgaactgcaaagtcataatataaaaaagcagaataagtaacaaactagacacgagtacttagtacatacaacaaaaacttgaacaatataacaaaagacacaaaagaacaaaagccgtatacctggtaattcagtcacctcaaaggattttgccatcacctgatgattatcaagcaagattcagattagaaaaagttccatgaatcataaaaacagcctaagagtctgtaaagtcactacaaaacctcataattacagaaagatattaatctttcagtagcatttttggtaaccccatttcacaaattgttcactgtaacatacataaggacacagatgacgaaaatcaaaataattcacccacctgcgtctggtagttccaaatacacaaggttccagaatacaaacttgcaagaatcctgcaaaccaatgtttttaccatcccagtcgttagtagcagaaataacggtgcaaaagtatgaaagcaaagcgaaagctggaaattaccatggttcagtaggatgcagatcaacagatttgactctctctgatcgttgagcaaactttctctgatcaaaacataacaaaagcaaattatgaccacagctataataataaaataacagaagcagaaagttgaaagataagcaataccttgatatctagtctgagaggctgttgcaacataaagaagaagaacaatagttagttccagacttaaacatatcagaacgcaaacaaatgttgctcatagagagctttaaaacccccagaaaacaccagatcttttcaaaactcgatgatcaaaatccaaattcaacctcaaaaaccaaatgccagacactatactcgatttcacgaaaactacaatctataggcgcacgaacacaaagacggcgatgttaaaccatatgatttcggattccacgatctcacttgaattacgcaaaactactacagatgaaatgcaatatccaagatcgcatcgcaagcaaaattcaattgagatctggagaaaaataaagaatgcgagatgcgactacttaccatgtttacagattaagcagaagatctgctcttcggatctcgtatctcgcttgaatctgctaaccggcgatcggagaaagacgttaggctcgtcgtagagtgcgttcagagagcttgtattaatacggcggagatgaaaattattaaaagaaaatttcacaaattatgcttcaaggaactgatgaagatatttacgagagtgccactggttctgtttatgaacgtcgtcgtaaaatgaaaaaaaaaaaagtagtaaataattctttcttttttctttttctgctatgaaagtgaaattagtgtgaggattatttttagcctgaagtatttatgatttaagtttcatcaacaatatcattttatactatgtagaggacaagtcagatatgcaattaaatcgtgacatgttgcattttttgacaattcaacctaaaaatatattatgttgaaaattccttgcacttttaaacacatgtcacttgtgcaataaaatgatgacatgtggcatttattcaattttttcaaaaaaaaatgttaaacgaggaaaaataatatatggcgactttttttaacg

SEQ ID NO: 26838 - DNA, 1348 bp, Arabidopsis thaliana landsberg
  unsure (1)..(1348): unsure at all n locations
ctaataattgtatacaaaaaaacacgtatgcgggatttgtcttaatagaagcataccttgtccaaatagcatactaaagtcaggggcagacccacgttatggcttgtggaggcaagtgcccccagcagcaatatataaataggtaaaaaagtttacactagacaagattaattaaagcagcaaagtggttagagcttcctccacaagtctatattaaaataacgagattggacacataacacatacagccttatgctgtctactaaacgcgacagaaatgaaaaaacaatgtaaaataacgatgaatattcacattcaaaagaagaagccaatatcaaactgtacaacaacaacaacaacaaaaaaagcttttagaaggaagctatgcatgagttttacagagagaaagcttttgctacatatgaaacctaatcaaaccttattattcattattcatattcaaagccattgttattccaccatcaccttcacaaagcaagcttattatacttctacagtttcctcctgctttagctctgagtacattcaaatgggtgaaagtttccttctgcaaattcttgcatcctaaacctttgcattagctccacagacctgcaaatgaatcatcaatgcaccaaatcatcaaacccattttgtgtactctgaaaccgccttggagcttttatattaactcaaaccacctatcccagaaaacttacagaggattctctcgattgcggcttagcttctgttgattactctccattacttccactacattggcggttgctggtccagctgatcctcctgctacaattgatgggactgatgcggttgggctccatatctgtacacatatttttacatgcaaatgttagttttagagatcttacacgaaatgaaaaccaaaccctgaagacagctttgtgtgcctgcttacctttattgtgttatcaattccactcgttgctacaacactnnnnnnnnnnnnnnnnnnnnnnnnnnnnnnnnnnnnnnnnnnnnnnnnnnncttttagccaactcatgaaattcaatgaaaaaaaaagatacttatgtattggctaaaatgtgacaggaaaaaagatcacctgattcatcgccaacgagcactttcataagccttccagtctgtttctcccatataaaccaccgaccgtcatcgcttccacttgcaatatattcacctgaaatttggtaataaaatgttcacagaaagtcgtattgaatttcaaattttataaaccgctttttctactagaatggaaaattgcactcagataacatgaaagttgcaaccccaagaaacttacctctctgaccaagaaaa

SEQ ID NO: 26839 - DNA, 1664 bp, Arabidopsis thaliana landsberg
gcaggtcgactctagaggatccctgtatcttttttcaatgatgcaaattaagatagattagtatcaatttaatttagttgatgtcaaataattagttatggcattacttattgtaattgacgttaaatcaaattttgtatttgttataaataagtaactcaaattaacatcatttatttttgatataatttattttatgcaatacattttttgtagtaacttttgaatttcaaatctaaattgcaatttctaataagaaatacagaatactttagataattattaatgtgcaaaatcctcagacaatattttttatcaaaacaagcgaatatcaaatttgaataaaataacatagacgatatttatgagaaacgggtgataatttcttaaaatttcgattagaacacatgtgtcgctgaaaacgtgtcatacaagaccaaaaactgtgatactatcatgagtgactgatgattctatttttgggaaggccaagtggagcagcttgtgttatggagcaagagtgactcactaaaagcgagaaccgtcccgctgaaatcgaactcgagcatatgatcttgaagctgatgtgtcccaatcaccatcaaatccttcggtgtctttccaccgtcgataaacgccaaacacatcaccgtttccttcactttcaccaccgtattcgcaccgtagaacccccactttacctcccctatcctccccggcagaccaatctctatcacgggcacgttaggccccgccgtcaaattctttccagcggtgcgtgaatcaaaacaatgtttaaacggcgccaccgatggaaccttagctattcccatagcctgtatatatagttcacaccagaacacacaagacagaaaagaggttatatcagcttatctatatacaacaaaacaataacattagcaacgttataatttaacggaacacatttctaataatagtttaataagatattttatcttaaaaatctcaaatcatggttcactccacaggaactccaataaagagataagaaattttatacatgaataatatattttgttttgaataccttagccttgagtgtaaaagactgagcaagagcattgtagatatcggtttgaagtacggtgtagtgaaccaccgtactgagtttggctccgccggttagcaaatcagggttcaacttcaaagcagttccaccaacgtagatagattttacagtgattagataatctcctgagtcagtgcctttaatgggagttaaagtccttggaatcggattatcgctactattgaatggtgggataaagtagtgaatgccggcgatatagaaatgaccggtaccggaagaaggcaagcagagagagaatttagggatgacgttaaacgctgacgtcacttgtttcgtgaacgacgaagatccgggcgaaagagccagaactccgtcgactggaggaggaaggccttggagggctttctcaccggcgcatgagaatgtgaagtggcggacggacgacttgagagaggaacttgtcgccgtctgtggtgtataggaaactctgtcttggacgacacggccggttagacggggtattgtctgagtaggtatggttgcttgtgagcaagatttgagttgcatcgattacggggataacttgcatgtg

SEQ ID NO: 26840 - DNA, 1083 bp, Arabidopsis thaliana landsberg
gctcaacttgcacgagcacaaccttctgttgagagccttgaagtgctatctaaggaaggcctttccttcgccacaaatatataaattgcctttctaggttgtgtgttagtgtgagctttgagttcagagtggcttttatgtcactttgctattatgatagcagagtcgacatttttgttatttgtttgacccactttcttgtgattgtttggttccaaaataaaattgaaagctactcaattcacttttctgatacttctttcttcgaaaatggtacaccaaacttgttggaaacatttcagtcacttttctcggatccggcgttacaaaaaccttgtcttcatatgagttttttatgtccaaattttgtagacatttttactaacttgttggagattggtccttctccaacaacactattcaagttttaattcgactaaagtttgggagaattattgtatatgttcctatttatttcaacactaaaaaggagaaaaaaaacaacactagaaatagaaatcataaccaaacactaaaaaacaaaaaacaaacaaacaagggtctaaaaaaaagcagtcttgtcttttttaacggtaatcgttatccgatcgaaacaacagaattggacttctcacaagatgtcctctcgaatcatcccattccacagaagcagacacaatccctttcattgtctcatcccaaactccatcaatcacaaccttaaaattcctcttctctttaggcctctcgaaactcataaccttaggcacaacctcaactctcaaacccttcggtgcccaaaccctagccacgtaggtcgatggtccgtatccgacattcgtcactgttctatagaaaacttccgacactttcgcttccgtagaattcacttgcttgtgcagtgacggataatttaacccgtcggaacctaaccctcgcttgatattctcacaattgtattctttcttcgtagtgttgttgctgttatcgccggttaaaagtccgatgcttgtgctattgtacccttctttacataggaatcttaggtatgcgtcctctgtgatgtcgtagactagacccggg

SEQ ID NO: 26841 - DNA, 1292 bp, Arabidopsis thaliana landsberg
tatctaaccattgtttgaacttggaaaaacatatatattacgagtgaatcgtgtttggttatttcgagcaatttgtctgtacgtacacggctttaaaccatatgattgcattcttacttttttagtgttagaaacataaaatgtaattaagagacgtggaagcaaatgacaccgtatttgaccattaggatcagcaaagtcgtgcatgagactgcatatcacgtgctcttcattccccctgtctttgatgacccaagccctatgtcattttatgtatttgctttgtaattttagaattttgagtgtttggtgactttggtttatggtttctttaattttttaacggatttcatcactatgtgatgagaggtcgaacccactaaccatattcgtttgcgtgtttttgtaagtataacaattgaagaagtaaccttaaaggcttaaaccataattcttttaccaaaagagttcaagtgagtacagttcaacaacactattttttggacattagggagccagaaaaccttcttattatattcgcttttcgttttttcatgaaggaagttcaaaaatgctaagcactaatcgaagttttgtgtggcatttctagtacacctaacgtctagtggtgtttgataagtcaattagacgtttaagattttactattataaaataaatagaaattatttgtagaaaactttgaatttaatgggaaaaacttatcatagtttaaaattcaaaaatactacgagacgctaattgataggtaaattgtggagacacttgtacaagtaaaaaaggtgcacggttgtcactttctctttgacatttcacctacaattttgctagttttaattttgtcgatttgacgacaaatataatataataaaagtatttcgatatttgctagttaaaaatagcatagataacctaatatttcaataacttttttcaaatccttcactctcagtaccaaaatagtttaagctaataattctctttacttagggggaaaagaacatattataattgtttttttgctaaataaatgtttcttatgaatcataatttctcttctttttcaatcatctacatgtcgtgtgatacatttagtttcaaagtagatgtaatgctctatcgtcaaaacttagaagtattcagttctagtccaaatttaaattatataacaaaaacatgaaaagtatatgactttgaaaaactcattactcatgtcaattctattttctagttgagtgtgacactaaaataatgaatgtttcgacgtttagag

SEQ ID NO: 26842 - DNA, 933 bp, Arabidopsis thaliana landsberg
tcggatccaggcttgctgcatcgccactaacaaagcttttgtttccgcccccaaaggtgtattaacatggcccaaaaccgaagatccccaaacttttggtgttccctcattatcccgaatgatccatcccatgaagcattgagtactattgttatgaaaacttgcgtcgaagttactcttaacgtacagtgattgtggttttgtccaatgcttgatgtttattgacgatgatcttgacatgctcgatccctgatggggttgctgtgttctcagaatgttaatccattccttcacttcctctgtttgtgaaattaatctcaaagggcattctctaaaatttttcaaaaacaaacttgtttcgtgctttccagattcgccaaatgagctagaaaggagtaattctttgttcatctgtgagattcctgtttgaaaaataatcaacaagtaatgatatattctcgtctgcatcatctgaaaaagaatgccccgatatagtctgaaagttcgcaagtcgccaaatcatggttgcatatggacaagtgaatagaacatgacttatagattcatagattcatcgatattgagacaacgagaacaatttggatcaatattcattcctcttgtacgtagccgagtgcatgtaggtaatgcttttgatatggtcctccagagcatgtatttgatttttggaataagaggtagtttccaaatttttgttattgagctctacagaaccatgtggtatagctggtttggtttgggtatccagcgggtcgtgttgaagcagccaatatcccgatctaaccgtatagtcccctgaggaggtgtagttccaaatcaacttatcatgagtcttttttcgagagagatatatactcttgagataattatgatcaacggggcttattaaactggaaatgacatttcgttccc

SEQ ID NO: 26843 - DNA, 1313 bp, Arabidopsis thaliana landsberg
  unsure (1)..(1313): unsure at all n locations
acacacctgagtaacaaatccgacctctcttctatatgatttcatcttttccaatttccggtacaattcttggtgcgagccgataaccgagagatcgagtgtgcgtccaacatcctcagattccatgaaaactttacaatgacccgtctcaagtccttgcaaactataattccatgttaacccacgagccactaaacctttctcctcctccgcttccgcctcttcttccaaaaaccgttttcggttcataacttgctgttcggttaaaatcggttgaccgaacaacacgaactgatgagtcttaaccgaaccaacagacttcttcttatcctgaaccatagcaggattccccatagttaaagaacacgaaatgttattactattctcactatccctagcctgataatgatgatgcctcgggttgaaactcgatagaaacatcgccggagaatgtaacttgttgttaccggtgtaactactaagattgagatcagacaacaaagacggagatggtgatccgaagagttgttgagcttgcctggctccctgtattcctgcaggagcattattgttgtcgtttgacagataacacatggactcgccaccgccattgttggcgaatcccggggagaaaatcgggaatttagtaccgcggaatggaaactcaaatggctgcggaatcctaatcttcttcctcggagagaatggagataaatgtattgtaggcatgttcgataccaattcgactaaccacggactaacccgcttaacgttttgtaacaaatccggttcgtcccaagctacctataacaaccaatataaccgtaacattaacaaacaaacatggattctgttaaaaggaagagactttgagtaactaannnnnnnnnnnnnnnnnnnnnngtgaattaggccaacgaattggatcagcgacttgaacggcggagacagtacccataaaccaactgattctagaagaatcctctgtttcaaacgccattttaaaacgcataccactacaccatcttatcctcattgctgatctaacatcagctgcttttacgcaaaactccggtgtactagcgcgtggataataaacaacctcaaacgcttgtccacacgctgcacgcgccaccgcttccgctactgcttctactctaaccctccctgtagccgcggcgtttccgtcgttgtttccgttgcgtttcatcatcattagcttcgatgttcttgttgttgactcgtcgtcacggaggaaaccggagaatccagggtaaggattgtcggatcctgcgttagatccgagaccgccg

SEQ ID NO: 26844 - DNA, 1577 bp, Arabidopsis thaliana landsberg
accccaccaacacatatatttttgttgcacatgtgatgcattcaattgggtagacaatgaagatctttcaatagatatacttcaaaagagatgtatagtagagattttggggttaactactccaacttgccagttccattttattacatctaaagaaagcaaagaagaaaaggtctgaagaatttttggtttaatcttaaattgagtatttaataacataataagaccaactttcattttattttttcaagcgtgattttgaatagcattcaaaatctgcaaattgagtatttaatagcataattatcctacaatgtgcgtataatagcctaaaatattgcgttgctcgaggagagtattcaaatgacaacttgtttttggtttaatgttaaattgatgtagtcttgattttacgagggaaaggacaattatgtgtccgtgaaaataaattttgtccactaaaaagaaggaaaatgaaaaagagaagagcacatggattaaatgattttggcgtagtcatagactcttattgtgaataatgtcactacgagctttaagctgctttttgttacctctttaatttgattgtcaataaagactatttattggtcttattccaatcacttttttattttgtcaactatttaagtcacttagttgtcggtttagatacactgtacacattttcaatgatcgttaacttagctggaactgtttagtgttaactatgaatgcactacgtacaaataagaaaactacataaactaactcctgatggttgagcaaactgtttcaatttatggcatgaatggtgcacttagttattgaagcattttttttcctaggatcaaccgatcgaactttttaagttccatatgatgcaaattaaataaactgtaacgttttaagttttaacgaaatggtgcattttgaaagtttctttgtttaataccgagcgcacaaaattgaaccagacgttaaatatcttcgtgcacacaacacaataatcagatggtccatgttaaagcatggatttagtcatttagacacttaagctaattgataaggatgtcttctacttctatataaatgcgaaatagatacacaacaatcgtggtatatatataaattaactaatcaaagattgttctagttccgccatgacgggcagcctgtcgtgtgccgctgtccgaaccatacacaagccactgaccattcttattcgcacgtggggtactataacctgtaggagcacacgtgtgctctcagattatctacttcttcaaaaaaaaaaaaaaaactatttaaaggatacgtccaattgaaccctatatttaatgcatttttgtttatgtaactaactgcatgctttggtacaaaaaaaaaatcttcaaagtatgtcattgtttactttgcaaatcttgcatggatatgtatattattacacaaataaaattatttttcattttttaccaaaaaataataattaatttccacacctaaaatttcagaaagaaaggtttttagtttttacaaacctaacgtatacgacaagaacaaaacgttaaattcacaac

SEQ ID NO: 26845 - DNA, 1519 bp, Arabidopsis thaliana landsberg
  unsure (1)..(1519): unsure at all n locations
ggtatacggcctcatttctgctactctgtcttgttattttaagtgttctggttcatgtgtcttgattgcttttggcctctggtgcgcaaaatgctttagttggtaatctaatatgtttgaaggtactatttctggcctctaggttcagatgaaccaatggttattgtgcatgccctgctggaagttactgcacacccagaatttgatatagcctcgatgaccttcaacttttggcacagtcttcaacttatgttgacaaagaggtaacttcagccttttctatgtttttgcctgttcctagggtcatattctgagagtgtgatttttaatcttcagggaatcttatagttcattgggtagtgaagcatccattgaagttgagagaaaccgaagactgcatatctttcagccagcttatcagagccttgtatctttggtgagtgagtcatcagagggcagggtaatgttttactctttcaagaatatttgaagctcgttgttgaacccaggccgcttctattggtttgctctaatccagagagacaaaattgaattctcatgctcgggtgacttatgcttaaattaatattgctctttgaaaaaattcttgatttctaaagtttatttggtcgatcatcttttggtggaaacagaaaatcatatgggttattgtatgctctgcagtttatgtcacctatacactggtttcccttcacaggttggcttcagagttcagtatcctgaagattatcaaggcctctcatatgaggaccttaaggaattcaagcagactagatatggtaatcaaagcggtgtattacttgttctcaatattacattagatcaagatcttttgagttaagtgtgctaaggaataagtgtacccctcagagcttcccaaatagatcagcgcgaccttagattttcgtaatttgtttgcttagcactgttgttctccctatgtttcaatcctttacacttgtttcttgacgcagataaagtattgttcttctgaggtttttggttgttttagtcacttagctttggtatggtgctgtatctcgtaacgtcactttttgatttacctattcttcatacttttgttgatatgtacttcttattgtgctctcaatcatctttgatgggaccaattacctcattttcttgtttacttctctggaatgttgctctgtctatctaatttcactgatgaagtttgtgacattttcagctgttgcagatgtattaatagatgcagcgttaatcctgggaggggatactactcttaagattctctatatgaagcttcttgaggtttgtgctttggatctccatgcatatatctgttctatcattaaatacaaaataagcattaggagatattgaatcagcatttttatatactgaaaaagttaaatacgatcagggtagaacacaattaggattatcagcaccaaacagttacattgtatttacctttggcatttcagcatctttgacattngtgaaatatgtactt

SEQ ID NO: 26846 - DNA, 697 bp, Arabidopsis thaliana landsberg
tgttattgaatatggataatatatgttttgacgtgactaagatggtaggactttttgttaaggtacaaaacggaggagtactcacacacggcggtgaacaagttcaacgtgatgccggactcgataccagattgggttttcgactttatgcctctccgtggaggatactttgtcggcaatgtaagcccggcccgtatggatttcaggtggttttccttaggaaattgtgtctccatcctctcttctctagcaactccggatcagtcaatggctattatggacctcctcgagcaccgttgggaggagctagttggtgagatgccactcaagatatgttacccttgcatcgaaagccacgagtggcggattgttaccggttgtgatcctaagaacactaggtggagttaccacaacggtggatcttggccaggttagcattctttgttataaaactaaagacatcatgtgtaacgcttggttccttaattatcactaacttgatatgtgcagtattgctgtggacgctgacggcggcttgcatcaagacaggccggcctcaaatagcaagacgtgcgattgatctaatcgaatcacggctacaccgagattgctggccggaatactatgatggtaagcaaggaaggtacgttggaaaacaagcaaggaagtgccagacttggtcaatcgcgggttactt

SEQ ID NO: 26847 - DNA, 2387 bp, Arabidopsis thaliana landsberg
aatgaaaacttcaatttacgtaaacaataacttaagctaaacggagagtttaacttaaaaatgaatgcaaactgttatattattacgttaaacgtttaaatggcaagaaacgacagacagtcagccaattttggaagtaatttttgtcatatccatgatttatccgattatcaaatcaaatatctcatacatacccatataaatacccctccgcttacgctttatttgccacacaacacctttagttaaaacattttttaaaccaaatcaaaacagataaccaaaagaaaagaaaatggaaaaatcaaacgttttcctcctctccatacttctcatggcttcactcttctccatatcccacgcctttcaactctggggctacgcaatcgaccgagtcagcattcgtggtgtcgtgtattgtagccttgacggagatccaagcgcaccacctgtctccaatgccacagtctatattgaatgtccaggcggctcaaactcaaccctcgctcaagcagtgaccaatcaggttggtgtatttacccttgtgttcaaccccggcaatacgacttttgttaatccaaataagtgcgacatcaaagtaaatcttccaactaactcatgctttatctatccaccgggtggcgttctcatagcctcagttaatgagctgcttagcatcatcctccagaatcttttgattatcgctacctatgccactacaccatttctcagccttggttaatgtttatcgctaactatgccatcggtgcttctcgacaatgatgtatgatgcgatcgtctctgccttaaagtgtgtgcgccttatatgtatactgtgattttaatgtatggtcgtctactattatatatatagggagaaataagtgaggcatatatatgctccacaaaagcttatatataagcagctccgtctttgtcatctttatgtacttaactaaaaggatactacataatagtaataagtgggtatgtattttatcatcaataattctcttaaatactagttattactgtctttatatatatatacactaatggattttgaaaaacgttagtacttccgcagtttttagttcagcttactagttggaaaaatcagagggtttatactttcttaaaaattaaattgttggactaaagatcaactgggggaaaaaatgttttaagctgttgacaaatattaatatctattaatttaatataaaatataaagtaatccaccaaaaatgattactttgctgctcgccgtcttgtccatgccaggcgacggttctgataatgaaatgaaagacggagccgaaagaaaaacccctggggtttgttgagttgcatggagattttgtataggattacttttacgaatgggccgaaagggcccaaagacagcacatatagcatttgatcactgttacgttgttttgttttacaccaactaggcaacaacaatgaaaggaacacgcctatcattgttgtttggaagatatcacaagcggccatgtatacaaatgtgtgtatatatgcgtgtgcagacgaggaagcatcccaagaactttcaaacttgtatctatatgaaaagtcattcctaatggatcgatcgacatatccaaaaacaccacaataattgagaggtgccaaaaaaacataaattaccatatcatcttgtttgtagtaaaaattaaaattgaaacattttaccgagagttaatctcatttccatgagaagtaccattcgctgactaaataaagagtgccatgtgaagtataccttattataatcaacagaatctcataaaaacttcataataaataaataaaaaaggaatcaaactatactttcaaattatgtctgtcgtccgcaacattaaaaaattcttagaaagcatttatactcccggcagagtttttgattctttagcgcaatcatgcttcaacgcgttgcgtcatataaatttaatgcattgataaagtctatttactaaccaactaattaaaaaatcttatggtggtccgatcagtctacacgtatgtgtgtggttaggattcgagcgagactcggcgtttattgtggtgcatgtatctttcgtttacttccaatttacaattctgcggaatcaacatgatttagagtaaataattgcttgtaaaaagtaaatagagattcgcattttaccaaaagaaaaggaaaaaacattggagatggggagggtccatactcccctaagccacgggtcgagtggagtacagttggttggcgcacttactcttgacgatgtttgtggacatagtccctccaaaatgttcccttatttttatttctatataatctgattttttttttacctagaaagacaccaaacaaacatcgg

SEQ ID NO: 26848 - DNA, 1807 bp, Arabidopsis thaliana landsberg
agctgtaccccagggtgatgaaacccatgtatcaactcgagttatgggtacttatggctatgctgccccagaatatgtgatgactggtatgacctgcataatatagcgagatgtatcccattcaacttattttcttagatgcatacacaatcttgacgagctatcctgcaatgtcttttttcacgggagcgatgatcaattattgatttaggtcctaccgtttaaatcactttagttaactgaatgtgggtctctatttctcctgcaattcagtgccacatacagaaaataagatattgcaggagctaattctatctctctgctttagtagtttgctattagttaacatataggactgtggctgttgagaatgttgagccgtgcacatatatgcacttgttttcacaacatcatttcgagctacatagtctctctttttgcatgacaataagtgcttagaccattacacaaataaacactaacttgactctaatactaatgcactaggacacttgacggccagaagtgatgtatacagctttggagttgttcttctagagatgttgacaggaagaaaatcagtggataagacaagacctagcaaagagcagaacttggttgattgggctcggccaaagctgaatgataaaagaaaactgctgcagataattgacccaagactggagaaccaatactctgtcagggcagctcagaaggcatgcagcttggcgtattattgtcttagccaaaacaaaaaagctaggccattgatgagcgatgtggttgagactttggaacctttgcagtgtactggtgatgccctgatcccttgtgcaactactgcagctggagctgcatttgcaatgggaggggtgcctgattacagaatgcaccggaggtttgcaaagaacgttgggccaggtgcaatttgccggtcacccaatccaaattattcaccgggtggacctgcagcatgcagagttcggtgattagtgtcaagtgtatataatccgtttcgctgtgtctccttttccgtaatttctctcagagccaaacatctggttgctaaaaatcgtggatgcacgttgtttttgttgttgttgatgctgctgtttattgccactttactgtgttgatctgtctagagtcttgtatgattatgaatgagtgtggttcttgtttaatccgcactctgatgcagtatgcttgtagtagtcgacacttattcactccaaggtgaattttttttgtgtaagcagatatggttttctaacaagtggacattctccagccataatggtttggtagggttgcacattgtacttactgggcgaagagaagataacatatcaatgaacagtagacatatgatgctattaatacacatgtgattggaaatagttgttgccttagctgtgtatgattggacttgtagaatctggtggagtgacccactaaaccatgtctctttttatccaccacacagatcttggtatcgcctaatctttctagagcgactgggagaagtatggagtctagcttgcatagtgtgattttcttaggtttgcttgcgacgattctggttacgaccaatggccaaggtgaatatgtgtatgcacattgtttcttttgacagacctcaccaaaaattgtttcttttgacagtagttaaaaatagtagtgaatatgggatatcatctgggatcatgtgttatgtgtaggagacgggacggggctaaatgcagaagaaatgtggccagtgaaaggtggggatggagtatagagtatggaggagaaagctgatgac

SEQ ID NO: 26849 - DNA, 1463 bp, Arabidopsis thaliana landsberg
agtttcgcttcccttctcatgtagtttgagatcgagcaagtgtgcttccgccgtctcccttatgttgctcccgatgtaagagatgacggatttgaaacgcttctcctgttcatacagctttagggtggggctgtcatccccagacggccacttgttgggaccgtcatccacacaccgccgcttgtttgaacctgaacctgatgcatccatgatctcggaatggttttgtttctcagagaaaggacaagagaagaatgaagagttgtagttgctaagaatcgacaagtgaaaagacaagaggaaaccagtgtatatatagtcctctaacgacgtttggtcctctaacgtaacgacgtttggtcctctaatgacgtttgggttcttgactattcaggtgtcgtaaaccggtgtatgtatagtcctaaagtgacgtctggtttatttgatgggagggaagtttgggtttgacaagtcaaccaccacgttatacaaactcagccatcaaacgatttgtgtgatgacaagtcagccaccgcgttataataactcagctaaacatcgaattaaacaacaataactcagccgtgtagcacgatttgagcgatgacaagtcagccttcacgttagcatatatcagccgtaaaacgaatcgagcgatgataagtcagccattacattggtttttgttataattaacataataatagattcatacggacataattctggttatcaatcctaaagtgtcaatatttagtacaatcacatgctaaaaatcccaaaagacacagacatgttcaaaaacgcaattcaggtctcataaaaacgaacgggcattctgttaggtaattcatcgtagagctctgttgccatcctaacccgtagcccctggatatttgaatcagtaatgccatcaaaagaaacaccaagcaataaacattcaagaatctttaacgtgtaaacgccgcagtccctggtgataatattctgcgggacctttgtaaggatcctccgctggaatgaaaattggtcgtattgcgggacacagacttcgggagggataatttcactcatgatctgtggaatcatcctcgtgaacggcctacagtgttccaggatttttccatcgcttttctttgtatgacatccgacgatgcaatcatagcagtccacgtgacccctaggcaagtccacgtgaatggtcaccaaatgattacctccggtttggaggatagtatacaagttatccacatctgttatccacttcttgtttgtcgggtcttctccacccgttccgttgatccaactttcatacgtggtacctttgaaagaaaccctcttcggcttcatcgcccactgtgtgtaatccctagtccacattgacgtgaaccacgggtctagaatcatgactcgttcgctgtagtatggggtgggatctcgcaggagcctcatggtaggacttt

SEQ ID NO: 26850 - DNA, 1399 bp, Arabidopsis thaliana landsberg
  unsure (1)..(1399): unsure at all n locations
agagtaaatgtgtagagcttgcgggtgggtgttatagcgcgctcagcagtgctagcaactgtgtctgatcctcagattccctatctatctgttaacaagaaagaaaagcaacttatcagttacaaacagcaaaaggatcatagcaagttggatccatgcaagccactagagaataatccaatacatacaactgctgaaatcataaggattctacctaaccgtcctcagtagtcagtaatgaaagtgctgagattgtaattttcatcttcgaaatttagtttggttggataagacatgacaaagatgagcacgctgactttacaattagtaaaaagtatcagagcctccaaagtttaggctattattacctttataggggtatcttttggcaagtccatctgacacaaaatggattcaccaatttgtacccaatcaacattctccacagtgtctgccgctttgttgctatctactagagaacagttgttatccaaagagaatgactttccgatccaaatgtacaaattcctactacccgtttctcctacagcatcacttggcaacgggattgctataacagattctgaatctaagtaagctctgctcagttttgtaatcatctccatacttggccaacgacatgctaaaggctggccagagctatcagtatcacctcccgatttgtgtctgtcagatttactgcaactgattaaggatataatttccttctctggcaaatctgaatctacacttgtccctttgcaatcacttggtggatatagatcgccgtttctaataccctccagattgaagactatgtcattactatcatccggatgtaaagtaaaagcaggtgtgcctctgttggaatcagccaaacctggcaacttcagagatcctttcaggctgcctctacgctcagcaagagaaggtgaagcctttctatttggtgacggttgaagaaaagtattgacaccacgagattctttaggagaagtttgggaagggaggagggataggnnnnnnnnnnnnnnnnnnnnnnnnnnnnnnggaatagaaggtctcaaggacgaacgtccagaggattgagagaaactctttaagctattgcctgaatttgttgaacatacagaatcgggagagagaaaaggaggcgacgcagtnggatgatgaagaagttgttgaggaaggtgagcctgatgaatgcacgatcatcatcgaatctgaatagaccctagatagtggcgttttggagacataccgaaaacctttgtcaaaccttgatgcaaacttacatttcagtgagctccactgttttccttgcaggaagatgagtctcatgttcgttgttggatgatgctaaaggtggcacaaaacgtccctctatggctttctgaaa

SEQ ID NO: 26851 - DNA, 607 bp, Arabidopsis thaliana landsberg
  unsure (1)..(607): unsure at all n locations
agttacctctgcaggtttttatgctccacccaaatatatgtagtccatatcatagttagagacggtatgttttgctgaaacttcgccatccccatcattgcctggtacctcctgtgaataaacaccaatataacgcattcctaagtatttggttgtacgtacactcaataaaaacctatttttaaattttatttataccaggtacctgctatagacgtacctcaacaagaagactannnnnnnnnnnnnnnnnnnnnnnnnnnnnnnnnctggaagatctttttgatacaaaattattttgtttggtggatttctttacagattttttttgtacctgttcagctaccttctcaacccatttgttcacctttttaacatttttggtcaccatctcaaccttctcagatggtgaatcagatttgtgggatgctcgtgttccttcttcgtttcggtcctgggaatgtagagcatcacgtatctctgcacggacaaattcttttaaatcttcaaatttatcatccaaaagttgtttttgtctcttgaagaaacgcctcaattcgaccgcatacttattaaacgcttggtgtccaaaaccatcaccaccact

SEQ ID NO: 26852 - DNA, 1030 bp, Arabidopsis thaliana landsberg
ttcctgatcaactggttcatgaaattccccgagttccgatccagcgagttttacatctctggcgagagttacgccggtaagtgctttatccgattttaattcttgatttatgaattatatcacctaatataaaagaattaatcttgtatattaatattatataaaacaaagattgaatcacatgcttttgatcttcttttctcaggtcactatgttcctcagctcgcggaggtaatttacgacaggaacaagaaggttacgaaagactctcgcattaatctcaagggattcatggtatgcactctatatatatgtatactactagtaaggttacttgcgaaacgaggaagcaacgtttcttgtgctataagtaaacataaaaggtattcgtttgatgttgcagatagggaacgcggtgatcaatgaggcaacagacatggcaggactagtggactacgcatggagccacgctataatatcggacgaggtccacaccagcatccatggctcgtgcagttttgaggaagataccaccaacaagaccgaacaatgctacaacaatttcaaagggttcatggatgcttacaatgatatcgatatatacagtatctacactcccgtttgcctctcctctttgtcgtcatcttctccaagaaaacctaaaatcgtcgtttctcctcgtctccttacttttgacgtacgtaatctacaatacaatatagtatcattgtaacataatgtaattaccataatctctcttcttactttttcttaccaattcttctcttttgatggtttaggatttgtgggacaagtttccggccgggtacgatccatgcactgaaagttatgccgagaattactttaaccggaaagatgtgcaggttgcactccatgcgaacgtcaccaacctttcttatccgtactctcctgcaggttagtcctccttacgttacgtggtactaactaaaattaatagctagctagagactttgtatgttaaagttaatgtcatgtttctaatgaacaa

SEQ ID NO: 26853 - DNA, 2049 bp, Arabidopsis thaliana landsberg
acaagaagagaaggaagtcaagttaatcatttgatcgtaaaatatggcgtaaaggattgtttgcattttggttaacttaagatttgggatcttgaattgatcactttcaaactctttatgataatagatatcgagactatccagaaaagatttaaggcttgatcaagtgccaaaaaggttttcggtatccaatatgatggaccaaaatcttgtatttgaatatcgaatgtgtagaaggttgacaagtttggttcgaattcgaagtttggttcgaattcgaagttcgaaccaaacgcaacacttttacatgaaaatcgttggcaccataaataacactactatgaattaaaagaaatagaaagacattttacaaaaaatatgagaaaagtgaaaagacaaaatatcaatatagttttatacaacagaaatagatttgatcaaacaatggaagttgaaaccaaagcctcttctccttcaagatcttgagggggacaaaaacataaagaatatatgatgtaaagaattgaatcaatacaatttgtaatactaaccaattattagccatcagaagtttcttttcactgcgagaaaactcgaagaccggcctctagatcctccaacttgtttgtacaaatctcttcagtgtcaacacactcaaagctaagtcgaagatcaagattctccctcgcgttaacaagtaacgtgtccaccaatcctccattcatctctttcctctgcttttcggttgtttctgcctctatcagtgacgctatctcctgcagagtgcaggactcatgcaatctgaaaccgtagaacagagcgtcctctccttggttgctcatcttgatgtgtagtatctgcgccagttccttggcactgaagtcgctgaaattgaaaaactttgtgactcttctgcaaaacccttcgtttgatgcgatcacacgcttcatgggctcactgtatcccgcaaatatcaccacgattttccctgtgtccatgaccgacatgatttcttccagagcttctagaccgtagtccttgtcgtccgccttttgcatcgggatcaatctgtatgcttcatgcacaaacagaattcctccctcagcttctgggatgggtccagaaattgaaagttttagattcttgaaaccaaacccacaagtaaaatcagaagattatgaacagtgttttcacctttctcctggtctttggtcctgtatggccaacaaactcacccaccaaatctgtacgctgtacttctgttaccttatcagttggtaaaattccaaccgtgttaagcagcttcccgagaactcgagctaccatggttttacctgtgttttggatcaacaaaagcagtcatgtattggtttgatttaaagacagagaagtataatcataaaccactatcctttcacctgttccagggtttccaagaaatgccatatgcggaggtcttcgggttccaatatttagtccaagagcccttcgcttttcatctaaaagcattcctttcgcccacttcctcagttgtgtcttcagctcacttaatccaacaatatttgataactcatcctcaagtagttccatcttggcttttgtcttaccgcattgctcaagcgcacttcttttcctctgctcttggagaaaccaccgcagtaattcacgtaacttctcactgccttgtccttgaggcagatggtccaaaggtgtcatcccttcctgtaaatacaaactcccacagctattacacaaacaatatcataattccctaaaacaaaagaaaccaataatcacagaggaggaacatacattatctttggcgctgcaatctgcgttatgatcaagcagtgtcttaacagtcgagatctctttagcggtaattgagtaccataccgcaaggtgcaacggtgtcataccgttctacataaaaccaaaaccaaatcagtccaaactgtcgtcatagttgttacttcccacctaaaaatcaatcaaatagaggaaattacgctggctttagcttcgataaaagcaccactctcaagaagt

SEQ ID NO: 26854 - DNA, 1220 bp, Arabidopsis thaliana landsberg
  unsure (1)..(1220): unsure at all n locations
tagtccaaaggcaaaattcatggtctttcgtattctttaacacacgatctgagattgaattaatcaaatacaagtaggttttcagtatatatatatttcgtaatcatgattcgattcaaataatacgttttgcggttttggtgtgagactttttgttaagagatatagtcatatacatgtcacatgtgtatctgatgaactgatttgggcatacttcatgctccaagcatttaggcttaagatatcaacattttgagatctataattaaagcaaagagatgtgaacctatttcctattgaccagattacatggtccttatttattaatcagatcgatctgatattgaatcagattaattaaatgcaagtaggtttgaattatatctttcataattaggcattgattcagatatacgttttggacttttngggatgtgagaagacnnnnnnnnnnnnnnnnnnnnnnnnngtggcttaagaaaattgttttttttgggattgttaagccactctattaaaatcgttataatttttatttccatctgcaagtattttgaagatgttgaatgacactataatgaacactaagaagtctaaaacttagatgtttttgggtaattatatgaaacaacacaaatgcataacaatgaatcttctcgaccactgagtcgaataagagtaagaagacagaaagggaagtatagaattaaatcttctccaacatgcaaactcatgctagctcatcttaactaatccaggtcagcaaaacaatctaacgcaacactccaatacaatcaacttcatgtgataacaaaatgatgatctaagtttcttcatctcgaaatctgaaatcacgataaaaatgtatttagtctactgaaaataaaatgaaaataaagtactttaaaaaaataaataataatttcactatttcaatatttaaattaaaactcgagtaggtattaattaaattaagaaagaagaaatctaaattactatttgacatttctagttgactggtcaatgataatgttcaaaataaatcaaagtataatacttcatagtcacataaagttttgttttgtttcttataatggttttaggtcaatatcagttcacattgttcaaatatcctaaagtttttaattcaattggttaaaggatttttaatcaaagattgtttctgaaggttttgttaaaacattataaataccttcaag

SEQ ID NO: 26855 - DNA, 879 bp, Arabidopsis thaliana landsberg
tgtcttattaaacatgaaaggctgcaagaagctgaaaacacttcctgacagtcttggcgaactaaaagctcttcaagaactgatactctctggctgttcaaagctcaaaagttttccacaagttggggaaaatatgaacagtctagagatcttacttctagatgaaacgggtatcaaagaaatgccatatatattatcattgcggcgcttatgcttaagcagaaatgaaaagatatgtcgcctcacagagaacatcagccaattctctcgactgaaatggcttgatatgaagtactgtaaaagccttacatatcttcctaagcttccaccaaaccttcaatgcttagatgcacatggatgtagctcactgaaaagcattgcgcaaccacttgctcatgttttggcgacagagaacattcattccacatttattttcacgaactgcgacaaattggaccaagctgcaaaggaggaaatttcatcctattctcaaaggaaatgtcagatactaccaagtgcacttaaactctgcaataaggtatgtcttccctgtttttctccctctctatctttcacaaaagatttactgatttaacttctctacaactttgcaggatcttgttcctgagattttgttcagcacctgctttcctggaggtgaaataccttcatggttttatcacgaagcatttggatctaagataaagtttgaatcgcctcaacattggaagtataataagctctctgggatagccttttgtgctgttgtctcattccaaacctgtcaagagcaaaccagaacagaacgagagcgtaccaactgcttgtcagtgaaatttacttgtacatcaacaactggagctgagccgtgcaccgaaa

SEQ ID NO: 26856 - DNA, 1645 bp, Arabidopsis thaliana landsberg
tggttgcgaaggtctgctcgaagacgtcatggtcatgcctccatagattggtgttcggagcgttggaagtggtaagcggtggcagtgtttgcagtagctctatgatcggagccatgtgcactaaccctcgacctccgcattctccagccttgcaaatctatagcttctttaactatggctgaaattggtataccgagaattatttgccatgtctctcccgtgagatctattagccgactcatagggagccaataaccctgccaaaaagaaacagtgaaaccatctttcacatcagcccgaataaaaggacggatgtcatctcttagtttaagtaattttctccaaatccaagaacccgtcgtagtattaggtgctgaccaaaaagagttgtgacgcattaagttttgttttgtccaagcaacccaaaaagaacccgaagaactgaataagcgccatattaaccgaaaagcataaacccttgaaacctctttaagtctccgcaaacctaaaccacccactgatttgggcctgcaaatctcctcccaagagaccttggagccagtggttatatttgggttcccattccatagtaatgcactacggagtttctcaatttcatcgaaacagcgagccagtaaccggaaaacagaacaccagaagctagtaatgcgagtgataaccgaggaaagaagttggagtctttttgttacacaagatttttgtttgaagaaactttcttcaaggtttgaggcttgctagagtgtgccagcggtctgaggcctctttaactgctgccacattgctcggggaaggatcatgtaaagcttcagtttgtaaagtgcagaaggtcccgtaagcgtcttttgtcttttgaggcaggtccccatactgagtccggttcaactcgctaaggtgaacttttaagctctttaattttttatggattagagacatggccactcgaaaatggaaaagcgaaggagtggcataccagacttgcgccactgtggaaagaaactgttggtgacttgccaggaagttaaaaaagcggagaagagagatgaactacacaccgggaatgatcggagatgcctcctgcttcaaaggccgcataagagtaaaggaaagtggataaccatattgtatttatcagagctctatcaagttttttcccaagagggttctcctcttgattatttgtccaggtaaaagttggccccgaagaatgaaggtcagccaaatcacagtaagacactacattctggaagtctctcatccccgaatcattgagagaaaaatccatcacacgtgagtggtcagagaaagataacacttcatttaaatctccagagacaatccatgaagttgttgggggaataagagcagaacgaagttgacacaagtccccccataaaatgcgtctttctgaaggaaaattagatgcgtagacgaaagaacaaataaattgctccctcgtacccacaatttggacagaacaagtgatgtgctgagaactctttgtgaggagagtcattaccacaacatcagaagaaactacccaggtacgaccagccggtggtgatcatagtttgtgaggtatgaccatccaggtaaaatagattgttaaaccgatagagagttggtt

SEQ ID NO: 26857 - DNA, 2316 bp, Arabidopsis thaliana landsberg
aactttaatgaaaaactatttggtagagagaaaaagacagcgaattttattttgaagtcgtgttatggatagactgtttaggtgggtttgtggatgtgaatttgtctcaatctaatattgtcacgtcctcatttttcgaaccattgtgtggcaatatcatatccctcattaaatgtcattagctcaattggtaaagagtataggcaaagcttataagtcgccgattcgaatgacgtttaggacgaaactaatattaaatgcggtcatttcgggtctgaaggggttacgagcttcggcgcataacttcctgatattaaaacataaataataatatcataaccctcatgacaatttttattttgaaaagaaaaacatttgggaaagcagtgcgataaattgataccaatatataatcaatgaagcttatttattaaaacattttaaatgacaaattgtttatcttatccatatatagcttgaaatgtagctcgtgtggaccaaagacaccaatgggtccattttatgtacctaagagtcaaaacatctatcctcaaagttcgaatatgtgaacgaaatggaaaaattatattttcaaatatagtttttccgttatattaatgttgatttttatgtcatcgtgattaatcgaagtaccttcttaaatagggcaacacctgtggcgatgggtccatgcaaccctaacaacggaataataaagtttgaaattatgattacagattattataaagtatgtaacttgaatgatttttctccaaaactgaatgaatttaaatggctagtgcgtattttaaaaaaaataaaaaatgtttcaaaggagtgctattgttttcctagagattttatttttattactaggtgatagtaaatatttacatttataattagaaaaagttctttataaaaaaatagaggataacaaaaagctagataaaaaaaaaaagactctcagaaaaacaaacaaaaatggcgattgttaaggcgatttcgctacggttacttcttcgtcatcttctctcgaagattctgacagttttttacgccggagtggggcggttcctcttctcccatgatcaggcggttgttcataataggatagtgggagttccccacgattctgttgttacttcacgatggattcgaatctatttaaagaagagacttgcagatttcttctccattccctcacatttaacccctccaatcaattatctctttcgattctatcctctccgtgtaatcatggctgataatgttcgtcgtgcccttcagaacatcaatctcggtatcgacgaaactcccgttgctctccctcaggctattgttcaaagggcggtggatgataaccgcttttgcctcctgggtagacccctcatgccgcgaaatcagaatctccgtcagatcctcactacggttccacgaacttggggtttggttggtttcgtccgtggcagaatcattcaaaatcgacgattccaatttatctttccatctgaagaatctcttgacactgttctgagacgcggtccatggtcttttgcggatcgtatgctggtggtggaacgctggacaccggatatggacctcttgtgccaatttcatactttctggatccaagtgcgagaaattcccctacagtttctgaatctcgaagtcattgataacatagcagggtcccttggtgagcgaaaagcggtcgacttcgatccttttacaaccaccagagtcgaatttgttcggatccaaatcaaatgggatgtgaatcaccccctgcgatttcaacgcaactaccagttctcccttggcgtgaacacagtgctaagcttctattatgaacgtcttcgtggcttctgtgatgtttgtggacgaatgactcatgatgctggaagttgtgtcctccaaaatggagctctccatgattctgatggcgatgatgacaatgccgatggtgaccaagagtttcatggaaatcctggagtacacattcaggagattggtgatgatggtcaaccaattcaagatggtgatgaagtgggtgaagaaattgttccaggtcccgttggtgctgatgtcaatgaagcaaaagaggaggtctccgatattgacccgacccataatgcattagaggacatctcctccgacaatgaccgtaacatgttccatggggaatggacatgtgatgaggatcttctttataacccagttccttcttttgctaatgcgacaggtgatattctgggacctgtggaactcctatcacaagagctgcgaaaaaggaacataactttgaagtgggtg

SEQ ID NO: 26858 - DNA, 1290 bp, Arabidopsis thaliana landsberg
ctgggcttcgacgaccacgagcaattgctattatgggatagaagaaaactaccatcacgtgagcgattcggggtcgggatcgggttgtacaggtagtatatccgagtatttgatggagacattaccgggttggagagtggaggatttgcttgaacacccttcttgtgtctcctatgaggataacattattactaataacaataacagtgagtcttatagggtttatgatggttcttcacaattccatcatcaagggttttgggatcacaaacccttctcttgaacttatttctgtcgaattatagtcttttttttataagttggggtttgtaatcatgaatccaaaccaacttgttgttttcgttttttagtattgttgtttctatatttatctcacattatgattttaaatttattttgtcaaccaatcctcttttaatcttagtttctttttctttgaatttaatttcaggtatttgttgtattgatatctatacactgtaacagatgaagaagatctggatacgtatttgaaatcgatatgaatcaatgacattccgtaagggattagccgaaattttagtcaaacagtgcctggcaccactttgagaaaacagagctccaacactaaaaactgtgaactttttaaaaataaaatcgtaaactaatacaatgtagtatcataacttttggattaaaaaacaccagactaggtgtgtgtttgtgtattgaaaaacaaaactggaaagcatattgttgagtatgtcgagaatttcacacaatcccagagtgtataggacacagggactgtaagaacaacatcagcccactcaatctgacccgaaacttcatcattgagactcttgtcaagcaaaatcacagcacaccaaattttcttggtttgatcaagaggagacaaggcaggactgtcccaaaagagtagaagctttccaccataagtacaaaattcagtatcatttataacgtacgcatcaagtccagtcaaaccgttgaccaatctccactcttctgacgactcttctgacgacgttgtttccatccaccaacatcttttatccgcataagtgtattctacattctctatgacacaatatttctccaccaagcttgagtgatccttgacaacttcccattttttttcttttaaaaggtaaacgaagtccttcttcttgttcttgctctctacattcttcttcttcttcttgctctccacattcttcttcttgatcgtcacacaaccatttccccccatcggtaagatctttttat

SEQ ID NO: 26859 - DNA, 1337 bp, Arabidopsis thaliana landsberg
agacgattttgaatagcaatccaagttatgaaagataatttaggagtagagttggggaaccaaactcccttattaccaatcacattttggatttgcttcccgattcaagtgccaagtatgttgggacgagaacttgaacttgtaggagccatttttccttttccacattgagatatctcgactagtttgaaggatcctattacggatagtgtcaagctcatctttgataattgtaacatccaggttaaaggaatatggtggtgcatgctgagaggtttaaaagaattcatttggccacctatgtcaccaaaatgcacttatatttttggtcaaacgtcctgagagaatttcgtagttaagcgtgcttgggctggagtagtttcaggattggtgacccttccaggaagtgattgtcgaaacaatgtgaatgagaacaaagcatgagaaataatcatgtggtgatttgaagggtcggtaacaagtatttaaagcctctcgcacgtggctcacccaccgtcggacagacggtgcccatgggcccgagagaggacgtgaggcccattggtaggggcggttggggcgttacataaaccatatgattacatagctgagagagactcaagaatcagtaatctaagagaagacgagctgaaatatggtactcgacgagacccactactatccaaccccacccgaacctaccaaacaaaactcaggttatttctagacaatgattatgagtattttggacctgaatcttttgactttgcaagacgtgagagagattatctataatgggaactcaacatagataagtacttatgttttttatgagggagagatatgcaccacacagtcttccccaacgtagtcaacacacttaccatccaaaggaaccaagctgagagaactctacaaatctacgtgttagttcaaatcaaattgcgaatcaagatcccgctaagaagaatgagattggtacatgtgcaaaagaagacccgagcctcataccggtaattgaattatatactgaaccgcatgctgaactaaagaaagttcagtcctatgattctttgaaatcacatgaaccaacatgttatagatgtcataagaagggacattttgatgcaacttgctctaaaagacaagtagtagatgccacatcactagagctgaaagtaaatgcatctagctccaatgattgtctcgtaaattcaagtttagaaattcagaattctagattaatgcacatgtctttgccaacggttactaatacaggtatatgtcataacatggatgacacatctaaagaagtagtattcaattaaagatttaga

SEQ ID NO: 26860 - DNA, 1529 bp, Arabidopsis thaliana landsberg
tctgtctgtgttgcagattcatgaaagatttgatgcacgcctccataaccccaagtggacgatgcacgtacttgaatattttaccaaaaaggtcatttttttttttttttttgatgctatggttttgcagtaattagattttcatgaataaattgcattgttgcatatctttgttcgtataccattgaaagtagggtcataagtcattgcacatattacactttttaggtgctaaataaaatagttactgattccgttcttcttttcattacagattttcccaaagattaaagattctgttcaggtactcccatcattcgaagtcattcaaagtctaaactgttttgttgaccatacttctaagttgccataacatactggacaataacaaagttgggcagaacaaagaccttattgttatcacgtaaatttgggagcttgattgttcgtattccaatcatgcttgtagggaggagtaatgatctttatccattcttacttcgagttcgtcaggcttagaaactttttgaatacgcagaatacctctttctgtcttcttggagagtaagatcattttcttcctgttttgaagttgctgcttctctgtgttatctggatttcctttaccggatatagttaattgacttctgtttttcagttatgcaaaaaatgcagatatatcccgagcaagagaacagttttttgtagggagccgaaagatcatgctttacactgagagagcatacttttataagagatacaaggttttttcttcttcttaaattcatctttgatcttttagtaggttctgtactgttctgaccaatttggctgatgtatgatgatgttgctttctcggtttcagatccgtggtataaagaacttaatcttatattctcttccggagcggaaggagttttaccctgaggtaagtgcatctttaatcgagaattaaatacgacccaaccctaatcaggagaacgacagtcgagtctcatcgttcgatctttaactgcagataatgaacatgcttgaagaaggatcacatgacatgatgtccactgcacttttttctcgttttgatatgctccaggtactacttacacatctctcgttttcagtctcctgatggttcctcatatatagacaattagattagtttaaaacttagctcactcgaaccaggtacaaagagtaatgataaatatataagttgtaatggcaagtttagtaatgtggaccaatgtgatgttttttgcagctggaaaggatcgttggctctacttccgcaaagagaatgatcactactgagaagaacatgtttgctttctgttaagaaacaaaatagtcgatatctatttgtttggtgatcttgatcgcccaagtttgattatgctattttctttgttcagactaacccgttcaattcaaattaaaatgaaactcaaatttagagaacaaattaatttagtttcattttcttgagtgcgaatataacgtttagttggcatttgcattttataagtatc

SEQ ID NO: 26861 - DNA, 842 bp, Arabidopsis thaliana landsberg
taattgaaactcttcacatatgcttaactgaccaaaaattatagttgtatatcatataaaattttaaattcaatcatgatatatgacaaaatgaaatcatgatacgtaccactatactattaattagtaactttttgaataataaaaaaataagcaagtaattgctaaaaacattgtagatcatcccacagcttttttcaacgaaccctaattgttattcttttcttatttcctttttcaatttgttgataagagaaacttcttcgtcttctatgtcttcttcttctatgtcttcttatcaatttcagttcaatttgatcacagtgtcatcgcttccttgagcttgcttcacttccctgaaaattttggtaggtgtgttcttttttcctaccgtactgtttctcccgaggtctgatgtttttcctttgtgtgtgttcacgtatctggttctctgttcgattcaatgttacagcttctgggtatcatgcatattgtcttctttaagaaattaggtttaagaaagactcgatttttttgctctgtagacaaacttggcgatcgtttttgctcccagatttcataaatgtgtagtctttcttagtgtttctctctgtaatgatttgggtactgtctcaaatttaatgacattgctttaaacccagtctaaaaattgaatatttgagaaagcttgtatttttattgaagtttaatgatcatgttttttcgtgtagagaagatatctcgagtttatctttgtcatggttgcggttgattccacttttcctagccatggtagctcttattctagtagaaggaagaaagtttctgctttggaaccaaat

SEQ ID NO: 26862 - DNA, 496 bp, Arabidopsis thaliana landsberg
tggataaacctaagcaatgtggctcttgctaaatagactcagagtaaagaaaaaataggaagctacaagttcatatcaagtgggttcattatgtcctcaagttcacatattcataaatcagtaaaagtggtgagtgttcaaacatatgcacaagtagtgaacgtaagactaattggtccaagtgtatatcgaactttaaagtttcatgcatgcgccgtaaataactttattattttatctttcatgtagatccatgatttttttttcttgattgtagttttactcggaacatacaaattatttaacaaaaggcgtcagtaatgtatgatacgctaattatttctgtacatgtaagaagtctcctagtcgcaccatataggatttatgtggatatatgttacacaaaaaaaaaaaaaatcaagttcatcattaatgcagtttaggtcttaaacaatgtaagattcgtttaggtctttacaaatgggaagtgagttta

SEQ ID NO: 26863 - DNA, 867 bp, Arabidopsis thaliana landsberg
attttctcttggaatagtgtctagtctcttgtttactttccttccttctttctttgagtgagttacagaatgttttgttttgttttgttgcagcaatgcatttaagaagttctttcacccagtgttagaagaaatgacagctcgccgctcttcaactgccaaacagttcaacatagatgattgtcttgagaattttcagagattgttatacaaaagtgctgatgataaaacaaagacggacaattttctattgcagcttcaggaggaacttgagtcccttataatccaagtaacaaagcaatttgccatacagagaacagaggtaaactcttatgatacttactcgtttctgtaacataatggaagtttttcacggattcattttgaagatgttacattgtgtgtatattatattcaattgtctcattgttgtccaggtattcccaatcatcagcaagaattgcaaccatgaaatgcagaagcagctcctatacacaagcattcatgtcttacctcttggattactaaagtgtgtcatactttggttttctgctcatttatcagaagaagaatctcaatccattcttcatttcttaagtttggaagattcttctcccaagaaatcatttccacgcctcttgctacagtggcttcgttttggctattcaggcaaaacctctgttgaaagattttggaaacagttggatgttatgttcaaagtaagatgttcctgccaaaaggagcacactgaagaagcatcaggatcattttccaaccaaacacagctgcaactatgtaaagtatctaaagatgtttgtcctagaaagaaagataagtcttcaacctgcttcatgtcaatggatctag

SEQ ID NO: 26864 - DNA, 1631 bp, Arabidopsis thaliana landsberg
cttttttcaaactcgcaagatactaacaaggttttgtctctgattcgggatcatcggtgtaatctggtccaaatgaaacacgaatataaaatgcgagtttgtcaatattacaaacccaagcccatgatgaatttctgtttgtcaatagtacaaactcaagcacacgagagtcctcttcagtcagcgagtctgacaaaatgaacgaagttgctgtttgactttccgatgaaccagcacacagtctattacagccgatattgggccaattcatgggcctcttatttattttcgagattctcagattttcctacaaaaagttgctaccaagcatttttgggccaattcatgggcctcttatgtcttcgtaatctaaatatcatagctctgaaacatgtgaatctacaaaaccttctcaccacatcacatttaggcgtaaccacattgtcttctaagagttatcatcttaatactcaaaagacttgactaagtaactaatttatggatcatggagcttgttgggtttgtcatttttccttgagagctttacttgatcctgttcttgaagagaaactcgacgtttctcatattggatttgctccttcgagctgtgagcttgagaactgcaccttctgagagcatccgttgcaccaccctcgtgatgttctttgtgtcatcaatgcccagatggtggcttcccatgagttttattccacactgcctcatcattgacaccattcctcttgcctgtcatgtcatctactattaatgagtttacaataacatacaataagatgatgatgcatagtgatatctccaatttacctcacggccatagaaattcaagtagacgtctttgagattgatccactccataaaatatggcggaagattgatgtttgaaactacgcattgctcaggaatctttgtctttatatcccagtttccactgataacattaacataatcagtatcccaaaggaaatcagtaatgagaaactcaaagatttacataagcagccccatctcttatcattaattctcaccaggttacaaaagctgcatcgttcagaccccaatctgtatctttatcccacaagtcatgctcagctaaccaaacttcaaactcctcaacaacttgcttaaatggaatagctgtgtcatgccacacactacaattcgattttttaaaagttagtgcgacagtctcagaatccaaagagaaccaaaagaggtgttgggagaagtctgtggagtgtggactctaaaccaattcttaggattatcatacttagcagagtagtcaattatagcatttggtaacgcatgcattaaggattgactagtgcaactagacagaaaacataacaagcattgtagccatataaatatatctacacctagaagtaagatagtagtagcataccgatcaaccccgagttccccatacttgccttcgatgtatttgttaattgcttgctcgctcattttggtgggtcttacaaaccttatgaagaagtatagagaacaaataatcaaccacattgtaaaattgaggagtaaaattattagagaacacgcaataattaacattgtggtatctagctatgacccataacattctgaaagaaaat

SEQ ID NO: 26865 - DNA, 1938 bp, Arabidopsis thaliana landsberg
ttcaaatggcggagaaattgcagaagacgaaattgagatagacattgatgttctcagtgatgaagtactggtcactcttcgaaaccttctagatgaatatatacaaaacaaagaagcaaagcagacgaatgttgaaccatgtgaaatagaggtaatcatcatctcacctgctggaatgcattttaatagaacactttactgagaagaagtgaatttctttggttgcagcttattaatggatcacgaccgagcaattcgtcgctgcaaagaggtgaacctcaaattcagttcctggtttattactggtcagtagtctctgtgttcaccaattgtcttacttttactcttctatgttcttttttctaggaaatgaaatggctgatgagtatgtcgatgggaatgaaccgcctatctcaaggagctccagtggttagttgcaattcttcaactccttcataacattttcttgtcgtaggtctctgtggatcttatcatatgtcactgactcgtgtatatatcagaaagctatatatatatatatgcctctgctatgtttatatcatgatttttgtatgctttttatttgcccaaatatccttctgtaggatcatgttatggtaacagattatgtgttactgaataaagtgttgcttttcagattcggattctggtagctcggaagatcaatctgatgacgctaaacccatggttcaaggggattcttccaaggtataaatctaataatgtcagcttttcaaggcatgtcatttttaaagaatctaaaccacgcagttggttaaccttcagatgcctgaaactgcaaactctgaggcgcaaagagatgaaaatacaagaattgatgatctttttgttgggagtcgtgagtactttatctcctttaaattcattattatggtcttaagattattcatatgcttgcggatttgtttttacttctctaccttagttcctctttactactcccagtttcctggatagatttgtccaagatttactctgttgtaatatctatagttggccacaatagggaaatgtaatagatgttggttatcactgctggaggcaagatactgttaaagaattttctcgggatacgtattttcagtttgtatcactggtgtattcattacagaatctactggtgcgcttgagcagatggatatttgttctcagcaaaagcttagttctgatgaatcagatggccaacatgagggtgagatgtagtgaaaaagagttttattttttttctctatttgagccttgaattgagtgatctcatactttgtcaacttaatgcttcaggaaatatattagagactccagcttcatctgagaagcgctatagagctgcgctgttgaagagccggtttgcagatatcattctcacagcacccgagaaaccacttccacaggtctgtacttatcttcaatttagttccatctttaattgccttaagtggtcactggataatgcttctggctagaactcctgttaaagttgtttggctttaatagttattaaacataggagggtaggaagagtagaagtaattttaaacaatcacagaaacttggagatgtagattaggaaataagaatttttatttaaaaattatcagaattgttacccgagcatagttgtggaatggacctagaaatccacaattgcattagtcgatcttgaattaaatgcatggatcacatactctacaatatccttgaagcagtcttctttgtcctttgggaattaatatggcttaaatttgatctctcatgggagcagaatggtattaagggcgatccagaaaggctgcgtaaagaaagagaagaactcgtactgcagaagaagaaaggttggtgtacttgtttagttgtttatatattagaacaagcccatatattaaaattttggtgttt

SEQ ID NO: 26866 - DNA, 2577 bp, Arabidopsis thaliana landsberg
ggaggaaggcgtgctcagcaggagcaagccgctcagcaggaagaggtaccccagcaacagtaactgccgcccccgcccctgatgtccattgagcagatgttcctgatgcagactcaggcagtccaagccatcggtcagactctggccgccattcagcagcagcagcagcaggcaccacctcagcctcagatgcctcagatgcccagggacaagcgtgctgaattcatgagaggtcacccaccaacgttcgctcactcttctgaccccatggatgctgaagactggctgcgcactgtggagcaggagttgcataccgcttagtgcgatgacagggagaaagtcttgtatggtcctcgtctattgagaggagcagctcagtcatggtgggagtcttatctcgtcacccatgccaaccccgacactatcacctgggaggaattcagagacaatttccgccagttccatgtatctgcaagtctgatgacagcgaagaaggaggagttcctggcgctcaagcaagggcctatgtctgccagtgagtaccgggacagatttctgtagttgtctcgctatgctcctgaggatgtcaacaccgacgccaagagacagtatcgttttctaagaggcttggttgaccctctgcattatcaactgatgaatcataccttcccgacgtttcagcacctgattgacaaagcaatcatgacagataggaagcgtatgaagatggaggattgcaagcgcaagatcagtggaccccagcctggaagcagcaatcgtcattgttttttaggcaatccaccctagcagttcaggctgaaccagcgtccacctcagcagcatcagcatttccaaaggcagtatcctcagcatcagtatcagaaccgtcagagcaatcagtcaggaggtcagtttcaaaggcagaatcagcaggcgcctcgtcttcctgccccagcaaaccagtagagcagtcaggcaacaccagctcaggttggaaacagggcatgtttccactgtggagagcaaggccactgggtgatgcaatgtccgaagaaggcagcccagcagcagtcaggccccaatgccccagcaaagcagaatgtgcctcagtctggagcaggcaatcgctctcagccgcgctataatcatggaaggctgaaccacttggaggctgaagcaattcaggagacccccgacatgatagtaggtatgttcccagtcgactcccatattgcagaagtgttatttgatactggagcaacgcattctttcattactgcatcatgggtagaagcacataatcttccaattactaccatgtcaacccccattcaaattgactcagccggtggtagaattcgagccgatagcatttgtttgaatataagtgtggaaataagggggatagcgtttcccgccaaccttatagtaatgggtactcagggaatagatgtcatcctagggatgaattggctagataagtatcaggcagttatcagttgtgataaaaggacgatcaagttggtgtccccactaggagaggaagtggtgaccgagttagtcccgcctgagccaaagaaaggaagttgttatcagatagctgttgatagcagtgaagcagacccaatcgagaggatcaaggttgtgtccgagttcccggatgtgtttccaaaggacttaccggtatgccaccagagcggaaagttgagtttgccatagagcttcttcctggaaccgcccctatcttcaagagagcttacagaatatctggaccagagttggttgagcttaagaagcaaattgatgagctgtcagagaaaggttacattcggccaagcacctcgccttgggccgcccctgtcttatttgtggagaagaaagatggcaccaagaggatgtgtattgattatcgagctttgaatgaggtcacgatcaagaacaagtatcctttgcccagaatcgaagatctgttcgaccagttgagttggagcctaccttggagcgcgaaatcaaagaagcgcagaagaatgatgagaaaatcagtgagatccggcgactgattctagaaggcaaaagcaaagattttcgagaggatgcagaaggcgtgatatggttcaaagaccgcttgtgtgttcccaatgtccagtctattcgggagttgattctcaaggaagctcatgagacagcttattcgattcaccctggcagtgagaagatgtatcaggatctgaagaagaaattctggtggtacggaatgaaaagagaaatcgcagagcatgtggctatgtgcgatagttgtcgaagaattaaggcagaacaccagagaccagctggattgttgcaaccgttgcagatccctcagtggaaatgggatgaaattggtatggatttcatagtcggattgcctcgcactcgagccggctacgattccatttgggtagtagtggaccgtttgaccaagtcagcccacttcatacctgtcaagaccaactacaacagtgcagtattggcagaattgtatatgtctcggatcgtttgtcttcatggtgtgccaaagaagatagtgtcagacagagg

SEQ ID NO: 26867 - DNA, 1159 bp, Arabidopsis thaliana landsberg
tccgtgcctgtagatacgctgataaattcttcgtttgataggatcactaatccaagtcccacttcctctaagggtccattatgggtcaattcatactccgagcctcgttgaacttccttgggcctcaaaattcaaagcctctctcaggaagctcaaacagatgacaccttcaaccttcttagaagatggaacccccatggttgtagctccggcttctgtcctgttaaaaactgctgagatgtggaaaggacatattgttgctcaattccatagtctttggcctcctccggggaagattttcaatgatttgaatcccatttgaggtcgttatgggagcattacggttcgtctgttctcgaagacggcggcgttgatattcattccttctccaaatactcgccaatgggtggttgataatggtttttgacaggcaggaaagtgttcttgtaccgtttatcaatggtccttagagggtcctctagagcctcaagagttatagacagcccagacatgggccattctaaaaaatgtccctccccagttatactccttagaaggaatcagcgtgattgcgagcggcattggcgagcctcttcatacagaaaaatcaagactcgatcctgtcaatataggaagaacaaaggttaaggtggttactaatttaggaactcctttgccagacttaattgtggtccgtgatgttcagggtaatattgcccgtgttgcagtgacgtatcctcgacctcctcctaagtgtttgaattgtggcgatatggacacttgttgagcagatgttcaaagcctcttatgaagaagcttcccttcaaaaggatctcccttctggttctaaggaagtaactaacccagtgatttatttacctacttctcaggacgctcagagaggcattatgttagagacctgaattgatgaccacagaacgactactacccaggctagatcaaaactctaaagaacttgatcgaagaagcgcatagatagattgcctactgcatgcctcagaccgttggggatcacaaataggagtaagagactgtcaacgggacagatacgatggtgtgtccagggctagcaggaatgacagggcagatgcgtagaggacagtgacggcttctcacccatctgcgtgttcacctacta

SEQ ID NO: 26868 - DNA, 900 bp, Arabidopsis thaliana landsberg
aaaaaaaaaaaaaaaatacttgcgattttgatcaagtgaataagggggggcaagtgatttttttcttggaggaaggtgaaagctgaaattttcgagatggtgtgaagcagagaacaaatgaggaagatgatattgaagtgcgcacaaagaagaaagtgagagagagagttgataacttatctttaggtttcgatttgaatgaggggaggaggatggtctcctatgctttctttgtttggataagggtgttgaccaaatagtgattgagcatgatggataaaggctttgtccatcgagtaatagaatgatggggagacaagtgggccactcgatcatcaagattggtcgtttagttgctttactagaccaattgatagagtaaaatggtgatgcaattttactcgaccaattgatagagtagaattgcttctgttgcagatatttcttaatcacagagtttacagctctacaaatcctgatttatttcctgaatttcaaaaacactaaaaagcatattaaaatatcaaaattaaatatgtaaagagataggcatgcgatttcctcccaagtgagctagtttaaagtcttaagctagacttcttactattttaggcattgatgggttcctggaggtcaactgtagttcctttaggaatagggcaatctgccatataacgcttgactctctgcccattcacagtaaattcagaacctccttccttagtaagagtaattgccccatatggcagtacctctttgatggtgaaaggcccagaccacctggattttagctttgctggaaacaactggagtctggagttgacaagcagaactgggtctccaatgttgaaatcttttggtgagatctttttgtcatgaaaatcttttgttctttctttg

SEQ ID NO: 26869 - DNA, 860 bp, Arabidopsis thaliana landsberg
taaccatgaaaagtatgacaacacttggaattaaaatgtctcaaaactaaaatggattttaaattggtgacctttagtttctgtcacaaaattatctattttaatctatgacattaaaaagaacattaccagtttccggattattcacctaaagacttgattatactacgtacatgtgacttgtacgtgctttatgtttctttttaagccatatgaaatgaactacatgtcaccaaatatagggagagctcttgagtctaatatcttataaacaaattaaaacaatagtttatgatgatattggtccaaattccgcatagttttctgattattccattttttaaattatagagtcttttacggaatactttaattagactttttgatgattttgatgtaaagcaaagaagaatctatttgagactttatctacaagctagctatttgatcatctaactaaaccacgtatactcaaattcgtaggtgatttgaactaaaattacaatttaacacgccattactgcaacaatgaaattcaattattgactttgttaaagatttgttcctcatatcatgagttaatcatcacatatgattttgtaacaattagtaaatacatattcatgacatatatacaagatttcttttaaacatgtgctgatatatatatataaactactaaaattatatttgaatcttttttgtagtaagaaataggaaaacgatatatattaatatgtgatagtgattaattttagaatgattgtaataggattgtaagacatagacaaatcgttatgcactgcaaaggaacgtatatttgtgattcccgagaagtatcgtcttgctgcctaatttat

SEQ ID NO: 26870 - DNA, 1766 bp, Arabidopsis thaliana landsberg
actacgccagaagcagaatccaaacgctaaaccaataataggtattaactaaaattctcttaagacaaagacaaacaaataaaaaccaaaactgaagccaagagaaagtaatcgaatggaggagaagcaaaaaaaaatacaattttaatgatctaaatccgcatttaagaagggaccattaagcattctcctaaaatggccaaatagtaagagtttagtactcaaagccgactcaaatcataattgagatgatgcagcttaaaagcacttaaatttagaaaagtgaaaacaagattgagtgttgaaaagaacaaggggatgagaaagtaaccttctctgagcattagcgccccaaaccctaatctggcggtcgtacaaggcagtctcctgctcggtaagctcttctccgtccattcccaaattcaagctatcaattcaacaaagctttgctctaagaaactagaatttgcgtgtatatttttactggatttatctatgaaaactggagctttcgataaacctagtcctcccactgggtcgattttggtcaactctctcacagtgtttgccaaaaaagcaacggaggtttctatttattttatttctagtaaaatagaaaaagaaaaaatataaatggtatgtttcgatcgccggttggatccggtccgaccgcatatcagttgattaatacaaaatttaatacataaattatacaatagttttacacagttttcatatgttctacggtcataatttataaacctagtctccagtgaatcgatgtttggcaataatcataattcatgaattgataaaaatatttttgaaatactaaaaaagcgtcgacggtcaaattggtttgagtctttgcatggcaacaatgtcggattgccaccggtgcttttgtaagtcttaactttggtttgataaatcaagtaaaaaagtagtatctgttttgcaggttaaatactgaaaatttacaagagttttcacctcttttgtttgaggaatcatctatatcaaaatactatgaaataagtaatattataaaaaaaacatacctgcgaaatcgtgaaaatagagtttccttgtccaataaaatgttgttcattctcctttctctgcagaattctgaaaatgttcaaacactggtgaatataaagaaacatattaattctctcaagaccattgaacgtcttattttctatcgtttcatttccctctcgctctctttaatttaattcgctggtaaatttttctagtggcatgagtcaatagttttttgttggtttaatgaaacattcaatgaacatgttacgtgtatcggtgtatcattagttacattgaactttgccgcttgtaatttaccatcgaaatttgttaaaaatatgatgaaacctgaaacgctattggtattgggtgaaactctatttcttgataattttctacctatctcatagtgtttttattttggtcaaacaagaacacatctcacattttatatcgggacattatggaatttgtagtcaactaaaatttaaaagttcaaacatacaataaaaaaaaaaaagaattcaaaacgatgtgattttaattaattttcatttcagtgagcgttttgagacacttataataatatttggaggagaagagagtaaccataaactacaaacatgagtttggtcgctcagtttgcaactcatcctcccgcacggccgagaagcaccaagttgttgtgctcattgcaaagcccaacacaagaacaa

SEQ ID NO: 26871 - DNA, 844 bp, Arabidopsis thaliana landsberg
gggggtgatggtaatatggatatgaaccaaaaaactgatcaggttaaaatttatacagtatactttctaactaaagtttatactaaaatctaaacgaagctgattgtttttttaaaaaatagtgtaaattgaattctttgtcaacaagacgacgggtataaattaatatataattatagttttaataaatatttatgaacaatatttaataagcaaattaaaacaagaataacaaaaaaaaaagattgatacgtaaaagtacaccaattttgttttttagctggttttttgctcgtttccaattaaacatatatacatctgatgttcaaagaagttggtagtgctaataataaaacagaaacatcaacattgaccaaattaaatatagacttatatatccttttaggctagagatcaaagtattttatacagtgttttctcaaacatcactaggaccgataaattctaaactttcttacaaaaaattaccagttgaattattgacatttgataaaagaaaacaaaacctgtaaatttaacataaatacattaaaatttgaagaaatcatccatgaacttaggttgcatatatagaatgggaatcatgtattcaggtttatgagacaaatcatagggaaatacaaaagcggtgtatataattctttaacatcaaatacgtgactcaaaccttatacactcgcgtatatattgtataattgtcctaaacaataagtaatcaactaaaggtaaaatctatattgttcaaagttaaactagaccttcctttcagtctttcatacttttaagaattacctaaaggatactaggtccaaagtctaggtgg

SEQ ID NO: 26872 - DNA, 127 bp, Arabidopsis thaliana landsberg
tgacctggatatggcgcggaaaatttgaacggtcctatgggagaattataccagaaaagagaagggtatgcgttactagtagcttcccccaaactgctggcgctatgatcaaaatgtgctttcccaa

SEQ ID NO: 26873 - DNA, 5682 bp, Arabidopsis thaliana landsberg
  unsure (1)..(5682): unsure at all n locations
cgcaggcagtgcatcatagcgaaaaagtcctctttggacctatcctcccactaaacataagaatactgattagactctgccaagctacagaaaccattatcagaatatcaaaatcagtggtctatgatttacctctccgagaacaagggactcgnnnnnnnnnnnnnnnnnnnnnnnnnnnnnnnnnnnnnnnnnnngcttctctccggattttaccagattcttacatgcatacaatggaagcctagcccctgaacaaacacatcataaggtgaataaaaaaaaagtgataaaatttaaacatgattaaaaaagacgattcaggtttccaaaacgtaccgttaaggcaacaagcgccgaggcaattccgtccacagccgacgggatcctccgctccatcgtccttctggtagttcgaaacaacggtcggaactcttttgattttcaacattctcaaaaaagacaaatttcgaagagcaaaagaaaaaacttcccccaagaaaaaagcgattcaagagcaccaaaaaaagaagaaggaaaaaacactaacaaaccctaactcctaaaacctaaaggaaaagaagttaaagctggaaccgccaccggcgagaaagaggagatcggaagggctgccgccttcagacggcagagctccacgtcctccgtgcggcaaaggattagtttcgattaaacaacccttctgtcggacaatatggacatgtgagctaacaccccgtgatatcccgtgtatagccgtgattccgatcacctgttccccggattttttcaaatcgaacgccggaaaaaaaagataacagagaaacgaacccgacactcaaaacagcagaaacgaaacgaataaatgagagatcttttgatgtcggtttttttcacaaacaaaaatttgagaagatgcctgaatgaataattctttgaggtgttttttgatgatacagtgttttaggatatcgaatgggctttaaatagataggagatgagtgaaccagagaagacagacgacaaaattttagattatatacgaatatttctcctttttttttctgtggttgtgattcggacgtgaaatttcttaggtcctttcttgtggattttatttttcatcgatattattattttgtctaattgtatttttcttctaatctaatttgttagtttgattaggcaaaggaccaaaacaaaaatcttattcggaagataaaatgagatctaagtttgataagattaaagttggaaaaaatatgtttgcatgcaattaagaaaatttattagtcttgcgagaaaagttggagcactacattttctttgagagaaaaatagatcagaatgaactaaagaaagatttaaatcttgtgtagattggaattgagaactaattgtaactgtgtcttacaagtattttcaattaaatttgaggagataaacaattgctaaacgtttatccaaagagaataacatttgctaaacctagttaaccttacgatatacgtatgtttaatgccaattgattatgaatttgaatttcattgtatataatcgtagatcgtagtttgctgcatgtaaacgagactaaaaggatggaggcgatgaagagttcatgtggcatatgtcttcttatgatgtcatgtgaagtcatgtgttatgccacgttttatattatcatagaatattattattatattaacgaaattttctttttgactttttctgttcaacattaatttgtaaatttatgttgtctttatagataatatttacatggtcgtgtttattcatgggacgggggtgtggtcgtagcaactactacgaggctcaatttgggcaaatgactaccatcgttcgttcggtcgtttttttgcgaaactatgatataatttttaaatacatatattgagaattttttagaccattgctttttgttcgttattttatgagacaaaactacaaaatgaacaaaaaaaaaccaaacaaggcaagaaacacaagttaagattcggaatctaagaaaaggatatagttcttgaaccacataatagtggtccattatttatttggcagtctctacgactacgatcgtacgtccctccttccatcaccgtatgttttatttattgtttcttttttctttttactttaaacaaccatttatcatgttttaagacctcgacatgtaattcgaattagtattgcattaagatttgaagagttacggcggtggatcggtggtagtcagtgcaagtaacggatcataattgcggttgaccaagcctctttcattggcctctttgtaaccatgaaagctgagatgctattggtacaccactaagtcccaaattcccaataatcgtgcgtcagtaaacatcaatttcgagaggacaagtatcaaaatgcgatatctgctgttacaaatattcaactcagttacaaagcccttaacaatgtattgatttctataaagtaactttgtgaacacacctaagtttatcaatgaagaataaaattattttaaataatcgacaaaataacattatacatgaattttacaacaagtgtttgagcatagtagctaagttgttttcttggggtactctcttggtccgaaaatggtggaaccaaccctcacattggtgcttcccatctcaatctgcagaaacatagtcaaagatcatcttccacatatgtggttcctcggatgaaagaaagaatacattcaaatgattctatattaagttgaatgcatcaccgatattataagagagacaaagatattaccgctagctcgaagtcaccagacatgcccatggacagttcaaattgatcctcagccattccaagtgccttgcatacatcagctctacagtttgaaagtgtctgtcccggtttatggggaaaagaataaactttggtaagtaaaacttgtaggaacaagtatccaatcaagtagatttttagtagaataccctgaagttctctggggtagacgtataatcaggcatcccaatagtcattaatccggagaataccagatttggacagtgatgtttcacatgtcttgctagctctagaacgctggaaggttcgattccagatttagctacaggaataatcaatcagtcagccaactgaagagggtggacaaggaaatcaatttacaggacggaagcaatactcacaaacttctccgcttgtgttcacttggaccaaaacctttagtggatgtctcccaagatttgaaacagctcgatctagatgatttgctacctgtgaaatcaatcccaagtgattgtgtaaccaaaataacctcctagtaaagtgaatttgtgcaagtgaaacgccacaacaacctctaatcgctagttataataccttttctccatccacaccatgaaccattgccaaatttgggactccagctgcaaacattggattaaacgagtttcactttcactaaacccctaattcaatactattaaagatggggataaaagtcagactcaatagcgttttggctttgttgctctgtaaatgccccacgaaatgccactctatatcttccggtagctgtatatcaatcaaacaaagtgaaggagaagctccattagcatcaaaagcacaaaatatatcacattcccagaaaatggagagacacatagtagttagtgattgaaggataaagattcggattttgaaatgaaatcgattatctagtgaagataacaaggattgnnnnnnnnnnnnnnnnnnnnnnnnnnnnnnnnnnnnnnnnnnnnnnnntcgccgaagcaacggtgacctgcgtcgtagatttggcggataagtgagacgggtttagtcttggagactggaaggaccctgacccgctcgggatctcttcctacttgctccgccgccttacgagctctaagaatcacagagcggagagcacttgcgacggttgcctccaccgcaggagctgccatcgccaatcgccactaacgcctgtcgtcaatttgggcttcttcgggagtaatgtttttgtcacgtaaattagtttatggcctttaattggataattcacggtccacacgttcaatactaattgcgattatttatctcttcacttttaatcaaaatttccaaggcagagacacatgtaagggttgatgtatatagtcatcaattcacgagattattggaatctttattgcataaacaatatcaaaattgtgtttttatatataccctttcaaaacgttatgggattcaaaattacacccaccacttattgattggacataacatcattcaatgtaaaattacacccacctcttattcatgttttaattttcacttctatatatattacgaatttcatgtattctgtttgtattttttgggtcttaggttaagcccatttgtgggtttgtaaaagtctttgacaatatccaataaatcagtgaaaaaaaagaaaaagaaatttattatcactgtaaacttcaaatcaattcaaattgtgctttacatgggtcttcgctggaccaatatgttttgtgggcctttcaagcccaacaatagttatctaccctagctcaaaaagagttatcttattctcattctctctctctctctgccgcagctatcaatttactggagaagagatggtgggatcagaggttttggaggaatgtggagaaaaaataagcaagaaagaggcaaagaagcgagccgctaaactggagaagttgctccgtaaacaggaacgagaagaagccacatcatcatctctttctgtggaggaggatgaatcgtgttccagcaactacggtgacgtgactactaacgagttgcagtcggctgttgagggaaaagagctcactgatgtgagcaacttggttgaagagattgtggggtcagaggtttcgatcagaggtcgagtgcacaagaatcgcttagtcggtaccaaattgtttgtgatcttgagggaaagtggattcactgttcaatgcgtggtggaggagaccagagttggtgcaaacatgattaaatttgtcaagcagctgagtcgtgaatctgttgttgagcttatcggtgtcgtctctcaccctaagaagcctctcacaggaaccactcagcaggtttcctttttttctttgattgattcgaatagcgacatacatgaactcatcgataatgttgttgcaggttgaaatacatgtcagaaaaatgtactgcctcagcagatccttgccaaatttaccacttgttgtggaggatgctgctcgtagtgaatcagatattgaaaaatctggcaaggtagaataatgttttaagttttggagctgcttatgatgatttatatattccttcataagagagctgttgcaggatggcaaacaagctgctcgtgtccttcaggacacacgtttgaataatagggttcttgacatcagaacaccggctaatcaagccatcttccgtattcagtgccaagtccaaattgtaagctctgatttgatatgcaacatggaggattatagctaggtagtgtcaactaggatatgatttgtcattatcctaatagttcattgcatgatttaattgtttgtgtaggcgttcagagaaattcttactatcccaggggtttttttgaattcacacaccgaaattgatcgctggcagtagtga

SEQ ID NO: 26874 - DNA, 1395 bp, Arabidopsis thaliana landsberg
tcattgccctcggctgtggattcggccgtggccacaatggccaaggccagagccgtctatgcattacctgagcattggtcgttgtcaagaagaagatacaaaaggataagagacagaaaatactgcgaaatattctcgaatatgaacaagaatcgaccaaggatgatcgcttcatggttttactacaagtagtaaaaaaacagttttaattcaagtgtttgccactgtcatgtcaatatctgctttggtacgtatatatattcattacgtagattaggacatgcaattaatgtggcctggttcaagttacctgtgtctcaaggcttcttccatcacacgttttaagacttcccttatattcggtctccagtttcaagtaggaacttaagtactctttctagcatctttcgtgacttctcaatccatagaaacgcatgaggaataaactctattaaatcttccctatctttgacttaaccagaaaagtttatcaaagtaactacagttggatttggagttagggtttatgtctatgtaatagcttcccacaaaattttgttacgcgatttcaaagctgatgcctgtgcgactgtgtctgagggtgagaagtttctagcggattggccttctttttaaactttcgttaatggccatgatttaaattatatttagttaatattttgttggaatgagatggattcgatcaagtgaaacaagaagaaggtgtgtcaattcggctaaattcacataatataatagcattttacactctgtttttattattattggttttagtcgtccacttttgtctgtccgattattgtcagagcacaataatatcaaatctttagaaaaacaactcaatttatcgctccatgtcaatttatatgtataatacaataaacatgtttttgaagacactaatccaaatgagatacagcttttatttagccaaatttcatctcaaatgtgtcatcttaaattttacatttaattgtcatagaaagggcccatgtcattctctacaaacttttggcttaagattttataagcctcttttcgttggatggtatgagtcccaatacataaaagaagacacatactggcaaagaagtgatgtatatatgttgcaaagcggacctaaatcgagtagccccgccccgcaacattcctctatcaatctcatcaaatccggcaaaaaaccaaaaaagaattgtaaaaaaatctcaaacttattctcacaaaaacaccattgtagagtgagtagatgaacgttaccatattctttgggggaacgaatcatatcattgaaagaagaagcagatgtcaatatacaccaatgaggtatcttacatggctctagccaattaggtcaaatccatggagagcttagga

SEQ ID NO: 26875 - DNA, 2546 bp, Arabidopsis thaliana landsberg
  unsure (1)..(2546): unsure at all n locations
atacctcacctggtttaaagaaaacagagagaccaaaatcaatagccttcaaagcatgcagtttccttcttgtttgcaaacaataagttctcaggttttaaatctctgtgcattactccatgcttatgacacatctgcaacacagattgaataaaccacattactctaatataaaaacgtgcctttcaagcaatgttacaaatcaataccgtccaacaagattcatagataaaagtttcacaaacctgaacaacctcgatgatcgttttaataaccgaagcagcagctctctccgtataatgccctctagcaacaatcctatcgaaaagctcaccgccttcacaaagctccataaccaaatgcacagctttatcatcctcataagtctctttcaaagtaacaatattaggatgttcaggcatttgcctcatgatctcaacttctctcttaacgtcctctatatcaatcgacgttttcagcttcttctttaagattgatttgcatgcgagtaggtcacgcgaggacctctcgatacagaggtaagtgacaccaaactcgccgcggccgagttctctgtcgagtaagtaacggtcctcgatgttttccttgggaacatcgcttagaactcgaatcggcgccgattttttaccgccggcggcgtctttgcgggcgtgatcgtggccggaatagttggatttcacgtcttctctagcaactgctgcgggagatctgcaacagtttcccatcactgtgtgtagctctgatgaggggtttcagaagtagaaagtaatagaggtgaaagtagatagatctctagctgaatttgaggtatctagggttccnnnnnnnnnnnnnnnnnnnnnnnnnnnnnnnnggaagctatagctagagagaagcgtagatcgaagaagcgtacggtgaagatgagagtagcgagagagagagagagagagaagagaggtctcttttgagtttttgatatttatttaatttctttattttctgtattttgtaaaactcaatcataatttggtctccttggtttctttttaattttgaaaaatggtctttacttgtttggtaaatttacacttattggattttatgttacatctgtaaattcccttagattctaaaaaaaatatttattaaggtacgtatatatgttgactaaacaattttcttttagtaattttgattgacaccaacactatcttttgaattcttgataagactgatcattcaaaaaaaatctaattttttaaaaataatctggattgaatatatacatactccggtaaaaataatattttacctttaatttggaaatattatgtgcattacatatgtgatatgtgtgtaatcatctaaaatacgatcacaaattttatactttgaaatatctaagatccacctgaacaactatgacaatgaataaaaatatggtaattgtacgtacaaaataaaacaaataattttttggttctaatatgccatttaagattttgaaatgtcatgatagaaacaactaatgatagaataaaaatcttgaaaatgttaccatttaagattttgaaatgtcatgtgctaatcttttttggttctaatatgccatttttagactcataattcataaaacaataagttatttcatagaaagaaaatactaaaacgaacatttctagtttattttgtaaatctaagaacatagatgcagaattttttcccattgtaaatccagtattcatttgatcaaaaatgagctggccatttcaaaaaaggtatgtaacatgcgaacgtaagtggtatgagcctaggagactaggaggagattgaaaatttgtgatgtttctaaacgatcgtgtggtcaatgtcaacactcatttgtttggcctttgggaaagtcctttttttttttgttataaaggatttgcattagaatggtacatttatatatctaaatttaattgatttgaattatacactaattactttcgaaatatccacaaagctctacggtgtaaaatgtatcttccaatgtcgacatatcaaagatagtagtatcatatcttctactagaggtctagagccatctacgtgtattatggtagtttaaatggatgtgatctgaggatgtccatctatctaaaattgcggaatttacttcatttttagataggttggttgcatcgaatagttcaaaatgatttaatttctacaactttttttaaaatgatcatagtttttcaaaatcaaaagtcatctgaggctttttgtcccgcacacatgaatttttttctgggtatcatatatgtcgtatcatgtaacacatagggcggtagataagacgaagtccaaaacgcgataaagaaacctttggtttagcatgagtaaaatcataacgataaagatacaaacttttttcattcccaaaccctaaataatggtgcttttgagagaaaaccaatttctacttaccatttttggaaacccaacaaaaagcgtaaatctagttgcaacgtccaccacatgtcttagtttggtga

SEQ ID NO: 26876 - DNA, 1162 bp, Arabidopsis thaliana landsberg
  unsure (1)..(1162): unsure at all n locations
taccgttcacgttattctctctcaagaatgtaaagctcactagtggaaaatgctggagcatcttatcaaagaaagatgtgaaatgaggaattcttcggttgaacttctggttcggtctcacaattgtgttgttctttttccatatagggttacttcttgctgcctgatgaagcaaaatcacggcataacattcgcactgcaaatgtcagcatatcggcacggcatccctgctttggcaacaggtaatattcacgttattggccctcaatttggaaacagtgattttaattgctagagctgtatccttatgataagcttctaaaattggattactttttcaggtggcagcaacttcttataaacagagttgttggatatgatactattataatgaatagcttacagaactctgctggtcaaggtaggtagtaggtctttgtcttgttcataatgtccatgcaagttttgctatttgtgggtctcatcctttgaagcctgtaattcctcaactatgggtttgtcttttcttttgtattttgtgcggaaactgtttctttctgaaatgttaggctaccactaaaaagaggttgtctatttagcttattgtaactttaaactaagttatcctcggggaattctagtcgaatttcagtgtgcagcaatatattggttcatgcaagactttgcaaaatgtaaaataaccaatgtcgttgttggtagctgttacatgatatttccatctgtcgttgtcgctgctcatgtccctttgattgtttcttactttctatatgctattgtgaaagcgtcagtttgcactccatatgactgccaacttcctccattacaggttatctatacaactaccagacaagagaattttacaatctcagttactcccaagaacttcctgacggttctgcgcatttcggaggtttgtcattttctgtcacggaaacagcatatgttgaaaactttcccttgaatctcgcaagtctatcgattatgagcgttacgttggattggaagatcttaccttggctgctttattagctcttgcaacttttatctgtagtttggtgtaagcatttactttaagagtaatattntaatgccggtgtatgcagattacttggtgacgaaatgggtgtccctatgatgtcac

SEQ ID NO: 26877 - DNA, 874 bp, Arabidopsis thaliana landsberg
  unsure (1)..(874): unsure at all n locations
ttcttagattttttttcctgctaatacatcaaacaactacaaacacatcatttgggtataattcaaaacacatcatacttttagtacaaaaatacatcattcataccatcaaacattacacatcattcataccattaaacattacacatcattcatacccattagacgttacacatcattcagtacaatacacatagattctcatactcaaaatataaacctgaaaagaaaatcaacaccaaagcaaacaccacaatgttcttcaagctatgaagctgaattttaatctctgcaacttccttttcaaccacagcctcacacacacgcgtcttcatcatcagattatcaatctctgattcacaagcattgaagttttttgaaatgtaatcgaagttccttctaagttattaactttttctatcaagtcttctatctcttgcaccatacaattatccatccatttgcacacatgatacctattatcctgtcacgccaaggtaaatgcatatcttctatgacacaaaaacacaaaaattcccagaattgagccacttacattatcttcgaatggacaagcatgaaacagtttttcaggatttctattagtgtttaacgtcttcatcacaataggttctccacaccgacacttcttagggaatcttcttggtcgatccatttcatctatttttggagaaaaagaagaagaaatgannnnnnnnnnnnnnnnnnnnnngccctagtattcttatttttccccaattaaaaacgacatcgtttgtttaattttaaaacacccatgcccgcgggtttataacttgaaacgtttaaaatataaacgatgagtgctatgggatcaattggtattctatgcttc

SEQ ID NO: 26878 - DNA, 1451 bp, Arabidopsis thaliana landsberg
  unsure (1)..(1451): unsure at all n locations
caagtagagtttgttaaagttttgaagttgttgcaaaagtcgtcaaaaacctgggggaatgtgtagagaggtgcatgagagcttgacagtctttgaggtatccaaagacaaaccagaaccaaaatttatacttgagaaccaaaggcctcaaaagctagcaaactaggctaaatgtaaattactacagttaactttgatcatatacaagtaaataagtatgacaaagacttcaaagtaaaacagaccaatacatcatttctatttaatgaaagaaaagacacaacactacacaaaatggcagataagtaaaagcttttgttgtgaagtgaccccatctcatttgaattcttcctcaatagccttgtcctttttacttacttcttcacttcttttgtttcttatacatcaacttgacatctccaattctatacacacacacatatatatgaatctaaacatcactaagtaaagagagattaaagcctcttagaatagaataacacatagaagccacacacgttcaagcaccatacatagattaagacacttaagagaggctaaaaccattcttagttgttacttttaggtagagacttcgaacataacaagggctggttcatggagatggtggccaaatatgcggttccatgtctaaaactgcgttttccgcataaaaattatcgtcccaaccatgctcaaactcatcctcatagaactctcccattacaccatcttcaaaaaactcccaagccaagtaatcagacccatctgagaagtaatctgagcagcaatcctcccaatcatttatcatatcatagaatccgatcacgcgtggacctaacactttcatatccggaaacttctctttgaaaaacttgttatcaagttgcacgtcccaacagcctctaagttccaagaactcaagaaaaacacagcacgataagatcttgagtactccttctgtgctgactcggtggtaagctatctctaaccgcttcagcttcggcattgtattggcgatagcnnnnnnnnnnnnnnnnnnnnagacaacacttgctacatccaatggatgcatgtttctgcaaaactctctcagtgatttacagtgttttcctatggcttgtatcgcctctgggcctattttgcagcagtagctcaaatccaagaaagtgagagacgagagcttttcagctacgtttaccacacccgaattggtcagaccacttcttggcaccttcaaggtcttaagtgaaccagcacttaccaaacaaaacaagaaaacatgtaaaatattagatacaaaagcaatgaactaagaaatcatgttgcttcaatcacatcccctaatacattctatgcctataaccacttaaaagcttattctaaatatgatcataatacattaaactatagcaacttactgttgtgcaatgaaggagaagatagagtca

SEQ ID NO: 26879 - DNA, 1473 bp, Arabidopsis thaliana landsberg
atttgttttctaataatcttgccatctttttggtctttgttcacggttttgcttttgattttaattttttttctatttttgttttgctttacctttctttaattttacaggtcactttacaacgttgagtttgaagtgtttgtcaattttatgacgacaaacaaaaaagtgtcacttttgtttttttgttggggtaaggatgggcaaatgttatgtctttatagatgtgtcctttaagatatctcaatctgttgcttgcaagttatacaattttttgttaagaatgtttttggactcttgttttagttccttcagcttttagggtctttagattttttggtgaagataacaacatattacaatctaagttagtattttaccaatcggaacaactcatagtataagtaacattaaccaaagtaaatttttttcaaagagtagttaaaatttcttaattacaagataaccaaagtgatatgtttttagtgtttcttattttctgatgatatattttttttgttatttagatattttttcttatatacgattatctaatgttttttaactttatcgtctacaactcacacacgtgtactgctcgatttcaatcgaagttcggacacaatgacattactagcatatgttatgcttgaaattttagacatgtaaaaatctcatagacatagatataaatactagaaatcaaaaattgaaattaaaatataaaatatttagaaaaatataaaatatttagaatagaaaaatataaaaaatttagcagaattctctaaattttctttatctttattttttcgtagcgtaaatgtaaaagcagacacattagtatgaaagatttgtatcgaacagcatcatgtcacatatataaacaatattctcatgattttgagttctaattaatcttggttgacaaaaaagagagagttaaagatgcctctttcttcagcatatcagtatcaccccaattcgattttttctagaaagaaatatgttatgttctaagcaaagcccaactacaataaagttgggcctcataatgttaaggcccatttactctaaatctcgcagggttttaagttttgatttattctctactcagcaaacgccattatcgctctgtagaaaagcttccattttcgtagaccactctcactgagaagatgaattctcttcatcgtgtagtaggattgatcagcagaacgacgactacatctccaatttctcatacccgtttcaatctcccatcgattctcgtcaatttgatgtccacaaaatctggaaacgatgaagacaaatggaacgacgcttgggaatcagcttggttaccagatgatctcacagataaaatccgagcaccatgggagagagatgtgaacttccctgtaaaagaatcaacggcgacggcgattgaagaaatcgatgtggaagcaaaagcgttcgtagaggatatgaatg

SEQ ID NO: 26880 - DNA, 2803 bp, Arabidopsis thaliana landsberg
  unsure (1)..(2803): unsure at all n locations
gatccgaattgttttggttccgaatcagaaatgtggccaattagtgtcttggtcatgatatctacattggtaaaacacttgttctctcgtttgaaagtatcaaaagcgtctaatactttattatttgtgaaacggtttagagcaatgtaaagaagattggctataggaatgacatctttacaatcattcaataatgaaatggcgcctattaggtcgagagaacggaaccctagcctcaagctctgcagatacatagcgtaagggtttcgttttgcaagacattttgagtagaatgagaagtggacagagttgggcgaagacatgttgatgaagtcagggcttttatctaaacgaactcgggagagtgtctcgacagnnnnnnnnnnnnnnnnnnnnncatgaccagatttaatccagtttttcagagcctcaattccttcttctgaaatgtggctaacaattagtgcgagaattggttccggaatgtataatcttgcaatcttcctctgttgacaaagcagatgaaaagttagagaagttacatatactatgtcaaatgaatgaaaacaatattgtttaaatggatgaaaaattaaacctgtgtgttgataggttgtgtgatagatgtagactcttggatgatgtactccatttgtcaatgtgttgtcaagaacgaaatagtaagatgtgttggagagagaagttttagtactgatcaaaacggtttataaatgactaataaaaacagagtaattaattgaaagtttctcttaataggtcacaatcgtgaggaatgaagcttagtggggagtatgggttcagttatttattaactctaaatataaaagctaccacttgaattccattaaagcaatttcatatacaaaaatgcaagtcatagttctgaaacaactctaatcatttgtataataattgtgacaccttatcgttgaagactcgaacaatatataaataaagttggagaaatatgcaaaacaaactaatacataaaatcaagaataaaaaattagattcaaatatgttttctgcaattgagaagaacgataagatgaacataaatgaaattggtacttctgaaagtattacttatgaaatgtgtgcaatttcctgggacaggtaatagtaaatacatgtgttacaccactgtccctcgtactcattgaggttatgatggtccgaccaacactcaccataatcctcgaactccaaggattttttgtatgtcccttggcgacgtggaccaacctcgttgatatggaacattagtttatctgcgaataagtcgacttcactaaatttgtagtactttcgcttgtactgaatataaaattccaacgaaattgatccagcgcaactatggagcacgatgtaaagtagaccagcatgtgggaaaacgtcctttatgccatccaatatagcaattgactcttggagctcaaacatatgaaatgccagcactaaactatgaagatatagggcgtacggattttttgcggtgaggcatttggtgtaaaacatgtggaaactagacgattcttcagccatatgaataaaaaaaggggacttatctattcgaacagaagaaagggtttcacttgaaaaaacagcggcttttccatcaggacctgattgaatccaagcctttaacatatctacaccgtcctcagaaactaagctgactattttagttgctacgtaatcaagcatgtggaaatcagggaacggaggacgctgaaagaaaatgcgtaccaacgttaacaccaaatttgtgaggctatatactaattcaaaaacaaaatttcgcaatttttggatcaatttcagtctatataaaatgagtgcctcaattcgattgaaatttgttttgagttacattacatgtaggttaaaatgaccaaaggttgacgaagagtctacacggcaaattgacgaaggggcaagggcgcttgggaattgccagtaatgtctagtaggggacattggtcgagggtgagtacattttcttttctcgcagacgatttttggcattttggattatcaaattagtataatactgaaagtgaccaaataacgatctaaggaatttgaagaatcacggataattaaagaggaccgaactaggctgaagggaaacggatttgagatcgtgatgaaatgggaaccctaattctctggataaatgaatagggagtggtttggtggagcgatggtttactgaatattattagtggatcctacaaatattccaaaacattgagggggagaggaaattagatacattcatattctcatgtccatgaatatatatatatatgcatggtctataatatattatatatacgtgctacagtgatttgttacagcccatttagcgggaacttatttatggggatttaggttctaatttttttttttttcatttttttcgtaaatatgagaagagattaggttttacattcatagaccgaagtcattaaagacaaaaaataattgttaaaaggataaggctttacttatatagaaatttatatggaatgcaaacaataattaacataacaacaaaacagcagaatcagaagtttaaacagtttgagtaagttattatgatttgacgttttacaaacagttgtgatcctgtatatgggtaattcttcagttttaaaacagttcaacaatgtttcataggtgaacttaattcacacacttgattactattatactgcttaatctaagtttttgttgcaaaaattgcaaaggataaattttaataataaataccttt

SEQ ID NO: 26881 - DNA, 1426 bp, Arabidopsis thaliana landsberg
  unsure (1)..(1426): unsure at all n locations
atgatgttctcatttcctagagagaccagcttggcttatagcggctgctaacttcatggtttttatccatgtcataggaagttatcaggtctagttttttccttatctttttggtcccttagaaaaactctccaacttttattaaaatgatcatcttgacaggtttttgcgatgattgtgtttgacacgatcgagtcttatcttgtgaaaacactgaaattcactccttcaacaacactgcgtctagtcgcacgtagtacatatgttggttagttctcatttaacttcttttttactcatttttttcatggagaaatggaaaactaagataattcttggtttgtgcagcattgatttgtcttgtagcagtttgtatcccctttttcggaggtcttttagggttcttcggcggtcttgtcttctcatcaacctcgtacttcgtaagttatacactacaaaaaaaagaatgaacatataactctttgcaaacactgtatggataatgatacctctttaatatttgcagttgccttgcattatatggttgataatgaagcgaccaaaaagatttagcgcccattggtggtgttcttgggttagtctttctttcttaattcaacaaggcttagtcacacaatctaattaacccaataatactttaatccgtttctttaactaacaggtagcaatagtcactggtatctcgatagcaattcttgcgcccattggaggaatgagacacattattctttcagcaagaacctacaagctcttctcataggcttcaaataaaaagccttgcaaccaaacatcacaacaaacttataaaagttttttaccttttttaacttaagttagccttctagttggggaatatataaagttagttatttgattatttggattctcctttctttttataaccctttcatcaagaactgccttcggaattgttgttaaggctttacgcgcttggcttgaggctgtgacggatgatgttctctcaaaaacttcatgacaaaaaaaaaggaataccatacaatatgtggtcaacctcaggctctgaactttcaggtttttggtttttagctttttttttctttcctctttttcttaagtctttagattttctactgcaggttaaaaaaaaaaaaaagcctaaacggctgtatcagaactttttgttttggattgtaataaaacatctgaataaagagattggctttaccgttttaccgctgttgaatttgtttttaaatgcatatcaacgaaaccgatgaaaaggagaaaaacagagatgtacatgcaaaacagagatgtaaaacagagaacctgaaagatgtgattttggcatggtaaaagaaccaacttttcccacatggcttgagccanacttgcccaaatatgaagcttcactgatgaaatc

SEQ ID NO: 26882 - DNA, 867 bp, Arabidopsis thaliana landsberg
ttcttcaacctcagaaaaccctaattcctccatttcgaaattccaacgaattctctggtgattttaccaatggcgatggcaacatcgatgagtttgaatctaattggggcattcaaaggcttgtctctctcttcaacctcgtcttttctcagaggcgagttgagtttttcccccaaaacaactttcactgttactcttcctctggaaaatcttcaagctccggttccgttgacaattgaatcggcccataagaaaggagctggtagcaccaagaacggtcgtgattctcctgggcaacgactcggcgtcaagatctacggtgaccaagttgctaaacctggtgctatcattgttcgtcaacgtggcactaaggtaacacttaagaacacagaaatgttgaaattaagaacctcataagctcctctttcaattctcttctaatttcaccgcaactctgtcaatatggtcagcttcttatgggtttagctctcaagctctgttttcagattccattctcgaacatatctgggttttgcttgtgtttaggatgaattttcgtatttagtagctcttgtttctgatgccattgccatttcttctggaagttctacgttatgtttgtgtttaaaatgaaactatattgtttgagaagattgattcatgaatgatgatgtttgatgcagttccatgctgggaaaaatgttgggattggtaaagatcataccatcttctctttaatcgatggattagtcaagttcgagaagtttggtcctgacaggaagaaggtatacctgaagttatactgagtaaggtttataagctttcttaatcttctaggatgttaaaggaaatgagacatgttttgca

SEQ ID NO: 26883 - DNA, 1907 bp, Arabidopsis thaliana landsberg
ccgtgataatccggcaccaattgatattagtagccttgtatcaaggtacgtgtgtattccccatcatataataaaagaagcttttgctaatgcaaatttctggtaagttccaagttttgatgtgcaagttcttttgtatcatcaagttagcgattatggactgcgccatgcttcagatgaatagaaaaaagaaacttatgctggtctcgaaatccactaaccaagccattcaacatcaaagaaaaaagcccacattataaaaaaataaaaaagcccacattaaactatcaaatgcccaacaatggatgatgcactagtcgagtcagagtggacggagccaaaggcagagatggattttaagctttaatttgtttcccagatatttttcatctggtccctctgtttttaaataattaactaaaacgactataataattaataaattatactatagagtattttgtgtggatttttatttactgttgaaacttaaggatacaaaagaaaaacaattattcagataattcgtcattagatccctttaattttagtaattaagtaaaaagattataaaagatgagaaggagaagatagcttcttcatcgagaaacctcgaaatcaaaaagcacgtcggtgacttgtactcttcaatctcttcttcctctctttcacatctccttctctcgaacccatcgacctgcgctaattcatcatcgaccttgctcaaattcatcaaccatgtcttacgattatctcttcaagtacataatcatcggagacacaggtgagagaccgatctttcacctttcttaattcccaattgttttatttttctgggttaaatccatttcgagccgattttcatgtgttttcgttgttgttttttttgtcgcttcaggtgtgggaaaatcgtgtctgcttctgcaatttactgataagaggttccaaccagtccacgatctcaccattggtgttgagttcggtgctcggatggtcaccgtcgatggacgccccatcaaactccaaatttgggacaccgtacgcttcctctctcttctcttggtcgtaattaggtcatcagggaactaatcacgttttatcgattaggattgttttttttttctccctaaggcaggatgtgattaagaagattaattgtcataatcaattcaatttcttcgtttttatataaacaatgcctcattagaattgccaataccaaaaattatgtttgaaaatcatgtccagagactcaaagtggggtaaaatttcaaaaaagttaatcattgcacggttcttgattaagtttcataggcttattgtaatagaagctgagttcaccagtgcattccttgttgtgatttcttctggtcaatagttcttccattggatgatgtatgtgttggagttgtgctttctgattaaagtttcgtatgatattttttaagctggacaaaaatcttttagatccatcaccagatcatactacagaggagcagccggagctttattggtttatgacatcaccaggttagtttttgccttgcgacaatatatatcagctcgaacttctgaattccccagcaaggttttggaagtgattggttctgtatttgtgatttgataaacctagactgttggaaaggttttggaaattgggaagttacttttatctgaacaaaatccttggctataatattggcaatgcttgtttgggaggatgttaagttaaccatccatcttgaattcttgctgagatagatatttttcctccattgttttggaattttgaaagttatgaaggacatgaagaattgcaagagttttcccattgccgtttttcatgctttgatctttctaagactcaaaaatattggttctttgggttgcaggagagagacgtttaa

SEQ ID NO: 26884 - DNA, 1555 bp, Arabidopsis thaliana landsberg
  unsure (1)..(1555): unsure at all n locations
tatatcctctgactctctgaggcattgactatctcacacgtttcttattaattgtcaaacaaaaataaacgtggcagttaatgctttccacaacaccatattaatttcggattttttgtaaattataaacaaatcacactcggaaattcaaaatattaaaagtactttctgttttatattatactcagagattacaactttgttttaaataaaagttgttttgtaattaacattaaaaaaccaatggattcttaaatagtctttttttccgtctcttctaataacacctccaatgagaagttctctgataaaatttatggatttttctggtttaacttaaaaaaaacaaatgtaaactgattaaaaataagagaggtgattggttttctggagagagtttagtataggagagagtcggacacatgacaacttgtgattggatatctaatttcaacaaaagaaaaaagaatatctgactttaatttttttttcccgccaaactctctctctcgacgaagccacgaaggtgacgaaaccggtgattacgaacaatttaccaattctgaataattgggtaaaaacctgaaattccccttgacctattgctcaatcttgcaatcgtttgcggggaatctcttttctagttaagttttctgagcttatttttgttggaattggtcaaaattgtataattcgtctccgagtttttagtatcacgtttagctgaataagttacatggtcgagtcttatgcttgtgataatttgtaggagtatcacgttttgctacctttgatctatgttgttaatcaaggcaattcatttaacatgaaagtttagtgccactggttttttcctctcgtttatgtgannnnnnnnnnnnnnnnnnnnnnnnnnnnnnnnnnnnnnnnnnnnnnnnnnnnnnnngaggaaggcagatttgcttgtccgttacttaaagaagtttgttgctccgatccaaatattgcttgccttatgtgttatgttatacacatggaacataggaatgtggctctttcgtttaataggacttgtagcacagggatgaccatatattgaatgattgtacatcttgtttcaaacaaaacctcttcttcttgttttatacagagacacaaacaacacttctacacaacacttcttgttttacaaagacacaaccaacatttattcttgtttttacaaagacaaaacacttcttgttttacaaagacacaaacaacactagttcttgtttttacagagacaaaacatattttttaatttccacatcttttaaataatatttttacttatgtatgtttaatgtttaatattttatgaattacaataattattaaattttatgaaataaaataattttaaaataatattttttttccaaagaacctctataagagagactaccattgaagtatgaaaacctagaaaaaataatcaaaagctcttttataattccccacccagttttaatcataaaaaatggagagaaacccaccataaggtctctccattggagatgcttttagttcttgc

SEQ ID NO: 26885 - DNA, 1385 bp, Arabidopsis thaliana landsberg
ggctacgtatcactctatgcttagcaaagtcaaccatgtaaattttgtaagtattatctcttactttaagaaaatagaaccctaaacgaacagataggcttgcacctgtataatatattagacattacaagtctctacaatgttggtttatcattaacaaggactaaaacaatatactataataaaacaaataaattaagagtcgtaaattaatggtaaactcaactgatgcatgaatagttgtaaaagtacaaatatataaatatttggacacgttactcaacttgcatcgcggatctgtattccttccccaaccactacgtacacgcatttcccacgagtttgacgatctttctcgtttaatctaatcatatctacttttataggctccatagcccacatttcatatcttatagtacgttccaacttctaaccaataaactcaaaactagttgagttttttaattagtgaaatatatcttgaaatttatatatctaatcttgcaccaataaagtttctgtcaattatgtaaaagaaagactcgttgtatcagtatgggaccacttttttcttcggaattgtgtcgatcgagtccatattataatactttgtcacgtactttgtttactgattaatttaatataattgtgtcgcattatccaagtctaattaaacattaatgtgtatattatacaccaagttacaattacagatctatctcttagtcgttttattatgtatagcctacaatgaaacatgacatcaacgtataggtgaagctgaagcctatacataaaagtaaggttttggagtttgtttcatgttttaaggttttagatattttgtgatcgatttgcatgtatagggttccaaatatctgagctttggcttggtctactttgagaaagcagctgtagagatcaactttagccgtttaggtgataaaatcacattagaactctataggtcgcgtagcagcgtataagagccctggatactgaaatacaagaatctctccacgcgtagaaaaacgaaccaaccatgataaaacacgtgtcatatcgaataggtacagacaacgtgcacttgccaaccttctttccttgtagtttccttcttctttgcttctttttttcttgaaatattgatattgttcaaaaaacgcataacaacaaaaacgtggtcgacggaacatgtgggtggtggagttgtcttctttaggggaccactcactaacgccgtttactttcccgcttggacgataacacccttgatatatggattagtctctctttcgctttgggatatcttaatatattgaatatgtccattagtatattgacgaccatttaattacgtctgagcttgaattattgatttttag

SEQ ID NO: 26886 - DNA, 906 bp, Arabidopsis thaliana landsberg
ttacaaaatttgtttccaatctatatttctgaaaaaaatgtactcataggaaacggtgaattagctatcatgtatttaaatatccaaaaaaagatggcaagatcgccgaccagaacaaaaataagatcataagatcaaagaacaagagagctgtcacatatattttactctctgctaaacgacaaacaacaagaagcagtacactgaaaatggaattatcggaaatgacgactttttttgtagatcgaggacagaggaaccaaaaaaaaaaaaaatgtaaacgtttcaggtatggtaaagagaaggaagagaaacaaacttggcctttgtaaaaaactcaaagtcaattcaatcgtaacacttggccactcatcgggaaataatacaaaggcacaaattctggcacacatgttttctccatctctcgcctttctctttttgctatattttagaggactacagaacaaacaatgaacattttcttctttgaaaaaaaaatatatatgttcgaagcacaccaaaaatacttcacaaacacatgcacaaaaggggtcgctaccgagcggacgcagcggcggcagtagtacataatatgcaccgtaaacgcgaccgcccaggtctgtctccatcaccatcctcatcttcttcctcatcctcttcctcctcctcatcaacaccgttatcgtagctatattcataccccgaagaacctttggttgtcttgtgattgttgttactgaaggcggcatccatgaggcacgtctcgtggtaagcatggcagcagaagaagacccccacagtgtcccctcttatcgagactgggtcgaagcacatacaacaccgtgtgtccccccgtgtcttcgacttcacttctgtcatctttatgctcaaagatttatctggtcc

SEQ ID NO: 26887 - DNA, 1287 bp, Arabidopsis thaliana landsberg
  unsure (1)..(1287): unsure at all n locations
aaaatcatcaaattcagaattttcagacacaaagaacacgtgaatcaactaaacaaacatacatgccccctcaaatttttatttttaaaaattaacaccaattttggagttttgtttcttacgttaaaagatatttaaaggtacaatgttataatccaccgccataaatctacgtaacaagtcagtctgacaccaaagtgtaatagacaaaaatatgtgaattttgtttgctctgtcacttgtgggaaaatgtatttattcgacataataataaaaatattcattgctggtaatgttgtctctgttctattctctgttgtttacatcgtgctatatcaagaaaagctatcaacgttgatatcctttcttatatgtttagtgctgttaatttggccaaatgaagcttaaaacataactcattttccaggtgctcaagagcttttgcatcatcagacgaagatcctattggtttcttcagcacatggtccttgatttgtgtatgccattttgctctccagctgaaatcaacatcatgttttgtaagtagcattacaaaaggtaaactagttctgtgctatcacaacttaagattgtagaggcatccatgacttactgggtatccctccattgaagtttccaaatcatcctaagctttattcacattgaacaacaaatagttgaatctgattggaagataagtgtgcctcctaatatgaggctacatcccatttccagttccaccacagctatacaaaagacactcaggagaaagaaagaaagaattcttttggccgcattgtcgtgtacatgtagcaaatttgttccatttcatgtaaacattacaaaatggacttaagggagagcaactgttttgacctgaaaggaggtactcttctgtgaactaactccatgatcgacttagcctgatcaagctgcccctttttcacaagcccttcgagcaacatctcaactgtgtccaagtttgggtaccacttctttctcatacaatccttgcacattgtataagccaaatcaaaatttcctgccttgcacaaatagtgaatcatcgtctggtatatcttcaaattgggtttgtaccccttaccatgcatcgctgtataaactctttccgccatgtcagggaacctcgcaaggaaaaaccctttgataaccatgttatatgttatgctgtcccgttccacctggagtttaggcatcaacagcaacagatcatttgcatcccaagctcgtctnctattcactaaaaactggatcctaacattaaaa

SEQ ID NO: 26888 - DNA, 705 bp, Arabidopsis thaliana landsberg
caaatgatacaaataatcaacgaatgtgtgaaatgggttttaaagttaagataatttccgtttatattttcttaaatacaaaaattacttaccagatgtaacagatttcaacagccgtgtaccacttgtgaatgatctgattcgagtcttatttgtttggtgaccataaaaacaaacagactcgatttagtaaaatatattttcatatgaggaatgcaatctaatatatttcatataaaaatggtcaacaattttacgaatatcaaacattcaattcttatttctgtgttagggatgaaattatcaaatcgatttagttattttgaatagaacccgacccgaagcgagtggatcaagtaaaaaacacgtgtctgctttagatgagagaatcaaagctgagctgtataaattgcttgtctctctcattgccacttctctccaaaccctaaagagaccgccaaaaaaaaaacactctctcttctctctctgtctctatctctcgatatcgacggaaatggcgtcgggttgcgttaaaaatgttggtacctcgccgagtcactcatggacgagctccaaaatgtcattgacccgtgaatctcaaccgttggccccagcgttagaaaacgaagatcctgttgacgactttgagtttctactcgaagatcccgtcacaatgctatccgccgacgagcttttctccgacgg

SEQ ID NO: 26889 - DNA, 1267 bp, Arabidopsis thaliana landsberg
tgacctggggaggagctgttcagaggagaacggtgaagcagagcaagtcaggggtttggtgaccaaatcacttagtttgacgaagaagttccttatagctagcattgttggtcaattttccaagctggtcgggatctctttgtttgggaaggaaatcatggaggtctcgcagaggtacgatgaattgctggagaagattattaaggaacacgaagaaaatcccaacaatggagaggatagagacatgatggatgttctattggaagtttgtgcagatgacaacgccgagtttaagatttccaggaaccaaatcaaagcactttttgtggtaatgtcttgagtttcttccagtgatatatatctttaatgtctgtcacatcaaagtctttatattgtgcatgtggttgtaggagattttccttgcaggcactgatacttcagcacaaacaatacagtggatattggcagaactcattaaccatcccgagattcttgaaaagttgagaaaagagatagaatctgttgttggggttaggagactgattcaagaaacagatctccccaacctgccgtatttacaggctgtgatgaaagaagggctaagactacacccgcaatacgccaatcttggtgaggaatgcaacagaaggatgcaagatcggagggtattacatagggcagaacacaacaatgatggtaaacgcttatcccgtgctgagagatccggattcatgggggtatccggaagaatttcagcccgagaggttcatgacttctcctttaaaagggaaagaagatgagaaagcacagctagccttgaacttcattcctttcgggagtggaagaagaggatgtctcggaaaaaacttgggttatatcttcatgggagtagccattggaacaatggtgcagggttttgattggagaatcaatggagataaggttaacatggaagagactggagaaatgacgctgaccatggctcatccacttaaatgcattcctgttgctcgaatcaacccagctagctttgatccttagttgatgatggaggagtatgatatgtcttgttgaagttgcagacatatgtctcaaactgataatggaactagatttgggtatattcgagttaaccatctagctaccgtcaatctagagatccttacatgatggttgaattagatataaccggttgatgtggaagacatacatctctgccactgggaagggaacaagcagacagtggattgtagacttcttcaaacac

SEQ ID NO: 26890 - DNA, 600 bp, Arabidopsis thaliana landsberg
agcgcaaactttttgaaaccataaacctatactcgcagcatatgagtgaatcagtgaactatactcttgtctgatatattgatgcattatttcaaaaaagtcaaaagattcgttgactgattttataagtcaccataaagataatatttgcatttatgtcatatttctaggatcaatgcattatcgaaaacaaatgaaaagatctgtgactgatttctacgttaccatttgaataatctttcgatttatgtcatatccctatgatcaatgagttttcataagaatattatttgtacataagaaaaagtgagtttttttttgtgaatttaagaagaagtgagtttacttaagaatattttttgaactaaatttaggaaaataatatattgtaactggtgaaaatatctctgtgttaaaatgctctaaaataagtcagagcagatacggtgttagtattctacatgttttttttaattggagtatggtacgaagcactgacttcgtaagtaacagctcacttttgtcttcttgccaacactctgactattatccacaacgcgtgacacgtggctgttagttcataaagccacaaattaaaga

SEQ ID NO: 26891 - DNA, 1119 bp, Arabidopsis thaliana landsberg
atccactgcggctcgccgatcatgatgatgccttgcgccgaaacaggtattcctgacctgtccctgggaagtagcagccccgagttgctgtgccaaagactggttcgtctgttcctggtcgtccaccttcttctggagttgtgccatcatgcttctcaattctgctaggactgcgggagcagtggcctcaggagcatctgtctggatcggagggatcgggttttcctctacgtcgatggtggtagcggggatctgattattgaccattgttgattgatcggctggttctgtgttctaggagtaagagaaatctgtaccccctccttctagcgccaaattgtgagagtcaaaactctcacaatcgaaattgtatttagggtttcttcaaagaatggatttttgtgagactctcaaagaacaacaaaattatttgattaccgcggacggtgctcttgattttattatcgaagtgatgatgatttgatcgtacaagtcgttcaagcacccaactgggataacccatttgagatcatgtgtgacgcatccgattatgtagttggaggtgtcctaggacaaaagattgatggcaaacttcatgttatctactatgccagtagaacgatggacgaagctcaaacaagatatgcaaccatagaaaaggagttgttagttgtggtttttatttttgagaaatttagaagctatttggttggctccaaaatgaaggtctacatagaccatgcatcactaaggcacaactatgccgaaaaaggaaactaagccaaggcttataaggtggatactattgcttcaagagtttgatatggaaatcattgataagaaagatgttgagaatggagttgcagatcatctctctagggtgagaattgaggattcagtataaatgacactatgcccgaagaacagcttatgttctacgaccttgttaacaaaaatatcgacacaaaggacatgttggaggaagcatatgcagttgaagaagaaaagtttccctggtacgcagatttagtcaattatttggcaagctgtatgatcccccagagtttggatgcatatataaaaaagaagttctttagagatgtccaccattactattgg

SEQ ID NO: 26892 - DNA, 1926 bp, Arabidopsis thaliana landsberg
gatctttaatcatatagcagtactagcgtctttggtggaacaggttcttaactagttgtggtgtatgttaattttttgattgttggtcattcgttgacatatggtttttgtttattgggtttaggtgttcaacctcaattgatggagaccaagaccgagacaacttcaaattccgaatctcactctgaggacgaggaagtgtaaaaatgacactgcttgtttgggtgagttatttggcaaaactaaagttatgaccttgatggattgagcaaatcacatttctatctatatccatgaatcctcaaggtcttatgattttgttgggtttctgataaaagaaagattgaagcttgcaggctcttcaggatctcttgtcaagaccaagagctgccgaattcggacaaccaagagcaagtgaaaagacgtgaaatagaacgaccatatttctatacctgataccaaaatttggaatatcgaataagactagtgttgtaggcttgtgtagcatgtcccgctgtttctcttttaaacagttgttgtatatgtatatctctgtttccttgctctttcacttatttaacaaagagttcatgttaatgaaattggaaatgaggtactcttagatatttctttctataatacagtctacaaaaagaagtacagcgccaattgaacattatacatttacctcaaactcaaccaacagaaacaaataattcatcgtcggaatcggaaacatccacattttctgtaaattccgatttccatttctcgaaaaccgatctaaattcagaaaagtctccgcgatatcgagacaagagactatacacttgaaacttagtattaggatccaactcaactccctcctggatgcattccctcaaaatctttctcactttctcagtctccttctccttgcacagaccagaaataatagtccgataagtccgtcgattcggataaatcccaccttctttcatgtcgcaacacaaagaataggcttcctcgatccttttcgcacgcacaagccccttaatagctactgtatacgacacaacatctaaaggatacttctccaagatgcatcgtttaaacaaatgaaccgcggtattgtatttaccaagctctataagactgtcgattatcgcagaatgaaaatgagcatcgagatgttttttctccttgattattattttatacatcttaatggcagcgcgaggtgctcctcctcgacaaagtgcactaagatacacagtatatgtataacaatccaaagcaaaatctttgtaagacatgatgctgagtactttcaaagcgtacgaattgtaaccaatcttgctgaaacagtttgagagcaagtttccagtaaccagatcaaaatctgttcctataccgtgggtgatcctaggaacgagatcaaacttcccagacaaacatagactagacagtattgatgcaaaagtatactgatccggcacaaggttccttttttgcaaactagtgaaaaccttacgagcttcttcgaatcttccgagtcttgtgtacgtgtgtatcatcaaattgcaaagaacaatatctggagctaaaccttgagattgcactttacttagcacggtaaacgcttcatcaaccattcctaaatccacaaaccctttgatcaaactagtatacgtcacaagattaggggagcaaccaatctgaatcatcttatggaacagatcaaccgccttttgcgggtctcctgaacgaaaaaacccgctgaccaacatgctccatacattatcagatacagagattccactacaaatcatgaatccagctacttgaaatgcttcagagacgcagcctgttctacagcacagactaagaatctgcccaaacctctctctgttaggataaataccttctccaatcattctcttcaaa

SEQ ID NO: 26893 - DNA, 1351 bp, Arabidopsis thaliana landsberg
  unsure (1)..(1351): unsure at all n locations
agaaccagcttttacgaaattcagttgatcattttccttttcattttgagatttttggtgtgagctttattttatcaatgtggaaagatttgtcgctttagaagctaaaaatataaatcatagttcttagatgtgattaatgtaggagttcatggggaagaatcttcttgcaatgaatgtcatgtggaagtacagagaacaggtaagagaatcctttgctgtatacttgatcacagaagcctaatgatatgatagttcaattgattttagtgtacttgtttggactttagataattatgatcttcgttttccatatcattcagatttggtatgagaatctttgccacatagaaagatgaagtgtatatccatattttgttggtatagttcttgcttttgcaagtcaatccttgtaagctaattcacctttatatatttcttgcttcttcttcaacgcctagaggtcttttcctctaaccgaagaagaatatatacttagacttgacgatgtagccaacatgttgaaatgctggggagcagtctcacatatccgtagcagcctagcaaagtcgaaggagcgacctcggatagggaaggtgagatcaacctaaaacagtaaccttaaaattcagacatatattagctagatcacctaggtcgattagagaccactttgatactttaacatcgttttttctagtttaaaaatcgacatggatggtttctcctcttcatgcaggctgtcagcattttcatagacatggattcgacagggggaagagcaaatgaatggatttacaagtaaaaatcgaccggtcttgcagctgctaaaccaagaaatcataaggttttgtctctacgcttatcgtcatcaattcattttgaaggctcttcagtgatggttgcctgcagaagaccgaggtttttgctatatttgatgtccaaatcaggtagtatatatgtacatgtgtgtattaagtagacacaaatctttacttgaactctctgtgtccaccatctccctgtgttgaaattcaatcatctttgtgaatcttcctctctttgtgatctgtaaaagtattagttttggcattcatgtcagtttggggacctttgagttggctttgcccccaaaacaaaagtagctttgggaccattccttgattaatttcatgggtttgtttacttagttttgtttcaagttatatgatttttattagacatatgataatcaaataagttatagtttggggtttgtagttgagccagtcaagatccccccttatccccgcgccttnnngtgcataaaaaaaagttgaaaacttaatccaacatcatgttggagcatcgt

SEQ ID NO: 26894 - DNA, 1176 bp, Arabidopsis thaliana landsberg
gcactcggccttgacgtagtacaacttccactatctgcgaaacatttacctctcaataattcagacaagtgaaaagatgcagaagcaaaaattattaatgaaaaaaaaaaggcgaaccttgagagaggtctggcgaatttgatcatcaaagtccaagcatctacctaatattttatcccaaaacaactgcacaatgcctccgcaaatgttggtgtcacctgcaccagcggccacaggtacattatggccaccttgttcaactgagttaaccgtgttatcactggctttctctgatcccaattgtttttccgcatcaagaaggtattcatacatgttttgtaatgcttgcatctgaatcatgagcattaaaaaaaggatgcaaccatatgtaagcgtaaaacaaaaaaacatgtacaccatatatagaaaacatacatagatgggtaatattaccttcatacgcccatttgcttcatctgctaatgtagtctcgattatctttccaatgtcttcttccaacatgtactcaggtcgtgcaattaggatgaatcctaaagcctacgggaagtttggggacactgttattctaacatatcacaatatcgagaatgtgcaacagctagcactgtaagcaccatacctgcagcgacctgactttcaaagcaatatcttccgttcggagatgtcgtttaaacaaattaagacagccagagagattgaaattcttgccacctgaggtactaataagagagtttccatggcgaataagcaagccaagacaaaaaagggaccgcccagcaatctgaaatggaaagaatattttcaccaataagcttcaaactaatccgttgctggattcattttgtaaagaataacagttatcccaactcagtcagcactaactcgaatgagaaatgtgaatattgaatattactctcagtaggcagtaaaatcgcaatgaagagcagtgttagtagagaatactgaacttctaagcaaaagggaaatgggagtaacttgtgtctacttctagttaaacaaaatacagtccaacagttagaacaaacaccaaattaggtaataatgcaaccaaatttacactcacaaatgcaagccgcaccagtacactatatcaccgacccacagatactcatactccacttggaatttcgtgtg

SEQ ID NO: 26895 - DNA, 1686 bp, Arabidopsis thaliana landsberg
  unsure (1)..(1686): unsure at all n locations
taatttaattgtcttaatgaaaagtcttcgctgttcctctactctatataaataaattaaaaacactatactacatgttacctatagactacagatattaaaacaactacccaaacaaaactttagatctgaaaatctcagctttgaaatggaggaaatcggaatagttatcgtcggcggcggaatcgctggtctcgccacttccattgctcttcataggtttgttattaatttattttgtaatgagactcaaactttatgaattccatatgtaaattaatttttggtgtgtatatttttttttaaaaatgtaggaaaggaataaagagtgtggtgttggagagagcagagaaagtgagatcggaaggagctggaatcggaactctctccaatggttggagagcccttgatcagcttggcgttggtgatcgccttcgtctcaattcttctcttattcacaagtaagtaatattattcttttttaaccataactttattattcattatatgtttgttttagaattttgatttatggacctttcttggatatgaacagggcacggaccatgttgattgagaatggaaaaaaacgagaattcgtttcaaatatagtgtaagtcacaattttcctatccttaaaattgaagatgataaatataaaaactatagagttaatttgagtattttgatttagtttttaatgcagtttattctattgatttgttgtaatctttgttattgatttgaatatttaatactttgaataaaacagagacgaagctcgttgtattaaaaggaacgatcttgttgaggccttatccgatgcccttccggaaggaaccatccggttcggttctcatattgtttctattgagcaggacaaaactacgttgtttccggttgttcacttagccaatggaaatagcatcaaagccaaggtaaatatcagtattgtttatttagacattaattgttcaaaggcaaatattacatttggcttttgcatttactgaagaatttatttttgtatgttttcaatagtataaaataaattatgcaatataatgtttttcttctctcataggtcctgattggatgcgatggtgccaattctatcgtcagtgattatttgcagttaaacccgaaaaaggcgtttgcttgtcgtgcggtgagagggtttactaagtacccaaacggccatggatttccacaagaggttctaaggataaagcaaggaaatgtcttaataggaaggcttcctttgacggataatcaagtcttttggtttctagtacatatgcaagacaataatcacaatggtaaagatcaagaatcaattgcgaatctgtgtcgaaaatgggccgatgacttgtctgaagattggaaagaaatggtaaaaatatgcaatgtggannnnnnnnnnnnnnnnnnnnnnnnnnnnnnnnnnnnnnnngaaatcatgttagggaaatttcgtcgtgggacagtgactgtagccggtgatgcgatgcatgtgatgggtccgttcttggcacagggcggctcagcggcgctagaggatgcggttgttttagctagatgtctagctaggaaagttggtccggacacggagacttgttaaaggattgttcgatgaaaaacattgaagaagctattgatgagtatgtggatgacgtaggatgagat

SEQ ID NO: 26896 - DNA, 1835 bp, Arabidopsis thaliana landsberg
  unsure (1)..(1835): unsure at all n locations
tttgatgccgttgcaaataagtaaatccaaaaaccatcctctttcatacttgctataaaatgccagaacatactagtactacacctctatatcctcggtgtcctatagttccattatattatactaactgcgtattatgctgttatgactcttctgttctggtattgaatgggatggttttccattttcaggggattcttccatggttactccttcatcacattactcatgattcttaaccatgctctcaggtaaaagctgcttaagaggccagacttttttcttaactctgatgtaagttagtgaagctaacaccaaaacactcttttattgtttgttttgaagtggcattgctgtgtcgatggtgatgaaatatgcagacaatatcgtgaaggtagtgtatttgcaaaaaaatgcacattcattcccctgtcactttttgacacagggtttaactttatcaatcggtatgtaggtttattcgacatcagtggcgatgcttctcaccgcagttgtctctgtattcctcttcaattttcatctttccttagccttcttcttgggttcaacgtaagttaaccacatttgcttttgctaatacaatcatctcaacttttgatatcaaaagtagccaccaacatttatgcacataagagccactgactgcgtaaaaggtgtctcataaaatgcattactgtgtttgcactttgcagggtcgtctctgtttcagtatatttacattccgcagggaagctacgatagtaaagatcttcacacttacatctaccaagaaaacaccattattctagtacagagataaagcttttgaacgatgtacgattttgtttttcgtgtaggtatattcacatttgtgcttctgtattgatttttttttccgtctcatgaaaccttctattctcatttgtacgatgccaaaacttatcaagaatagttacaatttcagaaattttaagcctctacgtaattttttttataaaacacccctccggatattttaataatcattaactgtctgaacgtgaagctgtatgttgaaaattgcacgcttagaacaaaaggcttaaccaaaaatgatccaaccgtgaagactcggagaccggcgtacttagtttttaaattaatcattgtctttgcttcaaagccaatcctatgagactttgtcttgtctccaacttgtatataagctctattcctctactctgtttcacaccatctcttcttcttcttcctcttctctcagtgaacaaatttggctatggctttttctgcaccatcactttccaaattctctcttttggttgccatttcagcatcagctctcctctgttgtgcttttgcccgtgatttctccattgttggatacacgccggagcatttgacaaacactgacaagcttctagagctcttcgagtcatggatgtcagaacacagcaaggcttacaaaagcgtggaggagaaggtgcacaggtttgaggttttcagagagaatctgatgcatatagaccagaggaacaatgagatcaacagttactggctcggtttgaacgagtttgcggatttgacccatgaagagttcaaaggaagatatctaggacttgcaaagccacaattctctagaaagagacagccctcagctaacttcaggtacagagatatcacggacttgcctaaatccgtagactggagaaagaaaggcgctgtggctcctgtcaaggaccagggtcaatggtggaacatttttcttttccaatctgncccaggtatatagaacagaactcagagattcgaatagctattcaacgatcttattttgt

SEQ ID NO: 26897 - DNA, 2500 bp, Arabidopsis thaliana landsberg
  unsure (1)..(2500): unsure at all n locations
ctatgcattatctaagctattacttatatgtaaaatttggtgtgtaggcatcggtaactttatttactgatgcataactttcacatcttctgtttcaaaacttaagcaagactacatttacgttagtcaactcaaagtaatgagaaaaaaaattaaagtgatatgttactcttgatttatcaaataaagcattgtatcatgattctataaattctaagtttcttcctatatccaaaatcatcccaagcatctaagtctaaaacaaaactaaaaagaaagaaaggaaaggtacaaaaaacggattaacaagaaagatgggaaccaaaacttttctctcaatctctttaatggtttccctttgtgctgccatttttgtctctcaaggagtagctcatatgcaaacaccaccgacggttccaggacttttcccacctggcttacctattgatcttgtaaaatgttggtcgtctctcttcaatgttgaaggatgtgtgctcgagatcgccaaatcaattttctctggaaaattcgaaaatgtcgaagccgcatgttgcaaggcgttttcaaccttagatgctaactgttggccccatatgtttccgttgaatccatttttccctcctctcctcaaggacaactgcgctcgcattgtccccaactcccctacacacaactaagagcaagaatttttgctggtctacgcttttaaattagtcattagctccaaagtctaataagtttcaatgtttattttgttagcaaaatgtgaactatatcttggaagagttctctttttataggttttctcaatgacataaaatttcaatattttccttttatataataactcttataaatgtgttttgttggttgcacaaaaaaaaaacattggaaccgaccaaaaaaaaaaaaaacattggaaaatcgtacctcaaaattcaatgaccaaacaaaccttctcatatgaatcctatagtatggttatttccggtttagttggttcggttctgtaccgaaattatatcgagcgttttaacgttatccagaactaaacagagccaccaagagtcatggcgatgcttttgcgacctagtccttcncaatgtagaagcttctctccatttgtcttcaactccagctccagagaagtttcttcgtcgtctcgtctctccttgaaaacctccggcgacgaagaaaactgggtttcacgtttccggtcgaaatttctcagtttggttgttctctggagctcttgctatcggtttatctctatcaggtacgtttctttgttccttttgaccaagatcatttctttttggcttaagattgaacaacatgctctttgatttcagtaacaatgtggatgtgttgcaaaacaatctaaaatatcacaaagttagaatttttgtttactctgcaatttcaagcttgtgactttaattacttgttgcattggcttatcaaagtcagaattgtgaaatttcggacctagtctcttgttccataactatgaacaatgcatatgcaatttcaagattttagctgtcaataactttgaatctctttttgcaggcgtggggtttgcagaggcaaaagttggtgttaacaaaccagaattgcttcctaaagagttcacattctgttatagatgttgctgatttcctctctaatggtcaggtatgcatgcttgtaccatccatctatttttgaggtttgattaaagcacttgtttcttgttaatgtcatgtggatctatttgcttattctgtagatttttagtgtatttctgattttgaatgttttcgccgcttttggttttcttttcttaatgatgttgttctttgagagttataggagaagagaattgctcaagaaatcgctaatcttgagaaagatacaggattcaagttgagagtcttggctcaaaactatcccgttacacctggtatgatatatgcttggaaaacaacatacttgatctctatagaagtttacttagtgacatttctctgtgtttgcaacaggactagcaatcaaagatttctggcaggtggatgatagcacaattgtgtttgtcgctgacccgacttttggtaacaccccaaacctcattgcttaagttcttgaagtatccaaatgggaaactgattgtgataaccggatttgacacagggaacatattgaatttcaatgttggagccacggttgatttagacatacctcgtagtttctggagtcgactggctgggaaatacggcaatatgttttactggaaagagaaggcaagaaagctacctcgattaaaaaaaccgatgatcgccactttctttgttttttgtttgcatgtctaaactgtttacaatatggcttgaaaccagggagaagatgcatctattgaagctgcagtgatggcgatatcaagttgcttacgagaaccagttggtcgaaacaactgtgcagagatccaatgaagtatatgaccccatcaagcgtatatgtt

SEQ ID NO: 26898 - DNA, 1496 bp, Arabidopsis thaliana landsberg
  unsure (1)..(1496): unsure at all n locations
tttaaagcccattggtatcggaggaaaaatattcacatgaataccttggcagttttttttttttttgcaatacaattatattgaattatctaaaactgattctttttatatacagtcattcaagaacgaattcgtttatacataagataataagtaatcacgagcccaagctttcttagctaaataattttaataaatgctatttgcgcttatgagcaattatgtctttttgacttaactttgtgttaaaatattaacgatttatgtttgtttttgtatcgcacatttatgaattggtggttatttttttgtgtttcgattttgtttggtggatcggttttgttcgtagtaaatgatgacatattttttgctacttttggaatctctttttgtttcatatgcaatagggagaaataataggtgggactatacagagatattaacgaaatgcaccggaatcgttgccgtgtataaactaaccagaatcattgtcgtgtagaaactgaccagaatcgttgccgtgtagaagaatcgcagaatatttcctcctcctctcagtctctgcggcatcgtttcgttaaggttcacagacggaggagaacatcaatagaagaacaaaaatcttcgaactatcgtcgattaaaagcaaatcgaagattagataaacaataatttgaagatttcgatgaaacatgtaaatatggtaaacaatatcattaaccaaaatgcatatttttcatagatttttattttctccctaattttttctttggtaaaaatttatatgaatccttgctttttgattttcttaattatcaagacagtaaaattgtcacttaacaaatttgatctacagatcactttcatcaatttggttttaaaaacagtggtaaaaaatattgatgatgcaatgtctacatatatgttcatttgtcttttagaagttgttttattctttataaggaatttgaaaaagattatacaactcatcgagagacttcacgagttgaatcttttcagttttcaatattatgatctcatgtaaattcctccccgatgtaattttttctttcatccccatgtgttttctagacttacaggagatttgttccaagcacgtaaacacaattnnnnnnnnnnnnnnnnnnnnnnaggccaaatgcagattcttttactagttggctttagggacctagttcgaatacgaaatctgatatcaaaaaatagttttggtgattcatatataatataataagtactactgtttacgtaaaattgaagaattcaaatgatctcattcaatccaatgattatattttgtcttggataactctttaattatggttatttgaaaatggaagaaccaatatttttggttgaagaataaattaaccatgggccaccaccggcctccccccttgataatttaaaaggattttccggggtacctggaccaaaaaaaaaaaaatagcttaatgtttttagtgaaccggccc

SEQ ID NO: 26899 - DNA, 1165 bp, Arabidopsis thaliana landsberg
gtttgtcgttctccaagaaccctcttctttaagcttgatagcaggcaatattttgggataactcgatgacaactcagtgcagaacaagtcgcatgaatctaaaaaacattaataaccacacagatatatcaacttatctatattttactccaaaacaagtttaagataagtttattaccagatggtattttgacctctttgcctgattgattagacagaatcaatgaaaaatgagctctccttttccatccaggtcgtagtgattgaggattcgcaacgtgcagatacacagacacgtgatcgtagttattgtcttttatcggataaactttaacaaacctgagatagaaaataaatacaaagattatttaaatccgattttcttatacaaactactataattagataccttaataaagttttttttcgtgaatctagtgaacgtatacgaatttaagaaatctgaatatccttaccattggcattggccgcttatgaatataggagaccatatcaaatatttcctctctgaaaagttttctatctcaaaggtgaaactcgtcttctgatgattctccatatctcgtttagacgctttaattcttagggactgttacttggagcaaaaaaagtttctcacaaaacttgtttttgatacttaagattcctcacacgtaaacccttctctatctaatatatagcaataaccaaactttatcttgaccttaaaaaaaaaaaaatactctataaaactctatctcaaaaccaacaaggaacgctcaatttttatttattttttaatagataaaatcaaaatcaactgttttgtaagatttcccggagtttcgtaaactttatctcggagtttatatcctatctatcaatgatgcttattcttgcataatacggtagacaaatcaaaaacagagatgttaaaacgtccattaaagctaaggaggtgttagcatcctccaaagctcgtgtacgtggaaatcgtggccgtggctagttgtctccctcaaaaatttcatcgaactaaaccaaagccgaagatttttttttattatttttttttttgcttttacaaatcttgaaacctaagctatttccctaactttatgttcttctaattaaacaaataaatcgaaaaacaaaatcatataaa

SEQ ID NO: 26900 - DNA, 1444 bp, Arabidopsis thaliana landsberg
tcacataacaaaccgtgtcaagaaggcggtcttaccacttctctatcttgattttctttctttttccgcttgtatggatgccaatctggatcgttgatatagtgttcccaaagttggagaacttcaactgctcggtcctccacatcttcctgacaatacttctgctgcattgcatccacgaatggtttccttacgagctctcccatacacttaacaccgatacttgttttctattctctcataatctacataaggcacatgaaacaaacaaaccaaaatgtcaagctttctcagaggttttctgatataattgaaaagaacaacactttgatacatacatttaccaattctttacgagcttcttgaagctcatcattggttctgcgctctctaaggataagagtttggttaaatttatcgaggtctgcgagttctgcttccttctcaactaagtctttgaagatgatgtccacctctttcacaacttgagcatcgccatctgatgccatgtgcttcatcacattgagctgtcctttcaactgctcaacctctagctcaatcgcttgtacctgatctatctgtctttctagtcttatgattttctcatgaagctcctcctttgtgcctctgttaagtacacatcaacacatggacttatatcttaaaaaaaagagagatacagagagtaatttgatacctgttcaaattcttcagacaatttcattctctcggttccattgtgcacttcgcgctttgccaactcattacatttgatttcgagtttcttcctctctgactccaacagcctcttcaatttctcatgatcatcaactatcttttgaatgtgactcattgttctttcttgtatagcattcagctcacggtaatgcttttgctgattcttctccttctcttccatcaactgattaagttcctctgacttcactgaacaaagctcctcaatctccttcatgtcttttttcttctcttctacaagttgtctcaggttctgcacaagcaattcctgtttcctcgcctcttcttccgtaagctcagctatagttttcagatcacccgtcttcctcaagttttctccaataatattattaccgttataatcatcagcacgagcaatccaaccgtaaagacctaacttgggaccgtctttcttcaaccagtccttcttcccatgaccatctactgtataagccttgtcaaacaaaagaccattgtgaagtccattccaatctttgttaaactccacaatagctgttcctgaatgtcccaagtagttccataaaggacgaactctagtcgggttaaatcctcttagaatatactcatcccttagcttcgatccactctcgcccgcagatcgaccatcttgtgcctttgtagttggaatattcaccacaatacctgtttcaaccacatatacacaaac

SEQ ID NO: 26901 - DNA, 3459 bp, Arabidopsis thaliana landsberg
taggctaccttgtcacccaacacggcatcgagaccaatcccaaacaaatcttggcaatcattaatcttccctctccaagaaatacccgtgaagttcaacgcctcaccggtcgtattgccgcattaaaccggtttatttcttgatcaattgacaaatgcctccccttttaccaacttttgcggagcaacaagcgtttcgaatgggacgataagtgcgacgaagctttcaaacagctgatctcttctggccaaacccgaccaaggtgagacgttatacctctatatcgcgatctcttcttcagcagttagtggggttctcataaaggaggaccgatgagagcaacgtcctatcttctacgtaagcaagacccttgatggtgctgaacttccttatcccacgttagaaaagctggcatatgctgttctcatttcggctcaaaaactctgaccttattttcagtcacacactatcaaagttctcacgaatcaacctctacggacgatcgttcacagtccaagccagtccgggagattagctaaatgggccgttgagttaagcgagtttgatatcgactacaagactcgcacatgtgctaagtcccaagtcttggcagattttctcgttgaactctctcccgaactcaaacccggcatgtctccaattgaaaaatggactttacacgtagacggcgcgtcttcaaagcacggctcaggtgtcggagtgcacttagcctcgccaaccagcgaaatactctaacagtcatttcgccttgctttcccagcatcgaacaacggagctgagtatgaagcattaatcgctgatttgcgcctagctcacggaattggagtcaaacatatacaagctttttatgattcacaactcgttgctaatcaatttaccggcgattacgaagcaaagaacgaccacatggatgcatatttcaaaatcgtccgcgacctctctcggaattttgaactcttcgaactcaccaaaattcctagaagtgataatgccctagctgacgcattagcgacgctcgcctctacttccgatctcgatctccgccgaatcattcttgtggagagtattgacagccccagtattgaccttcacttaactactgtcaccccaactattgaactgccgactccgtcgcatgccgccatcgccaacaacactacagccgcgtcgtcatcttcgactccaagtattatcttactcgtcgtggaacctgacacagaagaatcaacgacaccaagtgcgcccgtcgtcccttttgaaacaaattggattgatgaaatacggaattacattgctgatgggatcgttccaacagataagtgggcagctcgtcggatacgaacatgcagcgcgctatacacacttattgacggaaatctttatcgtcgaaatgcacaaggaacgcttctcacctgtatttccaacagcgaaacaaacgatattatgtgcgaagtccacgaaggcgcagaaggaaaccattctggcggtcgagcgctcgccctccgaatccgtaagactggccattactggccaaccataaactctgattgtgagaagtttgtagcaaaatgcgagaaatgtcagcgacatgcaccgtttatacataccccaaccgagctcctacgaaccgcctcgcagccttatccgttcatgcggtgggcgatggatatcgttcgtcctcttcctgcctcatgacaaaagaagtatttcctaatcatgacagattattttaccaagtgggtagaggccgaatcatacgctaaaatccaatccaaggaagttcaaaactttgtgtggaaaaacatcatctatcggcacgacgtaccgtacgaaatcgtcacggacaatgggactcaattcacttcgcttcaatttgaaggattttgtgcacggtggagaattcgcttaagtaagtccacgcctcgatacccacaaggcaactgtcaggctgaagcaactaacaagacaatccttgacggcatcaaaaaacgtctcgaggaaaagaaaggggcctgggctgacgaacttgacggagatttgtggtcgcaccgtacttcaccacgacggtcaactggatgcacggtgttttctcttgcttacgggatggaagctctcgcccctgcagaagttagcattccgactatgcgacgctctatacttgttcatgaccctgctcttaacaatcaaatgatgaatgatagccttgattctcttgaggaggaacgtgataaggcgctccttcgcatccaaaactatcaacaatcaaaccccgtcattatctgaaggcgatctagtactccgcaaagttttcaagaacacagttgagctaaacgcaggaaagttaggcgcccactgggaaggaccctatttaatctccaagatcgtcaaacccggcgtgtacgaactcttgacaatggacggtacccaaattctccgctcgtggaactctgccaacctgaaatgatactactattacgcgcaaccgccaacaaaaaaaaataaaaaataaaatatgaactatgaatggcttgatcccttttttaagggtacgtaggcagtctttcacaggacccagctatctcaaaaaaaaaaaaaaaaaaattgaaatactttttttctacaagtatttgcgaaatcataccctcgatgagctctttcgaacaagcccgtcttatcgatcgcctagctcccacatcgttgtcctggcaagacatacgatttaaaacgcgttccatacggatgcagtggtgaaataatccacaactttacttgtgtaaagaataaaagccgagtccagcctcatagaataagctagcaggcggaagaactaataagccaagttccggcttgcacgttcgtgccgacctcaaggcacccacaggataagccggacaccatagccgcacctaaaaagcacgacgagtccgcctcgtctacatatttcacaactctacttctgtaaagattcaaaagctgagcctagtcttgcacactatctttcatgcagcaaacatgtagaataagccaagagacgttcttgcatcggaaaaataatatcaaagccgaagttgcataaccgagataacaagaaaaaaacaatagcaaatcataataaccatcaagttatgaaatctaaagaaaacaaccatagtttgcaacaaagacccaacagagggtcgaacataccgaataccggtccaacaagccacaaatggctaaaaaagctggacaaagtctacaacgccgaaagaaagaaaaattacaaaagcccgaagcaaactgtgatcatatcacacagcggtgtcgccgtccccatctctcggcggcgcctggaaggggtcgaggtcgtttgcgagaatctatggaaccacaatcgcatcgacaaaaagactgccaaatcggacgacccttggctaatatcttcatcctagcctcggg

SEQ ID NO: 26902 - DNA, 1095 bp, Arabidopsis thaliana landsberg
acatctaatctcatcaactatactaattgttgacattcgacttaattaacacatgataattttatcattactcaacattaaaaaccaataaaagaaagatgtattgcgaccaatgtgcggacactgtatgatagagaaacaacgtggcactgtgtgctaacaagaacacatcttactttctctctccatctctggtttcttagtggactgtgttattattattattggcacagaccaaacccacttggctccttcattagatttttttttctctctcggaaattgaggggcaataggaaacacgattctctaattctctctctagaaggaccaatagtgtcttcttctctcctcttttctctttctccattagtaacgacctaaactttattttcttttcttgatctcttcttaaatggggttagataagttttcccctttaatttagttgcttgtagacttgagattagtctagtaggttttggtgggctatcactaatacaaaagtcaaagtcaaaattttgaaaaaggtttcaactttggaagagatatttatcatcttcattttctctataggtttatgagaagctaaagctatgatgatttctttaatcaaaatagcttagggttttggagagagattactaagaaagttttaatgtttgtttaagagaaaagttatatattagggttttgtttattcagaagcttcaagatcagaaaagatggaagttagagagaagaaagatgagaaaatggagatgacaagaagaaaatcatcagctctagatcatcatcgtcttcctccgtacacttactcccaaaccgccatcaaagagaaacccaccaccaaaagaaacgggtcggacccggatccggatccggatccggatcttgatactaacccaatttctatatctcatgctccaagatcatacgctaggcctcaaactacttctccggggaaggcaaggtttagagaatgccaattgaatctcgcggcgagctccggtggacacgttgtctacggttgcggcgagtatatgtcttcaggggtagaatcacggtggagtccttctttgtgcagcttgtgat

SEQ ID NO: 26903 - DNA, 901 bp, Arabidopsis thaliana landsberg
  unsure (1)..(901): unsure at all n locations
cagcttcttgaatcatgctctaggttctggctattaaactgatctttacactgaaacatctttgggttcttctttggtttcaggtcttggaaagatattagatgaaaacagatctttgggttcttctttggtttcaggtcttggaaagatattagatgaaaacagagcatagatagaatttgtcggaggagtagacattagattaactgtgtaataagtcaatctctttactgcatattcattgcccattctttcaataaaatcctccaacatataaacaatcatttgcatacactaaaattacttttgggtcaaaccttttaacaataccaaacctacacatatttttgttccttcgtccttgatgatatgagagattgctctcttatacttaccatgtgatacgaaatacaaagtaggaaccagagatgtgttagatacattcaataataaatcatcgtagaccacaaattacgcgttacttgagaggcaatcattgtctcccaagtgtctctttcttttttcctcacaaacactatacagagactttttaattactgcgtgaagattacgaagagcataacgagatgcgttgtttggcgagtaactcgttaagcttcttcatgagcttaggatcagagcatatatactcttccattgactttctcagattcctcagtgtctctgtgtcatcttcacacgtctctctgttgagcagcttcgtgaacagttctttccacagatgcaccttccagtatctgagcaaataacttagtgattcaatatccaaacaataattttttttagtttgagaggctgagcccgctaatgagagagtctagaacatttgagaccttttaaatgaagttctcggcatattgatgtagccnccgaccagaga

SEQ ID NO: 26904 - DNA, 932 bp, Arabidopsis thaliana landsberg
aatgaaaaacctgaaactgtgtagcaatagattatgcttcgccttgtaacttaatgaaaaatcgaagttacacattggttgtgtgaaatccaacacacattaaagaagaaagaatttcagtaaacttttgatacaaaagcacttttgttaaagctttagataaagtccatcatccatcatccggtgatgttgttgacgagcaccactgagttataatgctccccgagcccaaaagcatgcctgtgatacgataacatgaggctcgagtcatcgccggatctatactctttgcccatctcaacatccggaaacgatcccgaatacacctttatgtgtttcctcaagcaatgtgttaatgctccaagctccaattgactgccccaagcagcggttgactcgacttctctgcagtatttctcaaaccgctcttctgcagatccactgttggagtcaccctcagtctctgacaagaaaaacgggagaaagtcggttttgtgctctctcatgtacgaagcagccatttctcttagattctggtatgtgtaaggagatgcaccgcccgagcggttggcaagctgattctcaacagcacggtaaaggcaatgtccgtctggtttaatctcactgactgttaatcccaatggtttaagcttcttctcaagcttggcgttctcaaccatacgatcacttttcacgtggctttgctcctctttaattctctgctctctgtctgcttcttccttagcccgtttctcgcgcctcttcacgctcttgctaggctttgagtgctcttgctgagcagtgactgagactccagctatagctctaactagagtgtcgatgtctccttttttctcagtcgtttcgtccttggcaatgttgttgctgctgctgctgctgaaaccttgagaggcgagttctttcaactgttt

SEQ ID NO: 26905 - DNA, 1408 bp, Arabidopsis thaliana landsberg
aaccacaagaaaacatgctcttaataatcatgctactgtcctcaagaaaaagatgctcaacgaaaacatttgaggcaaaaagcttccaattgtagccatgctctacaaacatatgcgaatgagggctagagaggagaggtcgaggcatcaaaagcacaaagggtcgatggacaaccctaaccaatgatggcgaaccatccacaacaccaaagaaaacctctcgattcaaactccaacacacaaaatcaacacgtacaaagtggacaaaagctttaagcgtgtgggagtaagttgtcctcaatgcgaacaactcgacacaaagaaacccataactccagcaggcaagagccaaaatgcaggggttagaccaagagagatcttggaaaaaatgtgaccggttaaggaggagaggcgacaccacattacagcataggaaagcacgctcgaccacctgaaacaccagaaagaaggcaccccaaaacagatctacaaacaaaagcttccaacgcttgagatgcgagactctaggaccggaaatcaaagcatccaccttcatccatcaccggctacaggtagtggaggcaaaaaaacaagagatttcagcatcagaaagagcccacgcgcatggcggtccttcgacacacgccacgagaaacagagccgacataactctctagaatcttcaagtgcacaagtagaatcagaccaagtaacctaaagccctctagcatcgctggtcttaaacggacactaaagtggcaagatgcgatgaagttaggtttctcacacaagaaaagcttcgggagagatagtttggggacacatgtatttgaaaacaactctcgttattagatcgttttttcttgtatgttgctcactcttgcattacatccatctaatggatcactatgactttcctccttcccacatgctatatcccgtggaaatcagcatctttgttacttccagaatttttaccccaacctaatatatatgcttatgtttgttaggttgtttatcatgtaatcatgtgagactaatagtagtttttcttgttctgatgagagcgtctgattgcgttttgtgaagatgtgttaattggaaaagagattaaaacaaagacaatgagtgcttgcaaaaagacataaaaaaatgatagctcctaaaaaaaaatgtgaggacggaaattcatatacatatcgaaagaatgtaagaaaaaaaatgagtttttttctttcaaagaaaaaatataagttgttaaaaaaaatatagataatcttataagttatggatataattttgtaaataatcttatctttacaatagccatactaactagtgcagtggagagacacataaaacaatagtgaatttgcgcataccaaaatgagaaagttgttaggttttc

SEQ ID NO: 26906 - DNA, 1411 bp, Arabidopsis thaliana landsberg
tactattctaaaaatatatcaattgttaattgggacagcccaatttgcactggacatgtcaactaatgaccaaattctatacacaaaaacaacagacttgttacgtttaaaaatgctgacgtgtcccaatatgatcttacctttgatatcgtttttaaggaaaagttgtgattgtctgagtcagcttgtatgagttcctacgtgttgaactaatcctgacactacctgagggaggtaatcacaacatttttcatatataaccgccccaatttcactgatttcaccttttccttttaccaatcacatcatcccaattatttacgtacttagcttgactagttgtcgttcattacaaccatcttaggtttcttataatcattcctgttacgtagtaaagaactattttacgtaatagataagattagatatcagttgaaattattgactatatagacatcctaattttatttccattgttaaatttgttaatatatctaactatcaaaacctaaatcgacgtgtcacactcaaacttataaagactaaacctattacaagaaataagatcttttaggccgaattagttggtacgttgatgatccaaatataaataatagtttatctttttctttttaattatgaaaggttaaaaattcataaaaaaattacccatatttgcttaagacgctagcttttttataaatacagcatagccatgtgtaattgatcatcagataagttccgtggttatcccattaaccttctttctacacaacacaaaactatatataaagatcatacatgtaataacgtcctgcaactattacaatcattctcgcttgaattaacgtggacgtcattgtttttggattgttaatcaaaggcggcgttacttttttttaatataattgtttctttaggatctttgtctctggaaaatgaaggaagacgcaggaaaccctttgcatctcacgtcactgaaccatgtctctgtcttgtgccgatccgtcgacgaatctatgaatttttaccaaaaggtgttagggttcatcccgatacgaagacctgaatccttaaattttgaaggcgcttggtaatttatcatcattttatttaaaatatatctgaattttgagggacaaaaaaagtaccaatgagtttagtttttttacatgttcttttttttgggggggggtctaggttgtttggtcacgggattggaatacacctcctgtgtgccccagaaccagagaaacttcccaagaaaactgcgattaatcccaaggataatcacatctctttccaggtaatttttcgtgtgtgttaattctcagttttgccctgtttttatgtttttttcaataaaacttttgtgctttttaaagccataaaccatcatgtacgttcatca

SEQ ID NO: 26907 - DNA, 614 bp, Arabidopsis thaliana landsberg
  unsure (1)..(614): unsure at all n locations
gtagcagaaccagagcctatgatgcgtcaagtagttcaagatcagcgtccagagaacgcgatgttgcaaagaggcagtcttgttcgccttctagaagccgagctcctaatggaaacgtaaatggtgctgttccttcgttacgtgaacaaccagcaaagactagcaacgatgatggtagtttgataagtcatgcggctaaggggaatcaaaaggtcgagaaagttgtgaatatgagaaaacttgctacaccgcgactgacagaaagcggcagtcgacgacttggtggaggtggtggagactcctccgctgggaagtcgagctctggatctggtggttttgggtttggtagaaacctatctaaaagctccatcgacatggccttgagacacatggtacggtaacaaatgaaatgatattaaaggtcatcaaccatgaatttcaacgactttcaactttggagtacttttgtttatgtgttaataggatgttagaaaaggaagcatggcggtgaatttccgaccttcagtgacgaaagcaccggcgacttcngtgtacagtgtgagatcatgtctaaaccggtcgtgagcancagcgggagctcggaatcaagtgtc

SEQ ID NO: 26908 - DNA, 968 bp, Arabidopsis thaliana landsberg
agtctggtttgtttataacttaccagattaaaaagtctactctacgcagccatttaaatgctaacaatgtgtagtgttgacacctgattttgcagttaaatatggctcagtcagtacccaatatcagcaggatcaccaatgtacttggcgacttggtcaagtttaacatgaagcatctcctggctatctgcatcgcaaaccacaccagtttccttatccaaatctttcgtgaggtagtctcccatacacacccttatgtctaccagacagaaccaacacagaccctcctcgcctgggcaatgcagtctcaagcaactcctgatcaatcccttgaaccaactcctgcgtctcatccatagcaatatcacaacttgttggcccaaccacatcagtcaccactgctttcttaagatacaatctcccacctttaacatccttgcttattattctcacctttatatgactcctaagccatgaggtcttctctctcgtctctctagtttgacctctatagttctgcttacaggctttaacttcagtgcgactctctccctctgtttctctattacgttttctcacaactctatctttctccatattttcaatcttgttgataccaactttcacttcctcatggcttccagaaccaacaagtttattatctatcatcttcatggctttgtccgatttaccaaagccaaatccttcattaccagaccacttctcgtattcaacaatcttaacatcctctttagctttaagaccaatcccctggcctggtttccacccatacccagccagtaacgcctctccaaagccatccacaggaaagctctcgaaatcctcttgttccggagcatcagggagtgactccaaatctgtcctcatgcttttcagtaacatcttctccacaggctctggcttctcaacgttctcgactttctgtcgcagattcagaccgtacgtaa

SEQ ID NO: 26909 - DNA, 1658 bp, Arabidopsis thaliana landsberg
  unsure (1)..(1658): unsure at all n locations
atacgcgatgccccctaaactctcggatatcagattattgccgccatgatgattttgattaaaagtgttcgtcaagtgctgagtccagttcagagtatttggaaaattcgccgttggtggagaccgatttaagttcttcgctgcagccactagaggagttgtagtagtaactccccgccatggtatctccgccagctcctgtgaacggcgtcgtttcgatttccatttggtggtagcacgacgtcatgatgttcttaagatcagagttttgctccgtttgacaattcgaagtggttagatgatgatgatggagatcatgagattcttgaagatattgaggcttagtgtcttgatagtaattagggttttctatggagggagaatcaatagccatcatgctttgtgttgcttgttgctttagaatctctagctgtgtttgtaaattcacaacctacgaataacaccacangaanattagtgatccgtatttacaaattatgcatatatcatatgatattcacattttgtcatatccaaaatcaagactagggttaaatagaggaagttttatatatttacttgttgttggagggaaaagatatgagaaacgcagccatagatggggtcttgacggcgagcttgagcttcataatagattgtagtagcggcttcacgtcgatcctccatgggaagatgagagagcaatttagaagcattgctggcnnnnnnnnnnnnnnnnnnnnnnnnnnnnnnnnnnnctccttgttcatggcaaaagtatggggcaaacacacatccttttacacatctccttcttaaaaacttacaagctccacaaggagagccagagccagtcatggtgatgactattatgtgttactaagtatttaggtctttgatgattaaccttgagtagctttaagaatggaggagcattagcttagggggaatttttataaagatgtagatgaaggtgggtttcatatactctttacattatttaatcacaatttgtcttcttagtggcctacacctttctcattgtaattgattttcattatttttcttaaatttctgctaagaagattttacaatcgatctggatttttttttattgctttttaatgatgtagatatttatgataaaattggatattaactccaattatatatataattgatatatgcaagaaaaactaagctacagttagtaaaaagtaaactggcacaaaatcatacattcatcatattataccaattcattaattactggaaaatctcatggatttgcgtttaatataagcatgacatgcatcctaaaataaataagtgccttagctatcttactatactctacatgaacgttcttttaaaaaaaatatttttaaaaaaaaaactgaactacaccaagcctaaaatccaaacgctccatctctattctctagctagaacgttctatttccatagaaataaacatcttaccgtataactggatttcattatcacgaaacttgaatgagaccgcttaacctcttcattaatatttaatttgtgtataactcataaccatagttccaaaaataatgtagagacaacggagacattgtatggtatgtgatacgtcatatagtttgagtagagtgtgacacagttttttt

SEQ ID NO: 26910 - DNA, 3246 bp, Arabidopsis thaliana landsberg
  unsure (1)..(3246): unsure at all n locations
cgagttcggttgcatgattcattgcttccatacttcatcgtggctttcaggtcttgctcaaggatgaagaccatgattctctttcagacatatcaacgagtttaaacatgttatcaacaaggataggaagtttatgttggaaaatattagatatctgttatctcagcaatgataagttcaatcacgaaacttcaattccagctgtcacaaagatgttcccgtcaagagttgaggaccctatggtaagggcagatatattgattcaaacattcagggagatcagtggactttctgagcagtcactagaaagcaagaaccgattactccaaaagattgagaagaattacagaatcattgatagacttaggagtttacagaatgcaggtattttcttctacaatttggttctgcccagctgttacctgatttttcatttcaaagtcggttccagtctttagtatgtatggtctgttaggatagattgtgtagttcactgaaggtgaaataagcaacacattaacttcactgttagcaagtgaaattttctgcataagctagctctttgtttctgaatgccatgagtttaagcagtagtctaaagcagcttgttattggtttctatgcaggatggatatctatggaagatgagcaacttcaatatttgtccatgatcatgttgcattcggcagacactttctctatgaaggagttaccgcttcttctaactgatggtagaaacgccgaagagcttatggatgaaaatgctgtagttatgcaatccaagatcagtcaaataaaagacatattccctgagtatgggaacggtttcttagctgcgtgtcttgaagcctataaccagaatccagaagaagttatacagaggattcttgaaggaacactccatgaggatttgcagcgattggaccctttactggagacgatgccacaacctacatttgcttcaactcttagaagcaaagacaaagggaaaggaaagctcattgaatctgacactagtagctctgctagtgccatctatacagagaaaccgatcacacggccctcccttccagcttcatcagcctcatcagcaacagttggcagatttgtcagaaagccaaaggatgatactccaagttacaaaattctcgatgctagaaaagaatccgacagagagaggaacgcagccctacttgcacaatacgaatatgatgatgaatacgatgattcttttgatgatctgggcttgagtattgcggaatcaggtactgaagaaagcggagcgtttggtaacagagctggatccgagccctctgatgctccaaagtggggtagcagaaagaatcctcaattctatgtgaaggatggtaagaactacagttacaaagtggccggcgcagttgctgtggcaaacgccaacgaagcttcactggtaaatgaagcagagggagataagatacttgggttgggacgtggaggaaacattcctctaggagcggttagaaagttgacagagtatcaggcacagagagatgagaaaggtcagtctaatgtgaatgcgaacccaagcgatggaagagagaatgggagaaactggagaggaggaaggggaagaggaagaggaatggtgaacagagagcaaccgcaggagaagagtaatgagagtagtaataacaactcagaggttaatacagaggcggagaacggaggaggacggggtcgaggaaggggacgaagaggaggaggtggagggagaaatcataatcataaagatagagctatgaagaaacatattgctagtgtttctggcttctagaggtttaaaaagtaacaaaaagcacaatacgtttttgtgggtctgttttttcggatacaggggagaaacttaattacaaatcgatacttcatttgattgtaatgcttgtttctggtaattaaaagaagaaaactagcatattattattccctttggttttggttaaacaagtttcttttgtaacaggttggtatgaatctaataaaaaaatgaactttttgtgaaaaaaaaaaaattcttttgatatatatgcaaaggtaacaacaacttataaccattccaaatctccaattgaactcacattgtctaagttctatctttttatctttattcttcttcccgtaaaagaaagagaagttattacttcgagtgacagaagttgtaaaaatttgtaagcatgtaagccgcaataatataaaaagagaagaaacatttataaatgtgtgttatatataaagaattttattttatttgaggtagataatgaatgatctacaatcaacaactacacggtttgtgattatatgtatccacgtgatttaatatacaaatagatttgttttctctgcaaaaaatacaaaaataaatacataaaagaaaagccaaatcctaaacgtaactggaaaataatatacgtatgagctaatttcaatttggattagacaaagaaaagaagaagagagagacgtaattatacaaaagcttacgagaagtttgttccatcatcacttgagagaaagatgatcaaatcatacaagagaaacacgaaccgttcaacgggagggaacgcggcagcactatcattcgctttggttcgtcgtgcagaatatttaggtacatacatatgttttataaattttatcatctttttgaatgcatcataatttacaatatttcgattacgagaaaactagatgaagagaaccttaaacatcctttttaacataaaaagaacactaaactaacacaagttctacacattagtataatttcttagctgataaaaaacacaccattagtatttttccctttttggtaacgttttttttaagataacctaaaccataatactgaatcacaaagctcataaaaaaggaaatcgaaattataatcacgtcggcaagtaaagagccaacggtgagggatgagccacgtgtgaaaggatattccttagatgtgaatgggatctaattcttgtccgattaaaccgagaagagtcttggtacgcctctctatatataaaagtcatcactttcctcctcacgtttcttcctttggcatcgacgaaagtctgaaaactcttttctctcgacctctttctctcttaccccaaacacaaaatctnctctttaatggatatatcgcctctccgatctcattcttcctcgtttttatctgccaaactcttattgctcttcttcttttgtagt

SEQ ID NO: 26911 - DNA, 1382 bp, Arabidopsis thaliana landsberg
tgcatattaattggaacatggagtgaccacccgggaaaacagtgctaccatgaggactatcatggctctagtcttggctaaataactagggaagtcttatgttgggtgctggtcgtggtcgaccggaacgggggcatctggcaagctcttatagatccggctcaggcagatttgatacgggcatagttcgcaaagctttaccctgtagtctggactataagttggttacgttaggtgtgccttatgcagtttgatcatttccagcatttgcgtaatgaggactctagggagaagcctcgtagtgagaccctggccattcacctcggaactgaatacgggtctagctaacccgggcaagaagggaatcgcgactcatgggtaaagatgcgccacctctgcagagtgtaaaactgatatatcagccgtgctcatggttatgagcggcctggactcctcacatgataattgaacttgaagatggaattaaactgagatctgatgatctggcaataatttgcttaagtggtttcacttaagtgtttttgttatattcatattcctttgtttaatgggatatttgggattcacacttattagtaagacaggtgttgttaataaaatgttgaccaactaaaatgcttactgctcaaccttagcctcaccttgttataccagcattaatttttcccccacttgctgagccccgaccataagtgagctcacccttgctaatattttgatcagagggtgatgctggagactttgatggagattttatcgacgaggaattctaagtctaacgatacgccgtcatcttcctgtgggagattgccaatgttatttattttcgctttactttgatgtgatacttgttcaagatacaatgatgcagatgatgtaataaagtattatactctctctttacgcctttattgcattgtcttttgatatattacacttgtgacgtcaacatatgtgtggaaatggatcctggcacacatatggtatgcgctcggttctaccccctggaaccgggtgtgacagtgcggaggagcctagcttgctggcgcatgctgaacaggacccatgctggcgtaatgcgatggaggaagacctgcgcgccatcgaggagaactgaacctggacgctcactgagctgcctcctggctggcgcaccatcgggctcaagtgggtgttcaaggtcaagaaggacgagcatggtgccgtggtgcgacataaggcgtggctcatcgtaaagggctacgctcaacgccaagggattgactacgacgaggtgtttgcactggtggctcgcttggaagctgtgcggctgctgctggcgttggcggcgtaggaaggatggtaagtccatcatatggacg

SEQ ID NO: 26912 - DNA, 8027 bp, Arabidopsis thaliana landsberg
  unsure (1)..(8027): unsure at all n locations
atataactgtcgctttcttcctatttctctcgatggaacgaaatcgttctccttctctagtctgttcctctttcttcctctttctctctcgtctattccggccgaaaataagacgcaggagtcgcatttctggtatcgtgaagtcacatccgacatctaagttctggtgagtatatttccgttaagtaagaattcgacatctaagttcaatcacaagtgattcccgtcactgaaatcgttttccgatgcttaacgatggtttttaatgatgcttaaagctggtttttaacgtcgtcgttgattgacatatggtggccgatttgttagatctatttgatttgacggctgagttactgtttgtttgccgactgatttatgatttatcaattcatctatgtctgagtttgttttatgctgtgattgagttatggtttaaccttacatcgatggatgagtttctgttatatgacggctgagtttgtttatgttatggctgagtgtctgttatgatatggttgagtatggtttatgttttgactgagttgttgttaggttatggtttgactcagtttgaaacttatggtggctgagtttctgttaagatatggttgtgttagatttatgttatggctgagttatgttatgtgtggcagagatagatttatgttatgactaagttatgttatctatggctgagctaggtttatgttttgcctgagttatgatgagtttgttttatgttatggttgagttattgaatgcttacggctgatttatggtttatcagatgtctgaagaccaagcaagggatgaccctccaagactttacccagatggggattctaatctagagggtaaaaccattgatcacaacataaagctgggagatttccctacaattaggaaaagatatatgggaagaactgaaagagacaccgctttgattaattgctaagcttgttgatagtcattttgtatggtctggtaagactgtacataatctaatatggagacagttgagaatactgaagaagaagctttggtgtatcgtggctggtaaacccatccggtttggattgaactaatttcatcatatcacgggtttaaacacagatgaactgcctacagaaaagtttaggcctgaagctgactacaaagtgtttttcagtgaattgcatgtgccaaccagtgaaggtcctaatctagatgaacttaggcagggcttagtaacgtgcagagcttggcctactgaaaagcgtagatggtttgggttattgactcttctatccattagactttttggcttgcatactaactctaggataccatttgagagtgccaaaagagttttcgacgacaaagccatgaagacttatccatggggtcgggcagcatatgaagcccttgtcgtctctataaagttgctgaggcctattggcaagacgtacaccgtcagtggtctggttttcgtgttgcaggcttgggcgtatgagtcaatcatcaccatcgccgagcgttttgggaacgctgttaacgcagatgagattccgttgcttagatggggtggcaaccgtacccgtgcaactatagaatcggtcattgctgaagatatcaaagcgaatggtggtgaggtacggtttcggctctgttatgttctgttttttatcaaatatttatgttacggctgagttaatgttttatttttctctgtgaaggctgagttatgttctattttttttggcaaatatgttatgtgacgaccgagttatgttctataatggctgagttatattaagtaacgactgagatatgttctgtgatgactgagttagcttaagtgacgactgagttatattaagtaatggctgagttaaacatactgatgggttttattatctctcctgttgtagctgcgtgttcgtacaatggttgaaaaggctgagttaagcgagctatttcatttttggccagaccaattagaagacccagcacttgataacttgatccaagacttacacgaggttaagcttgttaaaggttattgggatgtgaagacgagtgagaagaagaagaaactcttaaaagataaagaagcggaggtgtctgaatctcccgctaagaaacagaaggtctctcacagtgagcatgttgattctcttgagaaagatgcagaaaagaagaagaagaagaagaagaagaagaagaagaagaaggaagtagctgtcgaatctgatgaggacgaggatgttcgttctcgtgagcaggatggtcagggagaccagcagtcgctcgtggatgtggtgtccaacttgatctctcccttaaactctcgatttgacaccgttgatactagcataaaagaaatgtcctcccgtctggatgtgattggatgtcaaatcgaatcgagtgttgaagcaaagtttgaaggaaggtttggatcgattgagaacgatgtcaaacagattaaagagcagctgaaggccatagctgattcaaaatcacgcagctatattagagatatgtttttatccaaaccacagccccaaacgcaggaagacaatcgtaaggcccaaactcaaaagacaccagacgttccaaagaaaattacaaataaccaatctgctgctcctagtcctcctccggtaaacttttagttagttatgaccgagttaatatctgattattattcggctgcgttttaacttttagttagttatggctgagttatcaatattatacggctgagttatctgaatattttacggctgagttatataaatattttacggctgagttataaacgcttgttagttatggctgagttgttttcatgttataaatttagttagttagttatggctgagttatatgaatattatacggctgagttaaaaatttaattagtcatggctgagttatatgaatatgatacggctgagtttagttagttatggttgaggtatatgaatatgatacggctgagtttagttagttatggctgagttatatttatacataggtatgagttttcgttgtttaacgcctgagttttcgttacgtttatgcagtcgaaataagctgatgttggggtaagtaggaagcttgaaggagaattcgataaggtctccattgtgtctgattttgatttcgttgagactgtttctcctctcaatcgtcgtttacgctctaggaagccaccagccccaaatgtgccaaagcagaaaaaggagaaaacattaaatgagctaatctagaaaccgccagcgagaagaggaagaggaagaaannnnnnnnnnnnnnnnnnnaaggtgcctcctactgtgccaaagattacaataaagaaaccaaaaccatctgaggaagctaaggaaaaagctgaggaagctaaggaaaaagctgaggaagattcggatgtagttgatgtcacggataaggttatatccgagtataatgaaatgcttcctgagtctgatgaagatgaggaggaaacgagaggctaaagagtgtaaaagaaattcggctcaaactgttaagctggccccggatgggagctcattgattaaccccgaagctatgcccactcacatttttccagttattggagacaacgggctgagctgcatgagaaagggttgtctgccttcacgagcaatctatgatcctctggcaccggttgatccagccaaactgcagaagcttaaggcttatttgacaagtcccgaatggtatgaccctttatacattactaagttgttaaatacgacatgcttacactatttgtttatattaactttctttactatttgttagcaaacaatatttgcaaaatgggatggacgaggtgctgttctactctgttatcaaggccgaaagaaaggactagccagacgagaaacatggatggctgggtgatgatgtaagttattgttatattctgtctgagtttggctaatgttatggctgagttatcgtgtcgttctgtctgagttaaagtagataatggctgatttacgatctaagttattgttatattatgtccgagtttttctaaggttatggctgagttatcgtgtcgttctgtctgagttaatttagctaatggcagatttatttaggtgttaaggctgagttttacttggttacggctgagttaatgttgtgttttgtcttggttttatttttgtccagcacattgctgcgtatgtgaaagtcctcaccatgaggctcctgcgagatcccaccccatactacagcgaacgagtcatgattctagacccgtggttcacgtcaatgtggactagggattacacacagtgggcgatgaagccgatgagggtttctttcaaaggtaccacgtatgaaagttggatcaacggaacgggtggagaagacccgacaaacaagaagtggataacagatgtggataacttgtatactatcctccaaaccggaggtaatcattgggtgaccattcacgtggacttgcctaggggtcacgtggactgctatgattgcatcgtcggatgtcatacaccggaaagcgatggaaaaatccaggaacactgtaggccgttcacgaggatgattccacagatcatgagtgaaattatccctcccgcagtccgtgtcctgcaatannnnnnnnnnnnnnnnnnnnnnngggaccttaaaaaggtcccgcagaatactatcaccggggactgcggcgtttacacgttaaagattcttgaatgtttattgcttggtgtttcttttgaaggcattaatgattcaaatatccaggggctacgggttaggatggcaacagagctctacgatgaattacctaacagaatgcccgttcgtttttatgagacctgaattgcgtttttgaacatgtctgtgtcttttgggatttttagcatgtgattgtactaaatattgacactttaggattgataaccagaattatgtccgtatgaatctattattatgttaattataacaaaaaccaatgtaatggctgacttatcatcgctcgattcgttttacggctgagctatgctaacgtaagggctgacttgtcatcgctcaaatcgtgctacgactgagttatgataccgtgacagctgagttatcgttgtttaattcgatgtttagctgagttattctaatgcggtggctgacttgtcatcacacaaatcgtgtgatggctgagttattctaacgtggtggttgacttgtcaaacccaaacttccatcccatcaaagaaaccaaacgtcactgtaggactatacatacaccggtttacgacaattgaatagtcaagaacccaaacgtcgttagaggaccaaacgtcgttagaggaccaaacgtttgattcatagggatacaaaatgaaagaaaaaaaaataaagatcattaactcaagaaatgatgcttacatctgatatttcgtacggacaactgaaaaaaaaaattccgattgtaacaggatcaagagaagtggcaacgacaaccttagcattgcaatcacactcgatcggaacgcccttatcgcgcctcctgttttcgccgtacctcgttcgcatccttatttctatacggtcaagctcctacattaacacaaacatgatatactcgacgttagatgggtaacgatttgtactattcagatgtggagataaatacctcatcaatactagattcgccttggaaaagagatctctgagccatcatcttcactgcaattagtatggtactaaagcactggttctatatagtcctgtctgccacaaaatgtactaatcaaacgacggcgtatttgtattggctgaataaatttagaagtggctgacttgtcatagcattgcggctgggttttcactgatttgtggctgagttatgtcgtcatacagtatgttactacttagcgtgttgctttaggttggatttatcgagattatttattatatcattatcaagataacaaacaacaactttatggagaaccgccagtaatgatttggtccacatgcacaggtacacacgcccgcagttaatattcaaaataatgcaaacgagttcgaaattattccttaactaaaccctccaataatcaaataacgttacggctgagttattcattaagatttcgtgttttggccgagttatgagataccatatgttattatgatatatcaaaccagccaccaaattgttggttatattattagcttgaagatgtgcaatttgaaaacagaaaataacttttattttcagcaagtgtcgattgacaaaacatggtctgtcaaaacctctaggaagtatgttgttggatatagtatgatgttggacaaagtaggatgttggataaagtttataggatatgagctagtttcacggttccactagttggaatttggttatgatgtgttaattacttgattttcacaactgttggctcaagaaaagcactttcagggtttggccgagttataacaaagtgatggctgagttattcctatattgtggctgagttatgttcgaattctgagaaaaatattctccgctattgaccagatacgacgtcggtttgttacagagtctccattattgaccagatacgtcgtcgtagtgacacacttataaatccccaaaacgaaaccctaatttataaaattccaatttctgatttcagatccggagctccttcttgcttttcgtctccgaattttccagctaaaaattaaagaaatgagtagcaatttcgataactcgattgcgagtacgcaatccgtcagccgttggggacgtgggttaccatcaaagtgtcattgcggattagacgtggttatctatacatcgacgtcagcaaggaaccctggaagaccatacttccgttgtcctacgcgtaaagatgtaagtatataattgatttgagggttttattggtttcgttgttaattgcggatgtgattgaatatacaggaccatttgtttaaatgggtcaaaaatggtacatacgaagtggttgtagacagttggccgaaattggccggcttcgacagtgagttaagcgcggccaagtccgaggtttctgtcgagctagaagcgttacaggggatggtgaaagaactgaaggaagaagtgatgaggagcgaaagggaaaaccacaaatggaaattgatgatcaaactttgctgtttttgtcttgcctttattatcattgtcattgtttttggtatcttaatgttcccaaaaatcaacgaacagaggctttttctgggctactagtttgttttatgtttgtatgaattgtttgctactggaatccattatgtgtttgatgtttatctcagcgtatagggttaattcgtttttttggttcaagtagtagcttgcaatgaaatggaactttgtcttcggccaagctaatccaatatcgttgactgagttatactggtaatgttgtggctgagttaatcatacgctatggctgagttaatatctgttgtgtcttctgaaatataggttacggctgagttattataatgttgtggctgagttaatcatacgctatggctgagttaatatctgttgtgtcttctgaaatataggttacggctgagttattataatgttttggatgagttaattatacgctatgactgagttaatcctacgctatgactgagttatgataaaatttaacaagtaacctcaagcgataaacactgactttactgagaaggcgttaatctattgatacgactgagttattataatgttgtggctgagttaatcaattgatatggatgagttaattttgagttaggcctgaattatgataaaatttaacaagtgacctcaagcgataacaactgactttactgagaaggcgatcgtagataataggagatataaagccattaccaaaaaaaagaagagagtaatatactgagttcatagccatgagataaagggaagagaagtaagagacaaaaaagcattcaagacatgaaaccgacatcatctgggccaaatt

SEQ ID NO: 26913 - DNA, 2077 bp, Arabidopsis thaliana landsberg
  unsure (1)..(2077): unsure at all n locations
tgcattacctcacagaatcattagatacttaaaaagatgcagctttcaaaatccaccatttccaaatcaaacatgcaaaaaccagaactaagttgagaacactctcaccttgggatgaacaagaaatacttgcatgtgaaatccaaacagaaccgcacgaactgcacacacacaacagagaaattcaacaaaacataatcccaaaggtgctgacaaacacaaaaaccctatcaattggtcaatagaaacacagaataatcacctccattgacgacaaagttcataagatgaaacaccttctgagtagtccaaccatactcaggcactctcatttggatccttatcagttgaacctaccaatcataatcccatttcaaacaaaaggtcagaaattgcaacataactaactaaacccagaaataaactacagaaacaatcaatcaaactatacaatgagtaagtatttcaaagctcaatgatttagatagaaaacgatgtctcaacaacaaaggtcacctcttttgttaaacagaagaggaaagatatgtcaaacacgctaagaaattgatctatatacctaaaagcaagcatttttagaaaactaatttcactcccaaacaaaaaatttcatgtattacgaagaaatttgaaagccatacaagagcaacggcggaaacaagagcataagcaccacaaagagcgaaaaagatcccatcttgccactgagttgactcattaacatcatcccaccaactcgtaatcgccgtggttagaattccagcaatctccgccggcatcattagacccgaatccgtcattctctcctccaggatatcagctatgctggtggtggggattagactctaatctcgaaaatcgagaaaccctaatctctcagctcttcgaaatccagagaggcgaaacaaagggaatgaggattgagttgtttgaatatctgcaaactcacatcacaggtcagatggaagagaaagagagagagagagatgatgatgaaggaaagatccaacggttgagattgatgcgatcttttcgatagtgtagcttctggcttgttccctcacacgtcctctgaattattttatcatttggtttggtcatttaatatttcacctctctatttttgggttcaaatttgttgaatttcatatatgcatgatttgctactaagaagttagaattataaaaacaagacatgtttttctctgataaaaaaacataagatctttattgtataaaatcttttatttatagggttaggtgttatttttttcttttttgatacatgggattctatgttttaactattttgagtgaatccaaatttgaccccaaaaaaagaaaaaaaacatgtacattattaacaatatttttttctaatgatagagatgtgatgagaaagagaactgtgagctcgtttagtcaaaaaagaagtttcaaaacgtcttttaatttgatttgtcaccatataataattatgaattatttatctatttccataaaaatatattatagacatattttagatgttattctagatggaaaatgcgaaaagagtagagttgggtttaatacaaatgttcgaactaaaacttagtggtaccagcagcttttaattggtaggtctatctaatctttaaggaattctccatatatatttcgatattcttatagtagaattattgtcattgtgaccaaaaaaaaaacgaatacaaatgaaggataatatatattttcattcaatctgttaaaacgagttaatttcagtaatatgaagatttaagaattataaattattcatatacatatttgaaatcgtgtaacacatgccataagatattgttttgtaacaaggtgagttaggtaggcggcttgaccgtgtatgagtgttggagacgtgttgatgatacttgcttgatatatccggaattttgtagacatanaacgtgtgtgcgtcaatagggcttgttcggacactttagttgttatataagggtcattaaatcatagtattattccgtttaaaaatacgacanagggacanaagaaatgaacgaac

SEQ ID NO: 26914 - DNA, 1493 bp, Arabidopsis thaliana landsberg
accaaaatagtgttatggttggagatgctcctattttctaaaaagtaattaatgaaaaagagcaggggggttacgagcaatgacaagttgatgcaagcacatcgagagcatcacgtgacccacccgatttaacggtcatgattggattttttgtgatcccacgaaaggtgacctgtcacattttgtagatgccgcaatctctgccacgtattttggactcgcagttattttagttaactacgtaattagtttagctaaatttatatattaagtgtagcatgattttattcatagtctctattggatgtggatagtccgtagttggaaaatgctgtcattgaataagcataaagttgtaaaatgataaaattagttattgtagaagctagattttattatacacaaaaatagtgtttgacacaaaagaaaagttattataaaagcagcttgatagtcttgacctttgaattctcaaaatgtaaacacaaacggtgtcgcatttcgattttcctgctttattaaaaaagcctgagcacgtgttaacacatatgggacatccttgtaaattacaacatactttaagggtaatttcgtcttttcacaatcagacttcttttttcttcaccctgttaagtgcttcttcatttattactccaccagaaaaaactcagaaccagaaaaaggaacaaaacaaaaataaagcgcgaaattagttttcaccggcgagattttttatcctctctacgagataacacttagaagaagaggcagttaaaacagagagacgacgtcgtgttatttttccaaattccggtgatctgagaatgacgtcggggactagaacgccgacttggaaagagagagagaacaacaaacggcgagagcggcgaagacgagcgattgcggctaagatcttcgcaggactaaggattcatggaaactttaagctgcctaaacactgcgacaacaatgaagtcatcaaaagctttatgcaatgaagctggttggactgtagaagacgacggaactacttaccgcaaggtaaaccaaaaaaaaaatctcgatcctaaatttcttgaaaaatattatcgattttgtagattttcttaaggattattaaaactgtgaatagatctaaccgttcgattttgctgagagaaaaaaaatcgacggttgggatttagtttgactggtttagttagtcatagcaaacgtcagatcgaaaccgttccggtgaactgaaacaaaagcatgaatgtcttaagattcgctgatgctttcacacaaactctctgttcactttcagatgagaattatacgtagtgaccacattacccttactaatcacatggtcttacaataatatttagggtaatatcgtcatttagtgaggtattatagaaaatgtgtaagctttgagaatttttctttttgcgctcttctttggacacacaaccttttgctttataaatgaactttatgacacgtctgtt

SEQ ID NO: 26915 - DNA, 1482 bp, Arabidopsis thaliana landsberg
  unsure (1)..(1482): unsure at all n locations
aaatcgagtagctttggaattagggatttttaactcaatttcaatcgattgaaaaccataaaagtcaggaaatatttttgaatgaattatcaagtgtttccggtactatttaattaagtgagatttactcccacctctatagccgttagatcttaagcccatccatctaaccacacacaaaaagaggactatagtgtaagtgcataataaatatggacaagaatatttataattctctgattggataagaaatacgatttgattggcaacatatgttagagatagaggtatcaaaaaaattgagaaccaagtttatttttacataattcattgaaaatgttggttacctttttgtaaaaagctccataacatcatctacattgttcttttgtcaattataacttttgtttgtttcttatttatgcaattaactacattgttgacttataatttatgtttatttatgcaatttattatttatatatatatgttgatcctggcactgcagtgagcgtgactatatatagatcagtggtccacctaacctcaggtcaatgaataatgaatttcattagaaatttatacattaaaccaaaaaagaaaaagtcatttatacgtacatttcttattctaacatcatacaaagccatattatgctgagaacatgtacttcaatatacttacatatatgttaagtgtaacaacacaaacatttggtttcgtgtctggtttaatatttattgttaattaatattgtattatctatatgcgttcacactcatatgaggaaattttgtcgtcatggaccattcaatcatgacaattataggatggacaattataggatgtattccttattcgtgcatgcatgcagagatatatagacgttccaatagcgtttaaacttggtatatataatctgtataaactatatgtatgagaagtaattataagactcaaaagtcataacaaaattaagttctactctgcaacatctcattctctcttcttcagttacacttcctcggctgatttttattttcgagagatagagaattagagaccttatggcgnnnnnnnnnnnnnnnnnnnnnnnagtattgagttttctcgtaatagcctcactgtttcttggggcaacggtggctcctccagcaagtttgatctccacgcccgatcaggtaactaggaaaacctttattttgtttgtgtgtccgctaatcgatttttttttgttttgtatccgcgaatccaacttttaggctctctagcgtttataactaataaagttccagctttgaaaacagaaatcgattagaaaatgaaaaacttatggacaacaaatcaacaatgggaaatgatcaaaataatccccaactttctctaattagcagaaaagcttcaattnttttgtgttagcaaaacaaatatcaccattgttgaaatatgaacaagttatttaaccttatccatcagatctga

SEQ ID NO: 26916 - DNA, 1116 bp, Arabidopsis thaliana landsberg
gtccgatccttattactatcaaccctttttttgtttggtttacattaacattttccctttgttacaagctttgcaaagtgcaaacgtaaatgtcaaactagactaaagacatttttttggggtcaaaaacatgcattatatgagtttcaactgactaatttgactcgttatatgcatttttatttttctatcagtaacatgcattttttatcttttgctatcagtactacatgcactaagctacatgtcttgtcgtacgcggatttaaaagcgtcatgcgaacctgatttaatcatttaattgtacctaggtgattgtttcggagacgggatgggcatcaaaaggcgatgcagacgagcctggagcgtcggtaaagaacgcgagaacatataatcggaatcttaggaagcggctgcagaagaggaaaggaacaccgtacagaccagacatggtggtgagagcttacgtgtttgctcttttcaacgagaactcgaaaccaggtcccacttccgagagaaactttggcctttttaaacccgatggtactattgcctacgatattggcttaaccggactcaagtcctcttctgccacacggtatcgttttaagtcgtctcttgtttccgcttctgctttcacgtgtcttcttcttctttttcaccggttgttccacttgtgagatttgtgatttttttaattggtcctttgattatcaagttaacccgtaattcttgatttgcttgtgattagtcacttttaactttaaaatgttaatatacgagctcctaattactttgtgtaatgtcttcttgaaatgatattgtttagtgagttgaaatgttggatttttctacattattctctaaatatttcatcccaagtcaaaaacagttaaagaaaaagtttattacataagctgcatatgtgagtttttgatgggactcaatcacatgaaaacatcactagctacataactatttaaatgttgtgtgctcacataaattttgatcaagtatttgttctaactataaaattattttatttgttttggccattgtctccttggtatttatagctattcacccatgtatttttacgtgagccatggaaaatttt

SEQ ID NO: 26917 - DNA, 626 bp, Arabidopsis thaliana landsberg
  unsure (1)..(626): unsure at all n locations
cgagtaacctcgggtttccacttagtcttgatctcaatgtattctctaccaacttccatcttagtaatctatatctttccatgctaatccatcttgaggctatcattatctatgctaggatcacaagttttcatttagacaacaatgacacttgtaatagctgcaaatccaagagttgaaatgaagttagatatatggattagtagctcgtagcttttgggactcaacatgatataagttatgggcttgtactctttttcatctgtataataacacattccaggttagtttcagatgattgtttacttcatctgctcgtagaatggttctcacttaggtattttcagtcaccatctacaaaaggctgcccttattttagtgtggtctcaggggaaacgtcaaaatctaacagcaaagttcactgttttttacagatcattatatcacaagagagacatatccagaggctaaatgagctagtcaggagtcttcaattgcagttgctgcaatgcaagggagagaatgagacccaaaacgccaccaaaagctatcatataaataaacaattcatcgaggtcgaaaggaaacaaatcctggaaggctaaactctgcagcgacanaacatt

SEQ ID NO: 26918 - DNA, 886 bp, Arabidopsis thaliana landsberg
ctgccccgttcatattcagatacaaaaataactacttgcggatagatatccgagcaatcaagtcctgggctcggttaatcttggaagggctagtttatctccacgagcacgaccctcctgttatccatagagaccttaagtgtgataatatctttgtgaatgggcatcttggacaagtcaaaattggtgatcttggtcttgcaagaatgctgcgggactgccactcggcccatagcatcattggtatgtctcaaaaatcgtttgttttcacttcttgtccaaatcatatgcgtagacctctttgtgtttcttttgcataggcactcctgagttcatggcaccagaattatatgaggagaactataatgaactcattgacgtatattcctttggtatgtgctttttggagatgatcacctctgagttcccgtatagtgagtgcaaccatccggcacagatttacaagaaagttgttggggtatgtcttacaatctgtgagcatataaatgaagctgtcagatgaaccaggcatgagtcttctaatgttctcttttcagggaaagctaccaggagcattttacagagttggagacatcgaggcacagaggttcatcgggaaatgcctcgtgtctgcctcaaagagagtatcagcaaaagaactattgcaagatccatttcttgcctccgatgagtcctggatggtatacacgagcggtgctgggaatccaaagcccttcttgaacgagagtgaaatggacacactgaagttggaagatgatgagttaaggaccgagatgtccatcgctgggaagctgggccctgaagataacaaaatcgatctggaagtacaaatcgcataaaataatggtaaatgggactaaattga

SEQ ID NO: 26919 - DNA, 1180 bp, Arabidopsis thaliana landsberg
tttttctataaatacagaattcagacaaatcatattttaaatagttatgatttttgtatggtatctaatctaactataatgtcggcaaaattgacaaatatttgatttttgccctctcttaagcttaatattattacacgtgtggccgcgtaatcaaatctggtaataatgactaacgaacgtttctaagctaaataaaacgtacggttcccgaatcgcccttacctacttttatttcattttttcagcttctgcctattatattgttgcgattgaccccgaaagttttttaagttgagactaaggtcaaataattttttaactataaataaatattgcaagaaaattaatttatgctgtatatatagaaaaaaatcagcctctcataaataaccgaaattttgaaaaaagtagacatatctaccccacaaaaaaaaatcatcataaatccggatgaattgatgactaccttatctgtttttgaacttttatactagtggagtatttaaatttatatagtatttaaatatcaaaatgctaaaaaagaaaataaataaatgctgaacaaatccattgttgaatttgaggaatcccattaatgtagggaagaagtacttgtagtacccaatacttttacttttactttttgtagtgggcaaattttatattgttaatttattaataacacaccctaataagtaacaactaattttggcatctttcttctagatgtaaccaaattttgtattattaataacttacactaacaaatttatattcccccttttctatacacccaaattttgtattattggtatattcctaaattgactaattaaacataaacagaagaaaatcttggaaaaaatcaaacgatttggtacttactacataaataatagtgtagtgccaaattaacagggctaaaatggtaattagtcactgccttcttcgtcttccttattagctccctcatcttctccaaacacaaaaaactgccccacacgaattacacacacacaactttattatctgtacacgtatatttgtgtgtatatatatatacatactcatccacaaaaactcgactgattgatttctccatgaacaacgtcctcctttgatttcacctttttttgttgacttcttctttcccaaatcaatcatgatatcttatatc

SEQ ID NO: 26920 - DNA, 1545 bp, Arabidopsis thaliana landsberg
ttggcttaaaaattaatagaaaatggtttggggaaaaaaaaaattcttatcaaagattggtcattaccccattaaatgtgattaaaacaacaataacaggttgtgagtctcgaaatgtgtggaatgtaatgaatcaacttgcaactcgttggtctcaaatttctttgggaaattgagaatggcctgaatacctttcgtagttcctgaaaagaaaacacaagatccaggaccatcagcagcaggagaaaacatacaaatgaatcatttcttttggtgatcaaatcaatttacaaaagtttaagaacctttctatggattcttctaaatggaaattaacgactgtagatttccagtcctcatacttagcctcctccatcttcttgtgtcttttgtaacatgaagactgaagaagcaaatcacatgtagtgtgaatcagaaatagtcacaagtttgagacgtatgtacatttgataaatcacaaagaatgattctaaacagatgggaagaggtcggttgccatgaaagtacctcatcaccagatgaatatccaccatcctctagtctcctctttccaggtaacacatcaagcaagtctgaggaaatttttgcccataatcacttattgaattgaagataagccttcattgaattgaactaaagcaggacatatgtatagactagtagttaatataagacaagaagaatgactttgtcgagagagaactgaataaccatacctctgtttcctttaacgtcttttgcatctttcttttccttagagatcccaacacagtcaaaacaaagatctgtcatggaggtcgagacctgtttgtagttcctagtcagtactttggatatctagtcacatattatataaatcattctctgaatgaaacaacaaagtcacttacacaagagaattcagactctgatgtaccacaaacctcaatcaacctaggcttatctaccttaagctgcaaaataataacaaatccaaaaactcagaaacgtcaagcatacatccctgaaaaaggaaagagagttaaagtattaccttctgcttcttagcacacaaatagaaagcagcagctgtaaatacaggtctagtaaaatcagcattagcccgtctcgacgctggtagtgacgcaagaaacctctccttatacctaaagagcaacaaacaccgaaacaaacaagactttaaggcattttaacaaacatatggtatgcaaatcttcaaagtacacaatagaagagggcttacgaggataacacattttgcacggatttgattaccctaacacagccaaattgaaccgccaattctcttacattaagcttaatcctgaaaatgcacaattaatcacacatcaatcatgattaactccaacaaccaacagattcattaaacaagtaaagaagaaggacttgaaaaggaaactcacttgatcccaataacgttttggagactattgaatgatctagaataagccttttccgacataccactcaatttaaccgctgcttgcctatcgaatataatct

SEQ ID NO: 26921 - DNA, 3034 bp, Arabidopsis thaliana landsberg
ttttattaatgcaacttgatgatgatgatatgatcactaatatattctcggcagatgatcgatctataagtgattacaatctttttggagatgtcatttactttgacacaatttataagaccaatgaatatttgttttttgaatctaatgttaaattatattcaaaagaaaaataaacgtttatactttatacatacaaatgtaaacttgttttaaaaattcaaagaactctatggtgttcttcttgatccaaaccaagtttgaatcccattcacatacttctcttcacctcctcttcttattgtgctcaaacggtttcttatgttcttgtctattaacttgataagcctctccgcatttgaaggttcctcgccatgtcttctctcattcctttccctccacatcgagtgaattgagttctgcagtacataacaaggaataaagctctttgtagtgtcgaaatcctttcttgcaagcatcaacataatgtcttgccatctttccgagtatttgttctgtagcagcccacgaactaggccattccatactttcctcgagtaatcacattgaaagaatagatgctcccttgtttctatcggatgtttgcaaaaaatacagctagtgtctgcattttgcttccattttcccattctctcccctgttgctatcctgatcctgaccatcaaccaagtaagaaaagcatattttggagttgagtttgagaaccaaatctccttgtacccctgcatctccggtagtgcgtttctaatctgagcccacgtttctttggagaggaacttcgaatgaaaaaaatctttttcccccttccacaatgcaataatcgttctctgtttcaattcggctctgtttctgtttttgtagttcactttcaacaatgtttaaaagtggttgcctatgccttcttctcttggctttcatcattgctgcacttaatgtactatctttcaggatccccatatcaatgcaacctatatctccgagtttctcatttagacagcctaaagaggaccaagagtcatacgagaatgaagttgtctcaccgtttcttacatccaccttatagaacctctttgctttttctcgatacttcagcaactttttccaaatccacgaccctctcgaacttgtttcttttactgcctagaaggagccatccctaatcaaatacctttgctccatttgatagaccctttgctccagttgtcggggtcaatcatcacaagtaaacagttgtgtttggtgctgctctcttatatgatgaaaccaatgagtcatataagtggcttttcgagactttacttggagcaatgtctggaaaacaaccaaaaacaattcttacagaccaatgtatagcaatggagaatgcaatagtaaaggtattccctgatacaaaacatagattatgtgtttggcatatttaccaaaatgctgcgaagaaattgagtcatgtatttcatggagcagaacaatttgccatggattttggtaagtgtgtatatgaccatgaggaagaagaagattgggtattggcatggagtaatatgctcgagaagcataacttgacataggataaatggttgaagaatttgtttgagctgagagaaaaatgggcaatggtatatggacgtcatacttttacagcagatatggtgagaacacatcgtagggaaagtatgaataatattttgaagcataattataacttgttgtgcttctttgaacactacgagagggtgttggaggatcaacgttataaggaattagttgttgatttcaatatgatgcatacctctccggtattatgtgctactgtagagatgttgcaacatgcagaggaagtgtatacacacaaaagttttagcttgttccagaaacaatacatagttattggtgattatgttgtcaacaaggttagtaagtttgagatggtatataaatataaagtatcttatcgtggtgttgcatgtgagcatttggttaattatgatgctgtaaacgagtcgatatgttatagttgcatgaagtttagttttgcctgtattttatgtcttcatgcattgaaaatgttggacaagaagaatgttagaagaatcccatctacctacattctaaatcgatggagtaaagaggcaaaagcacgaaaaatagtttcttatcatttagagccacctaatgaaacattcaagcaatcgattggaaagcgatatagccatatatgtcatactttccatgagattgcatctgttgctgctgatcatatagaattgacgttgtgtgcaaatgaagatgccattaagttgctcaaaaaattggaggaaaaaaaggagcatttaaaatctgatgcatggatgctccaaactttagatattgaacttgtggaagaagaagaagaagacaaggatgtttcaaatgcatgtgggggtaaaaagaaaagctcctgttggacgaccaaaaaacaaaaaagtcggacaccatggacgttatatgagtgttcttgaaacaaaaaaattggcgtacctcaaaacaatcaagtaatgcaacaacaaagaaaaaattattatttcaggtatttgatataatatattcatattagttatgtccaattttcatcgaaatgtgacttaatctatttatactaactcttatttaaaattgctaaatacttcaggactctacccaattataagtcgttaccaccaacctaaccttacaaattggatcattttttctacaagtgttccaagtaaatacttaaattcttactatttatatttgaattatttgttattattttaataattttatatttaaaataaaccaggaatttgaccaaaaatatggtggttcatcataaagttctgttatcttgctttttttttttgttcccaaaatattatgctagattgattttctttcttcttttgtagaacacaaaatcacattcatattatgcttttgatgagccattattttattaaggtttcatgtaataattttttagtaactgaaatag

SEQ ID NO: 26922 - DNA, 1265 bp, Arabidopsis thaliana landsberg
atgccaataaccctcctctaaagatgaaccaactagaaccttatctaacccggtagctaatcatttctcaaccatcaatcctcgactatgagcacgaaagcacagaaaaccaaaaagctactttctcaagcataattcgatacaacattgacacaactaaaaccaatcatcaaaccctcacaccaacaaacattaagatcaatctcgcttaaagtacgccgcttatgaaaattcacactttgtatcaccaatcacagtctctataatttttccattacttacagagaatgtcataacaaaaaagaatcaactagaaccttatcaaactctctaactaatcatttcaaaaccatcaatcatcgcgtacgagcacgaaagcacgtaaaacccgaaaactaaagctattttgacctcaagcaaagccaatgaaattcacactatatatcaccaatcagagcctataattttccattactacttagaatgtcacaacaaaaaaagaatcaagtaaaaccttatcaaactctctagctaatcatttctcaaccatcaatcatcgcgtacgagcacgcacgttagaacgtaaaaacccgaaaactaaagctattctgacctcaagcaaagcctatgaaatttacactttatatcaccagcctataattttccattactactaagaatgtcagaacaaaaaagaatcaactataaccttttcaaactctctaactaatcatttcaaaaccatcaatcatcgcgtacgagcacgcacgaaagcacgtcaaaaccggaaaactaaagctactctgacctcaagcaaagcctatgaaattcacactttatatcaccaatcagagcctataagtttccattgaataactacaactttatcaactataacgttatcaaactctttaaacagttcttaaacacaatttcgagatatgaacgaaaacaaaactaatgaattttgactcacggcgaaagtagtagcggttgcgcagattacaaaagccgcgaggacttcccaaggccttgagtccggcttctgctgcggtggtggaggattccatttcttatctttatcatcttcgcctcccattttctctctgcttcgttttctacgaattacgataatcgataagaggatctttggggttgtaacaacatcgtcagagaatttcgattgcttgactagttactgcactactttgaagatcaaattggattttgattcttattttcaggatgctacggctcagttcaga

SEQ ID NO: 26923 - DNA, 1449 bp, Arabidopsis thaliana landsberg
tgcggtatgtagtctcttccgaaatcgaacctaaagctgcgaaagagttcatcaatcacacctttgtctcgaggttacttgatttgtttgactctgaggatcctagggagagggagtatttgaaaactgttcttcatagaatctatggcaagtttatatttcaccgaccgtttatcagatgttcgatttataacattttctacaagttcttgtatgagactgaaaggtgtattggcattggagagttattggagatcttaggaagtgtgatcaatggttttacagtacctatgagagaggagcataggctgtatcttgtgaaagctattttgccactacacaagtctaaagctatctcgctttaccaccagcagttggcgtaaagcgtgacacagtttgttgagaaagattataagttggctgatactgtgatcctcgggttgttgaagttttggccgcttaccaattgtcaaaaggaggttctcttcttgggagagttggaagaagtcttggatgctacagagccctctgagtttcagcaatgtgttgttcctctgtttacacagattgggaaatgtcttaatagtgcacacttccaggttcgttatttcaaaacctaagtgaatacattgttttggcttatatagtgtaattgttgataagagatggtgaggagtgcaggtggcagagagagcgctcttcttgtggaacaatgaacatatcgtagggctgatagctcagaacaaagacgtgatctttccgataatctttgaagcgttggagaggaacatgaaaggacattggaaccaagcggtgcatggtctctctgagaacgttagaagaatgtttctggagatggacactgagctctttgaggagtgcgagaaacaatatctcgagaacgaagctaaggcatgcgagttgttggaacaaagagaattgacatggaagagactttgagaagctgcttctctagctgctaactaattctcattgatgacttttttttagctatatctttcttttcaaaagtaatgttttttagaaactctctaataattgaataattcgattgttctttctatatggtctagtgtaaacggagacacggaaatattactccacacgtccctcacgagatcatgtgatagaagataaatttagtgctgttcattgcatctaatgcaaaacatggtaggaatttagtgtttacaagcttacaacaattttacattttctttgatgatgagttgacgacaaaaccgaaatcattaacaaagataaacatataacgttaatcgcggccgagacggtgcgtcgcttctgaatatcatatggaatacattgttgtcgtcagcagcagctgctacctctcgttgcaccgcccataccacacaaattattgatccatagaaaaaggaatcatctttcaaagcacaggtgtgtgtg

SEQ ID NO: 26924 - DNA, 1598 bp, Arabidopsis thaliana landsberg
gacttaccttgtctaagggatgtcggctctgatcacccgatttactttccgatttatgtgatttaaaagattttcatattaacttaccacattttcatgcacacattatgaacatcgttgattgctcttgtttctacgtatcatgtaattgatttcgttacttaattataggagatttatctgaagttgactggcccaaggtaaaaagttaacttatgcttattcgagtcttaagttaactttttctcgtcaggctgaacttgttcgggtaacttttttttaaaagattttgttttaacgattttcccaaaatctaaaagaagataaattattaagggagagaattggcaatggagcgcctgagaataagtttttgaatcaacagtcgcggcaaaaggtagatcgaagcagatctctcgccggaaaacgtcacattgaggtatctatcgccgccaatggtgaaggcactgcaaggcgcggctcagaatctaccggcggatgtcaaccaattgatcgatcagttagagcgtcactgtttggctcccgatggatctcttgttaccaaatctgtctactccgatctccaactcgtaatctctctttcagattttgtgtccacaatcccctgattctctttaagagcctcaaatgttattgtatcgacattgcaggcgagagaggagatgtctcgggagagacttcggtatttggaagctatggtaacacttttatctcttcttccatttttggggtttattttaatttcaggattttcttcattcacttattgaagttgaagctgattagttcaaattagggtttgattcaatctaaggactcacattattagtttttacaattgttaggctatttattgtgaagctgtagctatggttgaagaatatcagcaagctatttcagtagctaaccatgggggaattcgtgatgttcaaggtctataccctcaacttggcttgaagaattctcctcaggtttctaatctcaaaaacgtgattttttttctggaattatttgttatctcgagactcatttatgagcataattgttgattttttttaggtttatgagactctagagcataggttggtggttgctgaggcggctcagaaactgaggctacctcttatttcagatggtggtgaaattcatgaggaagagattgaaaagtggagtatactttcaagaagctctcttgatagtgcaagcacgagttttacgattagctccacttctaactccgtgaactatgcgaatagctctgcaaatagtgttgctggtgggattagtcttagtgctgttgatactgacgtagtaggtggtgttccgaatcgatttcttggaataacacctgcttacttatcctatgttcagcttcaaaatactatttccatggtaatgtgagatcatactgtgcctacttttggtgtcttcataactatgttgttccttcatctgctgattgcgaaatatttttgcaccaattcttatgaaagattgaggttatgaatatctttgagtatctaattttttcttttaaataactttgcttaggacatggctgactaccaaatgtttct

SEQ ID NO: 26925 - DNA, 1159 bp, Arabidopsis thaliana landsberg
gcttgttgctggtctcctgaagagaaactcctgatttatgattacataccaaatggtttccttggttctgcaattcaaggtaattttagtgtcaaaatcgcataaatctatgaccatagttaagattcaagactgattcataaaaatttatgacaggtagacctggtagcgtgtcatgcaagcaactaacctggacggtccggttaaaaatattgagaggaatagcaaaaggattaacttatattcatgagcttagtcccaaaaggtatgtccatggacatataaacacaagcaacatactactaggaccgaatcttgaaccgaaagtatccggtttcggtctaggtcgtatcgtcgacacgtcttgggatatcacatcagaccaaatctctcccatggagacaagctcaccaatcctctctagagaatcatattaccaagctcctgaagcagcttcaaaaatgactaaaccgtctcagaaatgggatgtgtattcattcggtttagtgatactcgaaatggtaaccggaaaatctccggttagttcagaaatggatttggttatgtgggttgaatcggctagtgagagaaataaaccggcttggtatgttcttgatccggttttagctcgtgatagagatttggaagatagtatggttcaagtcatcaagatcggtttagcttgtgtgcagaagaacccagataaaagaccacacatgagaagtgtattggagagcttcgagaaattggtaacttctatttaattattattaattaatgaaaagtaataattttaattagattatgtgtttacttcataattttcagattacttcataaatttcatgtgataatttttatggtttttctgttaatcattcgtaattgtgatattattatgaaaaataaaaggacacaagggaggatatttttattgaacttatataattaacaaaactgttaatacagtacaaaattaacataatgctttaaaaatcttttacccaaacccgacccggaattatgaaccggagctttttctcataggtcaaatctctctttgatgtcatcgaaactgtacccgccgccaactccaaatcagtatccaaacccgaacccgataccacaaccaataccgaatccaagaaccacgttagaa

SEQ ID NO: 26926 - DNA, 1927 bp, Arabidopsis thaliana landsberg
gggaggcgcggacagagctaattacgctgtttcttttcttccaccaaaaaaaaaacataaatgataaacgtataaaagtttttgttgtcttttttggaaaatgaaaaagcttaatttggggattagggttggttgagaagtggggaaaaatgggcggaaattcaggaaaaagatcgtgcgatggagacaatcatccaaaaatacactttctactacttctctttgtccttgtccttgttgtggtgatcgtgtgcaataaaaaccttgaaaccttccatgcctgtcatctcattttttttctaaaaaattaattaaactatcccaaacaaaaattaacttttaaatttaaattaccttaaattaatcatatataaataagcttaccccaccactttcttcttcttggaatggagggaataatcatccttttttactattcaacagttttcggaaacaaattcaaaaaaaaaaaaacagttttcgaaaatctatagaatgtattaattagagaatgataaataacaaccttaataagatcatcaaacttaaaaatacgggatatttatgctaatccttttttataaaaaatatggtacaatttataaaattgtcactcagatttgatttagattgattaggtatgggagggatgaaataattaataaagttagtattaaagacatgaggcattcatagattcgtgagttcaaatataaattaagagagagtattatttactgcaaaataaataaattaggaagctgaaatccaaagtaagttgacttttaataaactgacaattcccagactatgagagaagtagaagaacaacataaaagtgtgagaaactaataaatatttctattattaagaaactatacatccttatcgatgatattatagacaaaaggtttaagaatgttacattcttttctgattcaatatcatgaaccgatttttaaacgtttttagaccgtgcttccattattttctacgctgttcaagaatgtaaccttgtaaattatagttttagaaaaatatataacccatgtaaactatattaccaataaaactggtctctatttccaaaattccaagtgtcactaaaatggaagaacaaaatgtctaaattgtgattctgtgacaaaataaatttaacagaaatctcatgcatttcgtttcagaagctacgaaagagcaacaacaagtttctgagtctggtaaataaaaagggagaatgaatccgagatccttttttaaccttagagagaaagccggtttaaagcttttaccagagagaagaaattcggctactaaagaagcctccttttttcttcatcctgttttcaataactgggaagtcgatgcagttgtaggcaaggtctagaacaatcggattacgcggtatagattgtaatgccggtgggaaccgttcaatctttggggctgttttcgtgtttgaatccccaaccgcagattcatacacatccagtttgtctaacaggtacttctcctccacctggtttaacatataataataatttataaaaatatccgttagagtgcagtctgtttgattatcagacactggaaaacttcttatgctatttgatatttaatacatctgatgtgcagaataaagcatatgatcagaaattacttggctaatcacattggggatttttatcaacaagtttcaaacaccaagagtatttagatggtcgaagaaataatctaggcataataaataaggtgaaaatcaatgtttctaccatcaaccactattcaacaaggcaagatagtgagattgtacctgcgcagctgtattgtttagtgatatagatgacattctattcgacagattctttggagccctctcttcctccataatcccggtcgcatgctctatgcaactgttagctctgca

SEQ ID NO: 26927 - DNA, 1330 bp, Arabidopsis thaliana landsberg
gcgatgataataaaaaagagagagaagtatgctcgaagaaaagatgccattttccatgcccttgaattggaaaaggaaatgctgaaaagagaagggaaactagtccctgaaaaggctagagatgactctcttgatgcaaccaaggagagaatggctatagttagggttcaggatacctctaatgggacacgggaatccacagattatctaaggaccaaccatgttggtgatgttatgcatttgctgagagataaagaggaagatcaaccaagttgtgaggatgaggctgtgcctcgaatgagaggcttgcaggactttggacttagaaccgcctcttcaaagcgaaagatttcatgttccaatggtcctgatacttcctttaagtatcttgccagaagcaattcttcagcttcttccagtggggatcatagcatggagaggcccatttataccctcggtaagatgtacttttaaacttccaagtttttgttcctagatggttggatacttaaggcttctggctctttttgacatgaaattcatatgcatttttggctctgtttcaggaaaggagaaaactaagagtagggcggaggctaaaaggactaaatatatgtttacaccaagtgaatctaatgatgtttcagacctacatgagaatttgctaagccacagggacgcaatgcattcctcctttgccggtggtgatactcgttattcagattatgaccctcctaattttttggaagatatggaatcagattattctgaatctgaaactgattcttctgatgtggaggaggatactgatgatgacattcccttgctgtcaggtaaagtatttctggacagctaaaagctagtttttcttatcatctaaatgttttctacttttgcgaaaattggttttcagttgtgtcaacactatattcatatctgattcttctttgactggaatttgtatcatgcctctgcactaaaaccaattaatgtttttgattacgtagaccacaattttctatgtgtcgcataggtattagttattccctaactagagtttgaaatttctcctttcaggagctgggcgtcattccgagcgacgcaatacttttagtagacatacgtcaggagaagatgaaagtacaagcagtgaggaagatcattatgagtcatctatttctggcgactcttcctacctttattcccaaaatcctaataatgaggctagtacggtttccaactggcagcacaagggaaaaagaaacttccggactcttccaagaagatctgcacggtagagaaaaatgcaccgtaatcgtctagaagatgg

SEQ ID NO: 26928 - DNA, 954 bp, Arabidopsis thaliana landsberg
atccccattatataaaaatgaacaccacaatgtaaatgttggtagtttctcagtatcatgagcatgaggtgacctcgtgtcacactcgggtttcggggcaccaagacccgggcacgaacataatcaccaggtgtgctgggactaagtctcacacatatgatgaatcatggtacagaaacgaatgacacatctttcatatataataagagttctgtaaaaaataaataaataattacatcgaaaggagacaacgatccagcaacccaaagttgactgggagacgatggtctagacctctcacgaactcgtcacaacatcctccacgcgcctcatctgcagtacctgttcttgacctgtggggtgtgagacagtaagagtgagctcacatacgttcatcgctcaacaagttgtggggaataatgtgcatgaactcaccaaaggtgggagctcatgtgaagtgtaaggcttaccaaagaggatggctaaagctgagcattgcctttaaagttggtcaaaattttattagcagttactaggtataagtagataccaacccaattaaataagagatcaatattaataacaacacccgtgatgcaatgcatatgacaaattgagtttagttccataaattaatcatgtgagtgtctgaaccgctcatgatcgtgagcacagctgatataccagttttacactctacagaggttgcacatctttacccacaagtcgtgttacccattttccacagagttgatcagaccccatacatctctaccaaggaagtgaggcagggtaccactacgaggcatttacaaagttccactagcttcagaaaaccactacagtttctaggaagcccaatgcagggatccccgtctgaccgccattgcagcaaaattagccaagaacctcctacatgacactccctactgccttgccctttcgggtaatgta

SEQ ID NO: 26929 - DNA, 998 bp, Arabidopsis thaliana landsberg
caatccgtctacgccacattatctaacctgagatgttagatatgcggaacatccgctagagaaatgggacatagggtttcatctccaaaaaaagatgcaagaactgatttcaacaccagaccagcgagtaaacagatgcaagagctgattaaaggagctgtagaagataacaaaggagaggcatgtagtgatgatgtacaagataacaaaggagaagcatataatgatgatgaagaagatcctgaactccctcctggctttggctaaaactgttttttgtatcatcaataaactccctctgaaatattattgcgtttaaggtaataacactaactgtttgtaataacaacagaattactgcacattaatttcccaaagtaatagtgatccccagattaaccgatttattttttaattaaaaatgataaaatttaaaggttgttgaaaggtcagaaataaaaagccgcaaaaactgaagaagcaagataatggcatcaattctcaggtcagtggcaacgacttcagccgtcgtagccgccgcctctgcgattcccatcgcgatcgccttctcttcttcttcttcttcttcctctaccaaccccaaatctcaatctctcaatttctccttcctctcccgatcgtctccacgtctcttgggactttcacgaagcttcgttagctctccgatggcgactgctctcacttctgatcgtaatctccatcaggttttggtttaaagctttgaacttttgaaataccctatttccaatttgagctttttcgctttcctgattcgatgattaagtatttaagtagctgaatttgatttgcaggaggatcgagccatgcctcagcttcttgtaagtctttctcgtaatcctgtatctttatacaacaatttttggatttgagctagtgagaacttgtgttgtgtgttccagactgagtttatggtggatatgacatgtgagggttgtgttaatgctgtgaagaacaaa

SEQ ID NO: 26930 - DNA, 1721 bp, Arabidopsis thaliana landsberg
  unsure (1)..(1721): unsure at all n locations
ggaaataaaccccccattttggcccacaaaggccgccttaaaatggcgggcaacactctacttctttctcctttttccattaatctatctttagatatttggacattttgtattcgtcttgctcttggctttttattttatcgatatgcattctacaactatctgaatattcaacgtttgattattcgctaaaacttaaataattaattttatattcgatttattccataagaaattgatcacataatgtgactgtcactgctaatgcttctctcttaatatcatcaaaagtatgtaattgatgagaaatgaaaacaaaatggtagaaaatgagaagctcgaagaaacagaaatgtggatgaaaaactgtattgctcttacagattactctttgctaaagcagtatagctgaaacatttattttgtattactttatttggctaaaaataaaataaatttggacataaattatttcaattattttagattacgctaacaaaacaatctagtcacactaactcacgatcaaatccaaaagcattagcaccatttcttattttcttaaaaaatatatattttatctaatcatatttacctattttggttttggacgtcaaaagtattccgaaaacaaactcatatttagtttctaaagacttttttaatcgttttcttgtgggatatatagaagcaacgcaagagaaatggtcaaaaatacggattatttactatacatatgcaggaatctagtttagttattttctaatggttgaataatttacactacatacagttgtcgacagttcaacgtaaccaacattttttacaacgaacaaatccaaccgcttaattaaaagattctataaatcttacccaattttttctataatattattcatatctattctatagagttggaaatagtgtcatagattatatgttaatttagagtgaagcatcgtgcgtggttgaaaatgatctagttcacatcgtgtgttataagagtgaaacannnnnnnnnnnnnnnnnnnnnnnnnnntagattttgtatatctcaattatcaagttacacggattttctaagacaatttatttcatatacagcatgttcttatcaaaataaaattaaaatatatatacaccatgtttttacacacatagactgaagaatcaaataatactaaaagttgacgatcgagatacacagtggcgggcgcacaccgcttagagttgcacgcattgcgattggacagacaacctaaattggctgtacaatcagaatttttgtgcagcttttacgatttatatcttcttttttttgtcaactatcatctacatataataattatatatttctaggataagatacgaactttcgtcgtcaccttcgatgaacaaatattataggttgatcaaaagcataaacttaacgagcagccatgtttgagaagtcgtaattggaatgttgtcattaatagcttgaaagaaacatgtaagtaacgcagtgagttcatgtttattcttgtcgaattccttattgagtctttacaaaagaaatgtcatggtggacctttttggaaaacaaggtgggtacatttgcctatatttttaaatcaaagcagaatatttatcgaaagacaaagtataaacaagtggtattgtgtgaactaatgcaagttgaacagtgactataggtaaagacaattcgaatccgattcatt

SEQ ID NO: 26931 - DNA, 1498 bp, Arabidopsis thaliana landsberg
gcttctttagctaaatgaattctatgggagtgttttagtactagtatctacggtttttcttacgttggtagttgatgatatatgtgtgaatgcatatcaaattgcccacaacataaaaaaatgaatttatggttaaaaatgacttctgaaccgttggttggttacataatccattaatagaaccaaaaataaggacaatgcatttaatatattattcgaatacaattcttcgcttacttaaaaacatacatatagttgactacgatttattccactcagacaatacgaccctcctatatttaagttttattttctcacatattttgaaaaacaccaaaatatatttttgttctctttaatttccttcaaaaagctaagtgtataactcaaaaaaataaaaaagtcaaaagtcaaatttgtgttttttacaaatgataaaaattctaaatctcttacctccaccctaaaccaaagtatttttagttttccaaacacaagttataaaggagttaagaatggtaaattactaattagtgaagaatatataaaaaagggtgggtgggtgaccggcaggtgggagagtggccgttaaagggaggcagagatttacagcctgtttttgtttttttttataatatcagaaaattaaagtggtaacgatcagccttccgatctatccttgtcgttttgcgccacgtgagcaactgtctctttttggcctatctttttctttttgttttgctttttttcttctttgctttttagagtatttcatttttgagatcggcaaacataataatgataacaatttttcaaataaataaaaaaaatactaataatggtatacaggctggcttcctcagtcaaaaagtcaccgaatcgaaccaaaacctcatacctaaccgttaacttcatccttatcttcttcttcttgttttccttatttctttttgttggtgctcttttttcatttttctattatatcatacattcttttaccatattacttcaattattgttggtttaccttcataagtttaatatgttttagtgcatacgatatcaactgttttgcgcaaagggttgagtttttatataaactaaacgaaaacaaaatttggagggtactgaaattgttcatttttcattatcttggtgtaaataatctatgaatctcatgtgtatatgcaaagtcatatgaagtgaacttggtttagatatttgttgtattttcaattttcatttttaattatatcatacattcttttacaataatcttcaattattgtttacatccctaattttaatgcataagatataaattgttttgagcattagggtttagtttttttataaactatatgaaaacaaaatttagagggtatttaagttattcattttcattattttgtgtaattaatctatgaacttcgtgtgtatatatgcaaagttgcatgaagtggaacttggtttagatatctatgaatatctagatatt

SEQ ID NO: 26932 - DNA, 1585 bp, Arabidopsis thaliana landsberg
tcaattttatttagatctgtagatttcttcttctattttttataccgtcattctgtttattaccaatcagaacaattttataacatagtttttatatatgttaagttagcataagattctcttatgtttcattcttttgccgattgacatgtcttaagatatcatgcctacgcttgtaccagttcaggttttgtttcacatctttgcgcttttaattaatataactatgtcacttaaatttggtgtgatttggcaaggtcgccatgctttcgatttctctttacttgcttgtctttctcacatttcttcttcctcttttcataatttactcttgtgggtgttatcagttatgtatatattatagttaacttagtaaatttttatgaaatgtatttttgataattttcttataggattataggatatagatctaatatagatcttagctaatacatctaatttataaaaaaaacaggagtcctatttgaatccaccgattacacatggtaaaaaggctccggttttaaagcactacatataataaataatatatgaactgatatgtacatttatgtgtcggatttcttacgttatatagaatcatatattctaatattttatgtatgatatgatccacaggcagacaaatcaacaattgtagatgaagcagtgagttccatcaaatcccttgaacaaactttgcaaaaacttgaaatgcaaaagctcgagaagcttcagtattcttctgcttcaacaaacacaactcctactacaacttttgtttatgatccatcatcatcctcttctccaacagctctcctcacaccaatatcaaaccatcccataggcgccaccgcaacagattcttaccctcgcgcagctttcttggccgatcaggtatcttcttccagtgccgctgctgcgaacctgccttacccttgtaatgatccgatcgtgaatttcgatacttggtcctcacgtaacgtggtgctgactatctgtgggaatgaagctttcttcaatttgtgtgtccctaaacacaaaccaggggttttcacttctgtttgttacttgtttgagaagtacaacatggaggttttgtttgctaatgtctcctctaatgttttctggagcacctacgtgatccaagcacaggtatcttatacacataaccatttttatcatatgatatgtggtgacatctattatttaccatggttctttttttttatgtgatgaaacaggtaaatccgagttgtgagaatcagttactgggaaatggtcttggagttgtagacgttttcaagcaagtttctcaagaactggtgttatatttttcatctctataaatcataactggctgcttcggtttgagttttaagtattttcagggtttgttttctttgcgaagtctcaaggcttatccagagagattagcttggacttttcactttaaaccccatcattagaaggaaagaaagaaaaaaaaaggaattcgagaatattatattagcttcttcggacattgttttttttcgaaattataattttaatcttctcttatcaatggatttgccaaaattgt

SEQ ID NO: 26933 - DNA, 607 bp, Arabidopsis thaliana landsberg
ttttttttgtcgtcttttgccatgaagcacttgtggccgacattggggaagaggaggcccttgttgatggcgatgttagcggcatcctcgttggaggaggagtcggtggagctcttatcggagtcccattcttgacatatgtgggcatcgcgcccttcttcttgtagtatctcttcttctcctttttcttccccctcttgtcgtcgcccctatcactatcactagacataggacatttagcaatgaaatgaccgggcttaccacatttgtagcacacccttttggagcggggtttgtagtctttcccccttcgttgcttgaggatttggcgaaacgttttgatgattaaggccatttcctcattgtcgagcttggaggcgtcaattggttgtctactcggtgtagactcctccttcttctcctctgttgccttaaatgccactggttgcgcttcggacgtggagggttcgtcaagctcgttgatcttctttgagcctttaatcatacattcaaagctcacaaaattcccgattacttcctcgggagtcattagtgtataccttggattaccacgaattaattgtacttgagtagggttaaggaaaat

SEQ ID NO: 26934 - DNA, 1113 bp, Arabidopsis thaliana landsberg
gcgtccacttataaattgataatcaggaaatgccatcaagatcagctaaagcataaaactttaccttaagagactagcctacgcagagatattttagactatcgtagctaggagaatcaaagtagccttgtaactatgatacagcaaacgagaacagttttgcttcaagacactatgagattccatatttcaagaactaactaccagttgacttgtactaacttccatggcataaaagatgtttctttacatctcaaatcaccaaaatatcaaatgatgactatgcaaattgataactatatactaaaaatagcgttagctcaagttcacagaactcgcttggtgttgcaaaattacgctcgaattgagaagaatcaacagttgaatgcttcaaaaacccctatacaagctaaacgaatcatgaaaattattaacctaaggactcaaaatcctgggtacgaagaccaagctaagaatctctcgatcaaaatcgaatcgaagcaaagtttcaatagaggggaacggaactcactcgccaggagaagacatgttcgtcgattttcgaaaatccgaggttctgagtccgattcaagattcgagatccgatataagctttgagagcaccgcaaaacagaagctcgaaagttccagaattttttttccttctaatcatctgaaaactcaaatcacttgtttttgttaggcagctgcgtaagttatccaatcataccttgccacgtcgtgttaattcaccgtcttgaatacgtggcacgttttaatttgtaatcgtgtttaaacttgtgggatcaatttctcttctttgtgatgcgtctctactctctagtagtctgtctctatgatgatccccagttggccagtttattgaattgggccaaagaggcttttatttgacccattaatagataggctcgaattagatatgtttataaatgttttttttctttgccaaaaaaaataatgtaagaatatgaaccctaacaaattaacaagaaaagacaatgcaaaggaaatctactctcaaggaatatcataattagagaaacattagcattaaagcaatgatctttcgcaagtatggtcggaaccaaagat

SEQ ID NO: 26935 - DNA, 1639 bp, Arabidopsis thaliana landsberg
atcaagctcaacgtgtataaactgaaattccccaactggacgaccaaattgttctctctggcgaatatagggaagtacattgtcgaggcatgcctgcatgatccctaagggcccagctgctaaaacaagtctctccaaatccagacctgacatcagaacatacactcctgcacgtacaaacactatgtacatcagacaagtatagagatggggatagtagcctcgactcaagaaatatacaaggcgtgtatgtagcacaacattaccattttgatctcagatattagatcctcataaaactagaaaagccagaccatgcaatgcaaattatctatcaaactagagattaagagagtttcagcaatcaaaaccttttccttccttgtctagaatattttcctctggaacgaagcaattctcaaaaacaagctcacacctgctcaggagagacagatgttagagagaaagagacagtgaaaaagggatttaatttacacagatatttttatcttgagagaatggggattacgtatcgcttccccgcattcctagtttgtccaatttctgagcagtactgaatctgcaaagcaaccacaacaataaatggttttaaggaactcactctctgaatttgttccattagttctttactaaagatcatagaaagtcagtttcaacaagattgagaattcacatacccggtcattcctttctctatgatgaaagccgtgattcctttggaacctgcttttgtatcagttttcgcgtaaacaacctgatcaaaccaaaaaaacaacaaatggtagaaaactgttaaaattatagaaaatcagtttcagaagttaacatatgagctaaactatattaccagtgtttcagcagatggaccattagtgcaccacatcttgttgccatttagtatataaccaccatctaccttctcagccttgcatttcatgccaacaacatctgaaccagctgtaacgaaataaaaagtcaaatcagtatacatcagaacaaagcatcggctatatgtatgtattgatgtgtttccttctcacaatctcaaactcttgatccgacaaatatatatcttaccattaggttcactcattgcaagagcaccaacatgctctccactgataagcttcatagcagtgaatcaatagttagctaaaactctaacgacattttaagagaaaaagatcaggagaaacatgcaacagttcacagatgaagaaaataaaaaacggtctttctataaggtgagatttccaacaccggtgatattggctgataaaccatttgcatagcagtgacaatatccgtaagctcagaccatgatacaaaagctcaagatgaaaccgtacctttggcaaatacttttccttttgggctgcagttccattcctcacctgtaaaatagtattaaatcttctctctcagactcaaaaactcagatactgcaacatagtttgtgagatatatatttaccaattgattgatgcaaaggttggaatgagcaccataagacaaagcaactgaacccgaggcccgactgatttcctacattgccctacaatgatacaagtaaccaagacctagaccccatattcctctgcaggtaaggaacatgcga

SEQ ID NO: 26936 - DNA, 1181 bp, Arabidopsis thaliana landsberg
ccatcatgagcgagttttactgaaatcccttccctaatataattaaaacattgcagcaaataagattactcatctctttctatgtataaaattcttcagggagatgatgtaattacgagctttcttagttttctaccttttagaccattcttcaagaaactcgttgtccttgtgatgatcaaactcgtgagtcattccaatcagaagagccctttttggactcagtcttttgattgtgtctagtgtctacagaaaacaaaagtaagcatacatacataaaccataaaataaaacccacactttcaaaattatgctaacctgcgggaaacataagtgagtgttgtgggatcctgtctgcagttgcggtaaagaaaaagaaagagaaacgatgtaaaaacataaagctcatatttaaaataaacattcaagctttaatgcatgaagatgatttgtgttaccttatataatgtatccaaaataaggagatccaattgtccaccaccagattttgatatagctgttaaatccaaagccaacaaaagttgagacattttcttcgaatatgccaaaatgcagtcttttttaagcaatatgtttgacttaccatactcggtgtttggaggaaaccgtgaaacatcggatatataagccactcttgatttttcaccaaaaaggaagccaagacatacatagtcttctccatgcatcacctacggcaataaataagatttgagtctccaaatagatcagaagggaggcatgattcactagttctacagaggctttgagaaacttactggaagtggcgtgaatgataaacctgaagctacaaatggcttctcacaatcttcttcaattactctccaatctagctgtgctactcgcctaacttcttggccttctttaagtttcttctgaaccaaatacgggaacttcacagcaaggctgttttcagaaaaacaaagcatgtgattgtcgaaactagagcttcagagcctaaaaggtcaaactgaaatttccaaaagaccatgaaaatgtttttacctttcctagcatattggcttacaaaaattggagtaggatcaaatcattagtaggactaatggttgcactgaacgtatatatccagccaagactgcatagcatgtcatgagcacattatcgcattcatgcaaacttat

SEQ ID NO: 26937 - DNA, 1065 bp, Arabidopsis thaliana landsberg
tcatttactcaatcgacaataaattgagttactaattaatatctgaccgaacaaaatttaagtgtttaaaaagaaagaaaagagcaaacgaaaaaaggaatgtgaatactagtcccaacaagttcatattatatatgtaattaacaaaattcatgagaaccctctccgtgtccgtgtgtcaccatagtaaccattgaatgtaatgaatttctagggattcaactagtaaaaacagatcgaactttagtctatatatcgttgagttggcttcactgtgtatgagccgagatcaaagccgtgacgtttttttcgatacatggggtaacaattaattaactaagttttttggggcttaaacttttaatggtgatacaattaatttatgggccatagaagaatgttggggactggtttgcttacgtggggatgtgtgcattaatgtgggtttgtgagttgtataaagaagcaactgtgagataacatctgaacacaaacttacaagaacagtttaaaagtttttttcttacttaaaattctctcttttaagtagtcaaagtttggaacttgaacaccataaaattcatcaattttactccaacttgtctaaaaatctaatcttttttgatcactataataaccaatcttgattcatcaataactcgagttgagaaatatatacattgatctctctgttacagacaattgtcagaaaaaaagaaacatgaaggttagttttctaatccattgtgtttagttcgatcattgacttttttctcagatgatttctcaagtgttttcttctggcttttgttttcagttcttcgggtggatgcagaacaagcttaatggggatcataacagaacaagcacttcctctgcttcttctcgtaagtttttttcttactttcattaaaacttaacttcaagattatattgtctactagggatatgtgtaaacaatgccccgagattcttgtctcgtagaatttgcttgtattatatctcgttgtaccttattttgacaagattcttgtctttgatctgaaattattttgctgtcttgca

SEQ ID NO: 26938 - DNA, 1089 bp, Arabidopsis thaliana landsberg
ggtggaagaaaacattttctcgaagcagctagcccgacgatgccctttcttcctatttgttcacctaatgcttcgcgttccaaggtgatttgtatttctttttatctttctcctagatgcattttgtgtataggtaccaagtttttacttgtgtgacaagattttactagtaaagattctgtttctttggcacaaagattattgctttggtactctgaatgaatgaatatggcactcttatatacttgagatgtggaggaaatgtaactgactgagatttatctgcacactaggatgtttcagaaacatttcatcctcagaggccagattggtataaggagctttttgcttggttcttgagcacaggaatgcgatcttatgaagcagaggtcagtctttgtgatttaaatgcatcattctatgatccatttcttgagaatgatagatctttttcatgttttatgtttgtgttatttggtaagatcgccgagtacaagaggaaactattcgaaaaactggctggtaaagcagaaacagtgctggagattggtgttggtactggccctaatctgaagtactttgctggtaatgaaaacgtctgtgtttttggtatggacccgaaccataaaatggaaaagtacgcatgtgaatctgccagagaagctgggatgaaacctgaaaactttagattcatgcatggagtaagtaaattgctctgttttgatttgtgagacatctctttttgtaatcccctgatgttacttatctgttgatcttaggtaggagaagctataccattagatgacctcattatggattcagtggatgccactcatgttctaggttcgagatacctatgtcactctaacactaaatggtaaacttcctaaacccttaaaagatctcactggatatattacttacctgattggtatcttcagagatcaagcgggtgctgaaaccgggtgggattttcttattcatcgagcacgtagcggctaaaggtatgtattcttttacatcaaaccccttgaaaagacaaaactggaatccaaagtttttgtttttgtggatgcagatggatctttt

SEQ ID NO: 26939 - DNA, 1408 bp, Arabidopsis thaliana landsberg
  unsure (1)..(1408): unsure at all n locations
gaaatattcttactctcgtagaaaacagagcttgtaccaaatagtatttactaaacttttatgtatcttttgtaattttgtaacataagaaaatttgtaacactatttataacatctatatatacatttttgcaaccattttaacaaataaatcttggagttggacttatttacaacccaatgccattagcattaaatctttttttcaaaataattaattttactttaaattcttaatttaaattgtcaatcacattatcaatcaaatttaatccaaacaaacttcacatcaatcccttaaaattagcataaaagtattttgttaacaatattttaaaacaaagttttttgtttaaataaatattgttcttactaaacgttttttgtttaaataaacaaatcatgtatttgaacttatttacaatgtcatgctactgatattaattatttaggcatgaaaatatttaattaaagatttaaatcttctaaattcttgcttttagagttattatatcattacctaaaaggcaaaaaatattaattttttaattattattatttatatatttaaaattcataaaacattattaatatttaaatttataaaaagtttaatatatcaaaaaaaaataacatcattatataatatatagagtttaaaacatctcaaaaaaaaattcgtcatattttgtgattcgaaattttaagaatgaacatatattaactaattggcgaaaaatgtgtgggttcaacgtcccgcaacgaataaaatattttgacaatgattcataaacatattataaataaaatcaacattaataaaataaatagaatttttttgtggatggatttggcgggacgggtttggcaggacgtgacggagataacaattgtaaactataaaataaaaatattttatagatatatacaatttgcaaacttttatatatagtaactttaagaaaataaattgtctccggtatatcgcggattaaaatctagtttgtaaactaaaaacacaagctaaatagaaagtttaagnnnnnnnnnnnnnnnnnnnnnngtttcttatataaatattaagtgtgcaaaaaagaaactgctattttaacaagttctgtcagacgttccagttcaacgtagatcaaataaagtctattaattaggaattttatttttctaggtccttgtaggccaaaaaaacaagctccaccacgaaaagctctttcacaaaattgcaacatgatgaagatattcttataagaacgaacacatgggcatgggttctaacggataatgataggttccctaaattttagggatattctaaaatatacaaaatatatattatttggaactcacgaacngcctaaccctaaagcccntaaaatttggtttctatatatat

SEQ ID NO: 26940 - DNA, 1297 bp, Arabidopsis thaliana landsberg
gacccaacgaaaatcatagggctataaccaacctatatggaatatgctgatgatttgagtctctgtacttctttgccagaccaaagtcgaggacgtatacctgtattcagtcaacaaatcgttgaacaaataattctggagaataaacaaattttactaacagcccttttcaacagctacctgatttgcacgccttccaagacccatcagaaagttgtcaggcttgatgtcccgatgtagaaatgacttctgatgtacaaactcaatgcgattgatctgaaagaggaacaaagatatcctaaacgtttattcaacatgagaacacaattttcaggctatagacgggatcctaccatttgatctgcaagcattagtacagtctttagtgagagtttcctactacagaaattgaatagatcttcaaggctaggccccaacaagtctatcacgaggacattatagtccccttcaacaccataccatttaacgtttggaacgccagctagaaatcaaggaaaggaaagcaacccctcttggataagaaaaaagacatcacaaactacaaatgtaaacaagtacagaactagatccatacttcctccttgtaatactttgtacaactttgattcatacagcaactgaggatgcttagttttcacattttcctgaaacaagaagaaaagatgccgtcagaacatatacaacaaacacagtagccaaactacgataaatctgttacatttcagagcaaaaaaagaaatgtgaaacaaacatgaggatttgatttaacatactcaacagtcagaaccagtacaaacaggtaacagaaaaaagaaacaaccaatgttcaatacagtaatatgtatagctgtcagcctcataattctccatttgtaggccacaacaaaattttcaataggttggtcccaccagttgcaggtagttttgtcgtggactctaagaattgattcagcattaattagactatttgctcaagaatcaataatagatctcagttcttacggaaaagtcaggttgaacccagatttaaactatagaaatattggtttgatcatgttgaatactgaatgaaaacagtcatagataatcaagaggaagcttaaggaagaactcaactaaattgcaacaatcgcatgatcagagtagaaaaagcagtaactggttagagcagtgtgtagcctgttaaataaaattctattcctttttcgtctaaacacagtacaccaacgttttcattccgatcgattttaacatgtaaaaggagaagctacaagct

SEQ ID NO: 26941 - DNA, 1635 bp, Arabidopsis thaliana landsberg
gtaggatgattggttaaaaggcccacattgtatgagattttgtacagaagtgaacatgattgccaccataatggctaagttttctttaattctaatgcttatcacaacatttagacaagtcttcttatgtatacaaccccgaggatgaagctgttgctgtaacagggaaaattgctggactttccacaagaccttacaggtgaacggaaagggttaggagcaaccggatgagagaaattcagccctgcgttgcgcgaaactgtctttgcatttccacaagcttcttctctcttatcagtgaagaaacaggggatgcccgtattgttcaccgcctcaaccgctcctgcccagcttgagtacccatccaggtcacagttcaaggctacagtgatatccggtgaagtcaggtatgttacctcgtcttggtgcaaaccttacacaaagctcaccttaactctactgtttgttgttgaggtggttgctattgtaccagataagtcagatggaacttcaggtccgatcattatgatctgcacggttcctaaaccattaagcaagtgattgatctctgcaaatgctttgatccagtcgagttctcgttctggacctaagtaatggacagtcacttctttccctttcagcaacagattcttgggatggttgcttactgatgttaatatgtggtaaagtgttaaagggtaacagagaatgtcataaacaaggcttgaccgtggtagacacagtaaatcatagtagtctgaccaatctgacaagaggatcatacccggggaacgcccgttgttcagattctgtatcggtaaatcttgtggataatccccgtcctctagccctctccatgattcagattgtgcctctgtggaaaaacactgtaagagtccaaaaggttggtgggaatagcaactgcattgtcttctccacattcccttcttatggatgcctaaagatccaagccattaggttctcagcataacacgagaaagtgaagatctttatcttgagcttctcttctctactcatcatagcttcatagagactacaaacactccggtgcatctctcgccaatgccgtttctcgcagtctaaaccacagtatatggttgcacggcaatggctacaacaaacagactcatctttatgaatagctttcttacacattgtgcactgtcttaaacccgcttctccaccttgaccaactcgcagattgatcatgcggtcatgcctgaaactatttccatctggtcatcttcgcgcttctgttcatatgattgacctggaggatgtgagccggtaacagcaacaaaatcatgacctttacccatctctgatggccactgaacatcgacagtctcaataaaaggtgaaaactttatcatccttggcaatcccctgacttgcttctcctcttgaagcagcaaaggatgaaccaaagagagagctttcatcacagcaaacacaagcctaagctcttcaagtgtcgggcttctgaactggagctcaccagaggtcatacaccgcgcaacatccataatcggaaaccgatcagaaccagaaacttctaaagacaaagacttaaccatcctcttgttagaaggaagcatcaatgaatcaagctca

SEQ ID NO: 26942 - DNA, 2167 bp, Arabidopsis thaliana landsberg
tactatcttaattatattgatttaacacattcaaagaccactaggctcgtgttatgctaggtactatgatatatttgatactgatttataataatgtaggatataatctagagtcatcctctcgggtctaccactatagtcaccttattatattgatgattaggttttgtttcctctccctgcttctgtgaaattggattcacttaatgaagatctttcaaagctattatcatcttctgatggctctggagttgtttcttcttcgaccgttgcatctttgagtataagcttaaagcaactgtatgtgtattcccttatgatatatgttgcactaacatcgctacttagaagtcgaatccttgtgtgatcatcaatgttgtgaatgtatcatagtaacaaaaaggatagttcccagaaagaggaaagttttgagattttttgttgtgttatgccctgaacaaaaaagacattgcttaatcaacttttgatggttttgttatttatacttccaaactattgttttgttggatctattatcttttcttcctgcaacttttgatgtgatgttgaggacagttcaattagtttggttccttagtaacatgataggttagggtgccaatttttttattttttttctcattgaaaaataaaatacacctatttggagaatgcattctctataaggaatattattaaataaaaatacgccattaggatattggttccgttttaggcagttttgaaagttggggcttgtggggatattgtaccaactaaattcgagtaaagcttatctaacacagtagcaacacaagtacaatgtttatctttgctgattcttggcaggggttaaccagattctcctgcataaatcacgaaatctgagtttgctaaggaattctgaggtcagattatgaagtttagtttacactggacaaatatttacgtattatatacatttgagtccaactcaaaacaagtcacgattgggagaaaagatacgaggccacgattttgtgtttacaaggaaggccagacctatcccttttgctccttgattcctgagagaaactactatgtctcggataaaggttttgccagatactgacgccattcttctggcatgcccttattcgatctcagcatccttatagctgcatttgttaatggtattgcaacaatgtcatagtcttttggttcctgccatttaccaacaatcaataattccccatcaaaacaaggttttattatatcttagactggttagtaaaccaatagcaactatgagaaataatacctttgggaccttaagtaacttcatgtgtgcttcgtctgctgtcttctgtcctttccttgagttgcatcttgaacatgcagctacctatgtttcatgaaaccaattgaagaaaacaatttaacccatcttcaatattcctggctacaacatatatgctacttcgatatcaatcacatactaggttttgccaagtccattctccacctcgagaaaccggcataacatgatcaatggtcaaattttctcgcgaagaacaatatctatatcccaaataattaaagttctgtcagcaacaattgtttgattccgcaaaaacagagagatatgattgcgagtagagatagaaaaccactcactgacaagtataatcgtctcgtagtaaaatatttttacggctaagtgagtttttcactcttcttcttttaacaacctgaagcaaatgtggaacctgaagcaagacaatgaagtaagtttcaaactggcaacaagagataaaaactggctaactaaactcatattctacatacccttaatacagctggtatgtagaacgaacccgtaggagaactaacagtctgatcataatactccaaaacgtcggcctagacaatgcacaaaacctgaattaaagatcattatacaaataagcaactatatacctactttttacataatacaaatcctgcgtttttgttgattgggaaatttcttgcatagtattagaaaacgtcattatgtcattatgcgtgttaccaatcagaccctaagtatcaacatgagttaaaagtcttttggcctgaccttatccatgtactcgaggcagattgcgcgcttccagcaaaccacattgaccggcctacagtgaca

SEQ ID NO: 26943 - DNA, 3215 bp, Arabidopsis thaliana landsberg
atagcggtgaaagtcgccagccatgtcaaactccaagaactcacatcggcacaaatgatccaagtccatcattctcggtgctaaccctggttccttgagcggtactccacaagcttgcagaattggcgtcacaaagccacccacgcatagtgctcctctcaccttattctttccgttcgtcaacgcccacttcctgtatccacacagatggatcaacagaggcattactggtggtgcgttgttgagatcgccactcaagacattctctcccttcgtccagtggagaatccctgtaagcgcataatctatcatctccatgtccgtgttagacacggtgcctgtagactccctggagtaaaagacgttggcaaccgatccctgaaagtagcggatcacaggactctggatttggttgctcttggacctcgccgagtttaacggtagactgttcccaattgtggcccacaagtccttaagctcttctctgtcaaatcttggtttggttccctttccactagggaaaccaaacagttcttctaacttcttgatcgaaagctgataccgctgttcatccactgagaacgtcaagaaacctaaccccatggtatccagctcaaagtctgtgagtgcctcatacatctccacttgcagcgtggaaagaaactcgattgtctcctccttataggcagggtaagggtaagacatgagtttctccagatgacacttctcgaacagatgctgcacgtcctccagtaaccccagctgggctaaagtctcatagcacggataccgcgttccccagaaattattcatctcaaagaacctgatatactcttccactgtaacctcgtcaggtttgttcagcagcttcgtctccttgcgccatgactttggctcatactcactttcgatatcctcatcaatcagctcatatctactcgacatcgctctctttcctctagcgattttagctcttctctgattacgtcgtgctgcggagcgctcaaattcttctataaaactctcgtaaacgtgttcttctctctcttgtctagtggaccaagactctgcttcatctacgttataatcaggatccattgaggattctccactgtagttactcatgatgaaacctgaaaacaaatgaaactcaaggataaacattaatacgttagtcttaacaaaccaaaaacacaaaccggtcgactgatgtgatcgagtaaaccgtcggttttgatttttttttttttcttttctttcggttgatcaagtgattttgtatggtcgagtgcagctagtttcgtggttagagtgaggcggtggtcgagtggtgagcttgaagaggaggagagcagttgcggtttgaccgtggaaatagaggagcggtcgagtgaactgtgaaatgaaggcgggcttgtggtcgagtggcgtcgctttggcggtgaatcgagtgatgaatggacttgagagatgtgagaacgatggcaccttggtcgagtagtgaggcttggacggagaaggtgatgaggtgatgtgagaagaagtcgagtgattgtggacggttggtagacgtgacctagtggtgaaacgatgaagaagatggtgattggggatcgagtaatgtggagctcgcggaagaagagaagacggtggtgtgtagcggtcgagtggttgtggtagtggagaggtcgagtgaaggttgtgaggatgactatggtgatgagaaccctagttgttgtggtggtgattagcggcgaggacgagtgacacggcgaggtcgagtatatgaagagagaagatgatggggtcgagtggtgatggattggtgatgatggcgaggtcgagtcgagtggttgtgaggaaaagagatggtgaggtcgagtgaggaggggttatggaggagaaaacgatgaggtcgagtggtagagttataagcgtggggggtgatggggatttcttggttgcatgtgaagtgttggtgagagggttggggacgagtaagctgagatgggaagaggatagggagtggtcgagtggtgagggaagaggcatggagatttctttataaccttgtggggagcgtgggagacatggctgcagcagtgggtccctcgttgtcttcttgtctcttctctgtattctcttttcactaggaaaactccaagaaatcccgcaatccattgtaaacttgatagactcctggaagactctgtaccttctgttggtcgagtaaagtaatgatttaaaagttttttttgggctttaaacatcactcatactcgaccaatgtactcgatctccagaccatcagtagagtaaaagttttgaatttttactctaccctcacgttacttctttttttttttccagagaaccacaaacacaactaaaacaaatcaaaaataacaagaaagtaaaaattatttacaaggataatcatgggacttcctcccaagtgagcttgttttaaatctctagcttgactcctcacacttatcaagaagaaaatgaactatagagagggtctgcataatcctctctgatatcatcatcatactcagcgttctccctggagaggtctgcaacagaatactcaattcccctctcttcaaaatatgtttctttctcttctggagggtaatctatctcttcagaccatcttgaagtgaacttctttctcgggatggtgtcaatccttcgtttaggttgagcttctttctgcaactgatttaacttacttctaagttcctcaacagtgtgggctagcttctctatagtttcatcttgcttatcagacctctttttaaattctttcactctttcagtctcatatccttcttctgagatcattctatcatttccagaagtatttccatcttctgttaacccttgtggagttctgttgatgttaaactgcaacttgatgtgctttccaaggttgagacttatttttccttccctgacatctatcactgctcccaatgaagctaagaagggtcttcccaggattaagagatccttatgctctacttccatatccagcaccacgaagtctgtaggcacttttactccattaatcatggcaggtagatctttaagcatgccggaaggttttctgcaacccctatccgcaaggatcgcagtcaggtctcacagtttatcctgaataacctctacaatcttgccgcagagaggggcatcaagctgccagaggc

SEQ ID NO: 26944 - DNA, 6265 bp, Arabidopsis thaliana landsberg
agaaaaataggtaataatcaatggttgataagaacttgatcatgtttcatttaccaaaaaagaaaagaaaaagaaacgggatgtctcgtccgttgaattgagagaagaaaaccttagaccacaagctcctttgcggtgacataattctgcctagtgtggtatgaccatgatggcttcaccgtactcgtccgacgatatccattctccggtgaactcaacggtcgttgcaatagacaaagagaaacatagttcttacgctgttcgttgggccgtcgaccatctcctcaatatgattcacaatccagtcatgattcttgtccatgttcgtaccaaaaattcaaaccgtaggtaccttatactcattatcctataatattgaatctattatcattcttggaactactatgaatcatcatgtgttttcaaaacgttaaagattttgaatgaattgcagatggagccaacttgaacaatgatgatctaaatcagctttttattccatatcgaggatattgcgcgcgaaaaggggtataatatatatagttaatccatttcgttttcaagcatatatgaacagaaatgttttaacgccatgcactcttagtagatttctatgacggaggttgttctagacgattccgacgtagcaaaaacaatcttggattacgttaataacaacctggttaacaatcttgtattgggagcatccacgaagaacaccttcgctaggtcttttatgtttagtaaaccacatgaggtgcaatctagcataatgaaatcgacgcctgatttttgttcggtgtatgtcatttctaaaggaggcaaagttcagtcttcccgaccagctcaaagacctatcaccaatacgcttgccccgcctcgtgttccatcctctggctttttaatccaatctttatccgatagcgagcaagatctcatacctaggtaacccaaccttcggttctttttatcagttttctctcaaaacttttactaaaagcaaatgttattgttttcttgatacgttttagggtccagcgtagtgcaaggaacaaacctaatgagactacttatccgcataatcgtgccgccttcaacaccacgcaaaaaggttacaaaagccctataaatgggtcgatggatttcaacaacggctttaatcaagctgcctttcaaagaaatcccacgttacaaagttcattttctgatgaatctgatggtgggtttggagtgatgggttcagttgatctctcttctcataatagtatggatttttatcatggtgcttcgagttcttcagaagagtcgattccacaatcaactgtatgttttctcaaatgattttctttttgtggttcaagagttaaggttagaaggctctaaatccctatatggttgtttgctttatttgcagaaagatattgaagctgaaatgagaaggctaaagcttgaacttaagcaaactatggatatgtatagctcagcttgtaaagaagcacttacggcaaaaagaaaggtatatagtttaatttgagcaagtttcttgttgaacacggtactcatggcttcttttattttctaggcaaacgagctaaatcaatggaagatagaagaagctcgtaaattcgagaaagcgaggctttctgaagaagcagcattggcagttgctgaaatagagaaagcaaagtgtagaacagccgtagaagcagctgagaaagctcaaagaatggctgaactagaaggacaaagaaggaagcaagcagagttgaaagctgtaagtgaagaaaaggacaaagaccgcgcagtgagtgctttggcacataacgatgttcgctacagaaaatatacgatagaagagatcgaagaagctacagagaggtttgcaaacaacagaaaaataggagaaggcggatatggaccagtctatcatggcacacttgatcacactcctgttgccataaaagtcttgagacctgatgctgctcaaggaaagaaacagtttcaacaagaagtcgaggttctaagtagcataagacatcctcacatggttcttcttcttggtgcgtgtccagaatatgggtgtttggtgtatgagttcatggacaatgggagcttagaggatagactctttcgtagaggaaactcgcctccactttcatggaggaaaaggtttcaaatagctgcagagatcgctaccgcactctccttccttcaccaagcaaagccagagcctctggttcatcgtgacctaaaacctgccaatatacttctagataaaaactacgtgagcaagatcagtgacgttggattagctcggttagtacctgcgtcagtggctaacacagtgacgcaataccacatgacatctgcagcaggaacgttctgttacatagaccccgagtaccagcaaacgggcaagttaaccacgaaatcagacatattctcattagggataatgctgcttcagatcatcactgccaagagtccaatgggtttggctcatcatgtgtcgagggcaatcgacaaaggaactttcaaggatatgcttgacccggtcgtgccagattggcctgtcgaagaagcattaaattttgctaagttgtgtctaagatgtgcagagctaaggaagagagatagaccagatcttggaaaagaaatagttccagagcttctccgattaagaaacttggggaaggacaatgaaccaggtatattactatacatataaaaccctaaacaaagtcttgaatctatcaagtaatactaacttaattgcttacactttcattaggatgccataaataacaaccgggtctgaagatcatcatatacttattaaatattttcaagacttttgtgaggaactgaatagagagattgcttgcttctcaaggaagaaagtaagaaagtggtaagtgaagtgccatgaagagattactaactaaaatctaatccttgtttatattatatctctgtaacatattacttccacctttctagctttccgatgaaaagtattgaacaaaatgcaatggcttattgttaatgttctcgttgcatgaaacattgtcattatgttcctttgtaagttttaattctaatttttgagagtatgtgatattgatatagatttttgtgtgtggataggttagcgtttaaaaaaaaaaaaaaaactcaaaagagttcaactcaatttgggcttcaacatataaaatcacccggttacaactaaaagtactacttttttcttggtatcaatgttaagctaaaagtactacttggttaccaaagaacagagaaattataaaactaaaacaaaaatttaagaaaaagataaactaatcaaaacaatggtgacctttataaactgggaattgatacaaagccacctttgaaagcaaagtataaaaagaaaaatgagtacataccgaaaaattttggagagtgtgacactttttagttctagaatcagttgtattgcttcataacataaactatttttgagtatgagtcgagaaaggaatatcataagtcatttatcaaaatgttgaaaaagctatgtttgcatctttaccctaagataaataaaaacatctaaagcttaacattgtctttttgatattctcaattataatattaactttccagcaaaacacaatccatcaagaaagcatcttagtatcaagccaccttatgatttataaatgtccaaccaactcagctaagcaatgaacattttactccaaacaccatcatcatcatgggcctcatcgtcatcatcattgcattggtcatggtcatggtagttgcatcatcaccgtccgatcaaacaaatgtcctcactcctctttgcatcagcgaatgctccacgtgtcccaccatttgctctcctccgccctctaaaccctctccctccatgtcaccacctccgtctccctcattgccgttatcctcttcgccaccgcctcctccgccacacaaacactctccaccaccgctttcacaatcgctttcaccaccgccgttaattaccgtcatccatccaccaccaccacggttttactatttcgagtccacaccacctcctccaccgctatctcccgatggaaaaggttcaccaccatcagtaccatcgtcaccaccgtcgccaaagggacagtcacaagggcagcagcaacctccttatccatttccttatttctatttctacacggcatcaaatgcaactcttctcttttcttcttcattcttgattgctcttgttgtatcttctctatctatttttcttaacggttcgttagtgtaaaagactcttctatattttgtatacttattaatattgtttattcatttttttttggtgtaatataagatttactttttcatcaatggacatcgaacggcaaaacctacccttaacctattttgtccaagctaaccaaaacctacccttaacctattttatttttttggccaacataaaccctagattaatctagctaatgcaatttacatgtaacataaaaaaaaaggtgaaatgcatgacagtaatcattttgccgggtacgttggtttattttcctaaccgaaccgaagtctaatggaaccgagtttcggttaaaatcaacttggtttactccttagttcgaagagaaaataaaattgaaagagaaatttcagatccaaagcaggaaaacaaatcacagaaacattttgatgttaagtttttgaaaaaatcgcgagtttctggatctgtatactttcttagaggagattttgatagcatcgtttacaggagtaagatccgggaatggcaatggaggttggggagatgtctcagccggaggcgacggcgagtcttctctctctcgcttccgccactcagcaaccgtacgtctccgagctcctctctttcactcttgatcgtctccacaaggttcatctctctctctctctctaactctcttttgaaatctctgcgctcatggatttttgtgaatcttatattggttactgaatttgaaggaaccggagctgcttcgagtggatgcggagcggattcagaggcaaatgcaagaggtggctgttggaaattaccgcgcgtttatcaccgctgctgatgctttgcttgcgatccgtcaggaagtttcttccattgataagcatctcgagtctctggtaaattatatttttactttcaatttgtaaattgagttctactgcttcacttgattagttctgaaccctggccgataaaattacgattagtcacagtgcaagtatcattgctaagatcctaaaactagttgaggtttataaaagtttaagtttgtgaattttgagttctttgatctttgttatgaacgaaaaagataccgaaccttttgtttgttgtactttttatatattatcattaataaaaaagcatatcttgagatccgcatccatatatattaatatcgtcttatttgtaatttatgtttagtggtgactggaaatgaaataatttgtgacttaaaccgataaattttctcttctttattggagactgctatttagagaaaaataaaatcaagaaattatttgataaatatgcgaatatgtccatagaagtatgtttttgaaaatagagtatctgttaatcaaattcggaataatcaaagcttggttattgagcaatcccgtaatatgaaattagataaattatagagttaaaaacacatctggacctaatgtataaagaatatacgtttgggcacaaaactatgagaaatcaagagttagggagtggaacgataaatttcacaaaggaaaacgacaacatcttacacacgggtgaaaccggcaaccgaaaaaaagtcattacatcacaaactgacgaatgcactaaacaggatgagaatgaaacagaagcaacaacctcttacgcaggttatccagtcatataagaagatcttttgtacggtaaaaagataaaaaagatcaatttagatccgacggttagattttaagcttctctaacagttacagatgtcattgatgtcacagtctcagagatgtcaataaacacccaaaatgttaatgaaatttcccggcttttctacaacataatctccctgtttgttgccctctctttctctctgtctctctctattcggaatccttatttcgcgagcaagcagcttgcaaagggtgtgtgaatgtgatctatcctaaagcgtagtgtcaggcttcttctttctgaagcctttagccacatggcatg

SEQ ID NO: 26945 - DNA, 1227 bp, Arabidopsis thaliana landsberg
tcaccttgcttcccttcttctccctctccatctccaaaaaccgcttctagagtcttccaccgagtccgtgcagctaatttgatcctcaaatcgtggccaactcgtgaatctaatcacctcctccgcgcagattccgaacctatcaatctaagccggaatcaaaatccagaatcagattcgaaacaatcgaaaaccaaaaccgaaccagatgtacggatttcaatcccaggcgcagagaaaagcattgtcgtatacttcacaagcctacgcgtggttcgtccaacattcgaagcctgcaaatccgttacatcgatcctccatagcttcccggtacgaatcgacgaacgagatctctcaatggacgcgtcattctccaccgagctacaacgaatcttcggtaaggatcagaaccagaaccagaaccaggcgaagacgccgaagctgccgcgagtcttcatcggtggtcggtacataggaggagcggaggaggtgaaacagctacacgagatcggagagttgaagaaacttgtgcaagagttgccgaagattgaaccaggggtatgtgagatgtgtggtggtcatagattcgtgccgtgtaaggattgtcatggtagccataaggtgcatacggagaagctagggttcagaacttgcttaacctgtaacgagaatggtctcgtcaggtgttcttcttgttcatttccacaatctcctccaccctaattcctagattttcagtttttttttttcaatttcaattttcgaataccagaaattggaataattaaatattggtttttaatctaatttttaagaagtttccaattttgtataattcgtaatggaaaagaagtagtttcggataattagattcgttaaaagaaaaacaaatcattagatcatgtgatgaacgtgattagcagctaagtactatttgctgtccaagagtatatatattttcaaattttaaattatagatctgaaatgttgtacggaaaaggaaaaaaaataaactagaggtctaaattgttactataaaaaatagcaaaagtagcaaagattaataattgatggacgttaacacatttctggcctaagaaagaatgtatatgtacatgtgcgcattacatttcatgttatttttgacattattattactcgatttataaaaattataacgcttcatagatgaacaattgattgtccatatcgttgagttaacgtaca

SEQ ID NO: 26946 - DNA, 4945 bp, Arabidopsis thaliana landsberg
  unsure (1)..(4945): unsure at all n locations
gcactgaagatttggtggaaactctggaactgatgtaagactcgtacaatacttcaggtccagccatttaagttgagaaagctgactgattccaacaggaaggcagctgatcttagcatttctgcttaagcacaaatactgcactgagggtaattgtggcatcacttcaatggctgtcccatccaaaagtaaaatgtttaaaaagctaatgtcgatttctgggaaaatcttgagatttaaacaatcagagagtatcagttcttgaagagctttcagctcaccaacacggcctggaatttcctctagcattttgcagtctttcatattcaatacaacaagtctctgaagcttctccatgttcataggaagctgacttattgctgtgccatctaagtatagagtttctatattatctgaaatcaacggaaattccttaaaagttgagcagccgctgagagtaagtgttttcagagaaatcaaattcatctctggaagagattcgagacttgtacaccccttcagattcaagaaagcaagcattttcatttttttcatatcatgtggaaacgctttcagtgttgtgcaaccttcaaggttcaacctttgaagcttttcagcttttgataaccctgacaagctgcacaacttacttgagtgattgagatcgacccaccttaagcatggtgtgtcctattacagaaaaagaagaaaacaaagtttagccaccagtcaaacaaaacctatccaggtaaattaaccattcacaaaagcaatcaacagattattcagagacacaccttgtcaccctcccaaagttgttccgtttcactgtagggcagcttaaggtcgacaagattaattgggttgaaatcgtttggaagtgtctccaatgggaatttcagccagtggaggcatcgaacttctttcaatggtagcttaagtttatcagggatgttgattttattgttggttttacattcctgtggacaatgggaattgtagaacttgagataccggagatttcccatatttatgaagtggtcgcggtctaagctcgtttcgtcttccacttcagacaagtctaggaaaatacctctaacattggcagctttctaagcaccaataacaaacacgacatcagtgaagagaaaaaaatgtaagttcttaccaataaaactctagaggaacttctggtctcaccattttattttgcaatacattgattatgcctcccttgattatgtgttgatggagccacagcctccgttgtctgctaccatcctgattagatgccttcagatcaacttcccttgaaaatttatataatagatcatgcatctccactcggccatcacaagtattaatcaggaactattcttgagagcttttattgcttcagcagatccagggtcagacgaaaccagtaaactttctacataatccacatcctgtgatctgaaacaggctatgtcgagaaatgcatctttctgcgccaaactcaattcatcataacttacttgcacgacttctccaatataagtggtgggactttgagcaagtattttcagttttgtttcccaatgcttcatatttttctcattaagctctctacccaatattttgagagctagtggatggcctctggcataatgcacaaactcatcagaaagcttcatgaaatccacctttggaggaatggtttgatcataatgaaaggcgtgatagcgaaaaagttgtaagccgtctctgtggtttaattgccgaaccacataagtgtcatgaaccagaccctttaataaggagatatcgttcgttgcaatgataatcctgctgccatctttgatccactcatgtttaatgtgaagaacatatttcccaagaagagcatatatttgttcccttccactaacatcatcaaggacgacaagaactttgcgttcacgcagtagacccttatgagttttgtatggttcttcaatactatctagatgaggactattcaactccggtagtagcttctctaaaagcaaagtaggcaagcactctaacctgaagttatttgacttcccacggatttgatcgatcaaagcatacctcgaaaacttgccctgccatatcttatagagctctttcaccagtgtggttttaccaattccaggcatgccaacaactccaacgacacgagttcccttgtatttaacaagatccaacttctcttccaactccttcaaccgttgtttgattccaaaagtcttatccttttcgcctcctaccgaacttagagtgttaatactttctgatggatccacagagaccaccttttggcttccctccaatgaaactttcttcaacactttcttaacctccttaacgatttcgttgagtatttcactctcaggactacaatacaaatgagaaaaataagatcaacatgaccttcctagattcccatgaaaagttcctaaacttatctaactactaaagggtcaagcttttggttaattcacacgaatgaggaaaataatatcatgaccatgaaaggttcctaaacttatctaacaatttccaattgtaatcactaaaggttcaagctttttgggttaatactcaaagcaatagagcaaaagcagttaccttttgtcatgaacagtgataccaattaagtcaggaatccacttcaaagcttgtttccactctttcttcttaatcacatcacgttcctcaagatctctaaaagcatcaccgaactgccctctaacacctctaacagtggatggatctaccttgtagaagataggaatagcaacaagtttacctttctcaacacaatcttttatcatcgctagctctctcaagcaccatgttgattctgtgtacttcccggagaagatggctagagcgattttggagtcatgtatcttggttaaaagtgtttctaaaggttcgcctttgtctgcgtagttgtcgatgaagacttttatgttatcgttttctaaagcttctacgagatggctgacgaatccgagtcgtaaatcttctccacgaaaattgatgaatacttgatgttgtggtgggagaccggtggaggaagacgacgccgccatgggaaacaaggcagacgatttgcaagttgaatcatctaataagtttactttttcaaatgttgacgattatagctaagaattgagtggttctccttctccctcaacaactgtttgagaaagcttttgacttgagatggttgacttgagaatggagtgcgactaccaatggccaacttcagtgcttagggaccacaatcgttttagagagttggttttcgggtgcgacccagatgcatcctcaccatcacaatttctaaaataatgatcgagagtgagcaaatcgtctacatcagctgcgtagaggaggtacgatactccttcgtcagccacctctccgaagctctccggcgcaaaggcataaacgatgtcttcatcgatagcgatgattcgctttccaacgagtctcaatcaatggtcgagagagctagggtttctgttatgattttaccaggaaaccgtacgatatctcttgaaaagctcgtgaaggttctcgattgccagaagaacaaagatcaggtggtggttccggtgttgtacggcgtcaggtcatcagagaccgaatggcttagcgcgctggattcgaaaggattctcatcagtccaccagtccaggtattctcataaactactttgccatcttcttctataaagctagatttctaaaacaaatatggtgcaggaaggaatgtagtgactcccaccttgtaaaagagattgttagagatttgtatgaaaagctcttttatatggaacgaattggaatctactcgaagctgctggagattgagaannnnnnnnnnnnnnnnnnnnnnnnnnnnnnnnnngttgggatttggggtatgcctggcataggcaagactacacttgctaaagcagtctttgaccaaatgtctggtgagtttgatgctcattgctttattgaagactacaccaaagctattcaagagaagggtgtttattgtttgctggaggaacagtttttgaaacaaaatgctggtgctagtggtaccgttacgaaattgagcttgcttagagatagattaaacaataagagggttcttgttgttcttgatgatgtccgcagtcctctggttgtagagtcttttcttgcagggtttgactggtttggtcccaaaagtctaatcatcataacctccaaagataaatcggtgtttcgcctttgtcgagtcaatcaaatatacgaggttcagggtttaaatgagaaagaggctcttcaactcttctctttgtgtgcgtctatagacgatatggcagagcagaatctccacgaggtgtcaatgaaagttattaaatatgctaatggccatccattagctctcaatctctatggcagagaactgatggggaagaaaagaccaccagaaatggagatagcattcctcaaactcaaggaatgtcctccagctatttttgttgatgcaatcaagagctcgtatgacacactcaatgacagggaaaaaaacatttttttggacatagcttgtttcttccagggagaaaatgttgactacgtgatgcaactgcttgagggttgtggtttctttccacatgttggaattgatgttcttgtggagaagagtctggtgactatttcagaaaaccgagtgcggatgcataacttgatccaagatgttggccgacaaataataaatagagaaacaagacagactaagaggcgcagcagactgtgggaaccttgcagcatcaaatatttattagaagataaggaacaaaacgaaaatgatgaacaaaaaacaacttttgaacgtgctcaggtctgttatcatttaatagttttatattgaacctattttatgagcc

SEQ ID NO: 26947 - DNA, 1349 bp, Arabidopsis thaliana landsberg
tggatatgaaataaattaactaaatgaatgattggttgatattaatttgaaaaaaaattgtaagtttagcaaagcacatggccatcaatgccaagtatactaggatatgcagctaactgaagtatacggattgaatgacaatatatacgaagtatacgatgttatatgatcaacattataaatggagaatctcaggttaaccgctggactgattccgacgttgaccaacaaaaatattcaaaaataaacttttaaaaactataatggtctactatactttagatagtcgacgatatttttttctttatattacacctacaatatttacacaattatatgtttagtccaaataaaccgaataataattcataaaattagtatttgaaatcggatatgaattggatacaaaaaagattctaaacaattttctgatagaaaacaaactaactaaatcactccgaatctctcgaccatagtgtttgttcctttctcaccatagtttagactttaaattctgtttcactttgactaattttagataaattaacatattaaacggaaattgcgaacgttaatgaaaaaaggagtataaatatataaaataatcgtatattttattattattataaatgctgtttagtacaggtggcttacaaaaatccaaagtgccgtaacttattagcttctctttcatttcaagtcaaaaagtccaaacctctgcagattttattcctaaacccgatcatggaagaatcatcaaaccaacaaatcctcaactccgagacccgacccgacccgattcaaaaaccaccggaatcaccagccaccaaactctcattcccgagacttttcctctggtttgatcaatcaaatcgcatcaaaactctgctttcatggtccatcttcttcctcctcgccgtcatcgtcccaatgatctcacacttcgtgctaatctgcgccgattgcgatttcaaacaccgtcgtccttacgacggtttagtgcagctttcgttatcgatcttcgccggaatctcgttcgttagtctctcagattggtccaagaaatatggaatccgaaggtttctcttcttcgataagcttaaagatgttagcgataaagttaggatcggatacgaagctaaaatccaggtaaattaaacgtatcgactaattatagtattagtaatctaatttcatgattaagaatcgtaatttttggaattaaaattggtaactagtggaagaagatgcgattgtaaagaacccgttatttcagttttctttcaaaatcggttcatcagtcggttcaatttggagagattgaatcatatttggttacgtctcggttc

SEQ ID NO: 26948 - DNA, 1423 bp, Arabidopsis thaliana landsberg
attaccgtctctgtagtattttgttttcgatttctaattaccgtttcatgtctctagtcatttgagtgtctgccttgatttgctgcttaagctggtaagaatgtatgggtcacaaatttactcgtcgctttccgctccctcatctgttggtgtagatattgaggctgagcaaaggttggtccgagcttcaatctcaccattcattgtcgttttcgattgcaatttactctctttggcaagtcaaatatgatttttgctattcaggatggagcggtacagttgttgctttgtcgagttcgagaaaatcaaggcttgccttccctctttagcaaggtgggtaaatttcatctactggacaatgaagagttagatggttatcttctctctttttttgaagtctattatcttatgtcttatatatatatatatatctctttatggatatgtagaagaggaaatttggtggccaagactctccatgaactcaacttaacatttcaagaagtttcatcgtgatactttttggatgtggatttggttccaatgtggagtttaacagtactaaagcctaactctaccaagctaaccaatagagtctatggaagactaactaaccctcgcgtattgcgtatggccactgctcgggtccgtaacctttgccttgcgtatggatacggtactgtctctcgtttcaagctaacttggtgtgtaaagagccatttcggttgttgtattgatctaggttatcatttcttccacactgtttagctatttgttcttaagagcacaaaaaagaagcctatatttaacaaaactgttttgtagaagattcagatcttgaagtacttatacccaaaatcaggatttgtcattccctcttcccaatctcccattcgtttaccaccaaatactacttgttgaatgcccaagtacctgaaattttatataaacaaaaattaaagttttctgcaacaaagaagcaatcaatcaaagaggataaaagggaactacaagttctcttgtgttacttactctgaactcataactgtcaaacagttgagaagcacatcaagggcgaagatatcggaagtaccaagatcaaccctacaagaaacagtgcaagtgaagttcagactaattacaagattttgaaggaaatagtttgcatcataaagatgtcagaacagttgtttaccacacacgaccccagttgtcttgaaattcgacatcgctaatgtcatgaaacgatgaaggcatcactttgaagcccttctctgcgtcatagagaggatcatattctagggatgtgtttgctagctgcaatcatagtttagatgataccgttaagacgagaatgaagatgaccatggaaatgggaagaaaaacatgattagcaactaggaaacaagatgggatgatgaac

SEQ ID NO: 26949 - DNA, 1500 bp, Arabidopsis thaliana landsberg
  unsure (1)..(1500): unsure at all n locations
atctttaatgatagtcgacaaagaacccataaaaatagtaagtatcaactcttatggccagaagctacaactacttaaaggtagatttgcaaaagactaattacttactcgaaatcatttgtatttatctgccactagagaagtagaggggacagttaaaattttagtgccagtctatcaataaattatctccaaaagtcgatgttcgaggtgaacgaacacatggagctgaaccatatatgaaatgaagtttacaagttacattattgtattggatacaaaagaagaactatgcactcacaaagaagtttcgtttctaaaaaatactacagaacggcaaactcgtgattaaaaaaacaaaacttaaaactactccatataagtgcataataaatgtatacagtttctaaaaaaggataaagacgaacttcgttatggtccacttacggccgggcggatctgggttttacagacttgtcaacgatttaggtagaacgatgatgatattaaatgagcacgaggcaagtgaatcttgtttatattttccattatattttacccgtttttccctacaagaaaccccaacacccttaagggagatctcaagtacctctctgttttagtaagtcacagtgctaaagtgatannnnnnnnnnnnnnnnnnnnnnnnngtggaaacatccatgctgagaccgaagtaaagaaggaggagaagaaaaagatgaagaaggaatcggtgtcattgatgggtttgtttagtgcagctgattatgtttattactttctgatgtttcttggggggttaggcgcgtgtattcatggcggtacgcttccgctcttcttcgtgttcttcgggggaatgctagattctcttgggaagctttctacagacccgaatgccatatcttctcgcgtttcacaggtttcttcagaaaccgatattctttctcttggtttttggacataaagtcataacacttttgttatttgtcttttcaagaatgctctgtacttggtctacttaggattggtcaatttggtatcagcctggattggtacgtgtctagctacttgatctgtttttatagtgttacaaaaaaactgtttttaatgttctaggttcaaatggtatattgacaggagtttcttgttggatgcaaacaggggaaagacaaacagcgcgattgcgtataaattatctcaaatcgatattagcaaaagatattactttctttgatactgaagctagagattcaaatctcatttttcacatatcaagcgatgctatcttggttcaagatgcaattggcgataaggtacttttactaatatatgaattcattcatactactatatggattcattataatgttttgttctgtttcagaccgaccatgttttgcggtatctatctcagtttacagcgggattctgtcattggtttcttgtcggtcccgcaactaacgctgctcacgttaaaagtggttcaactaatagcta

SEQ ID NO: 26950 - DNA, 1009 bp, Arabidopsis thaliana landsberg
gacgttctattattcatgggcgttcatcctttttcgttgttggagaatgagagggtggcccatacacttttgttctgtaggtaggaccgtcaaggtaatctaggagaaaatatattgtcgtcgaaattgattagacaaagcaaaataaaaccagaatgcatcacctcataagtcactagctacgatgaaagcaaaaaatgtacttttgaaagtaaaggtggatgtgtttttaactttttcagcagatggtcttcattcaaaataaatcaataataaattttgtggaatcatatgtttggtgataagatcacagttggatgtattcaaaattgaaccggtatgcactacatcgtaatattattgtcttgcgatcagatcgcaatgatgtgctgctgttattagtactaacaagctaatcgtaatttcaatcatcgagccaccaagaaattatataacatttcatttatcaactacatacagtatataaaaatttcaaatgcatctgatgaggtcatactttacttttctatgaaacgatcataccattctgtttctataaatacaactttttggatagaaccacaaaaaacacaactgatacaaaaggaattcattatatcaatggtgcatatatgatttggtaagctaccaagaatgaatatataatcatgaacaatgaatttttatgtgagatgggtgtgtatggctttgaagttctggacattcaaccgaaaatgggaaaaaatggattataaaaatcggaacgaaagtgattgtcggggagatttgattggcttcataatccttgtccaaattgctaactcacctaacacttaaacaaataaagacagcttcttcatatagggttttgaatcaaacgtctcacctaaaccctaaataaaggatccatacgtacatacggataaatatttgtaatccccaaaaatcgtttgtataatgaaaaaggataatatgattataacaaagaaaaacgacgaggtgacaacaa

SEQ ID NO: 26951 - DNA, 1145 bp, Arabidopsis thaliana landsberg
taaagctgtaacctcattctttattctgcgacattaccattaattaatatagtcaaatattgaaagaaatgtttacgtcatacacaaacactacactcactatttacaggaaacaattggaatagaatcatatgccacggcacggtctggtcaattatattgataacgataactctcttgttcctcaattaaactaatggctaaaaatatgaggttgattttaatttttttatctaaatatttagactcaaatttcaattgtatctattctataggaatttagccaaattatttataaatattcgtaatcatattccgaagaaaaaatattattgtttaatttatatctaaactttacttttgtttgaatattactcatggatatctcattacctatcttttttctacaacaaataaaacaattaaaaatttatctataaatatgaacatgttggtttctctatcgtaacacatttactatctacgaacgagatttagaagctttgttttctttcctttcgtttgctactactgcaacatttctatttttctgataaaaccatgataaattgtggagatgtttacaaggtaatcgaagcaatggttccactctatgtagccttaatcttaggctatggctctgtgaaatggtggcacatcttcacgcgtgatcaatgtgatgctataaaccgtctcgtttgctatttcaccctgccgctcttcaccattgagttcacggcccatgtcgacccgttcaacatgaattaccggttcatcgcggccgatgtcctctctaaggtcatcatagtcacggtcttagcgttgtgggccaaatatagcaacaaaggaagctattgttggtccattactagtttctctctatgcactcttactaactctcttgtcgttggtgtgccattggctaaggcaatgtacggacaacaggctgttgatctggtggttcaatcctcggtatttcaagccatcgtgtggctcacactcttgttgtttgtcttagagtttagaaaagccggatttagtagtaataatatcagcgacgtacaagtagacaacatcaatatcgaaagtgaaaaaagaaaaactgtggttgtgggagagaagtcgttccttaggtggatgtcccg

SEQ ID NO: 26952 - DNA, 1433 bp, Arabidopsis thaliana landsberg
  unsure (1)..(1433): unsure at all n locations
aaccgcaggcctctgatccacttctttataaaattaactttatatcattttatacacccctactctaaccaagggnnnnnnnnnnnnnnnnnnnnnnnngtggaccacatcctaattaataacaaaagtcttaacttcaacaacaacctataatgaaacagttgccctactacaaccaatcatatgtcatacacatatccacaacattcaactgtatcccttcataaactacagcaggtgtaacaatagatggaatcactgaattgcccatcgtggatgaagatactattttccggtatagaaactcttcttcagagaaaacaacatctcgagaaactaaaaacactcgcttctccaaatcaaacaccttatatgctttctgtccatgaggataccctacaaacatacaacgacggctacgactagcaaacttatctcccctgtgatcctgattatgaacaaagcacaaacatccaaataccttcagatgatcgatcattggtggtttaccattcaacacttcatatggagttttcccctgaagaaccatagacggagttctattaatcaaataagcagctgtaagtatactttcaccccaaaacttagtcggtagatccgcctgaaaaagcagagctctggccacgttgagaatgtgacgatgcttacgttcggcacgaccattttgttgtgatatcccaacacatgatgtctcatgtaatattccactacgttgaaagtatgacttaagacacatgaactctgtcccattatcgctccgtactgttttaacaggaacctgaaactgcttttccaccatagctatgaaatcacgaagatgttgggcaacttcactcttttctttcatcaaatataaccagactccacgtgagaagtcatcaactattgttagaaaataacgtgctccacttgaagcaacggatcgatacggtccccacacatcgcaatggatcttctcaaaaactgatcttgttttattactactcaaaggaaaactttctcttgcttgtttggcgcggagacacacttcacacgccttgcataaactttcactgtcttcactaaaatcaacatgcggaagcaacttaacaactctagaagatgggtgccccaaacgtttatgccacacatcaaacgtctgtctccgaacagcagaaacaacagcagcggactcaacagctctaaagtagtacagcccatcaatcctctgtcctgtcccaatcgtcctcagcgaacagtcttgaatcacacaagactttgggtaaaattgagcaaaacaatcattctgatcaatcatctgtgaaacagaaatcagatctgcatcgaggtctggtacaaacagaacctggtgaagatggagacatcgaccaaggacaacattaccagaattggtagctacacgttttctacca

SEQ ID NO: 26953 - DNA, 2199 bp, Arabidopsis thaliana landsberg
  unsure (1)..(2199): unsure at all n locations
cataagtggttgtcacttgtaggaatgcattctccttagctaagaacaacctcaatgatgagatactcgagtttcttaatgatataattctaatattttagtactaaaacaaaagctaccactaaaaagaaacaaatggtgcatgagtctctcaaatgggctagcgaagtctcttgaatgtgaaacttatctggttttctctcatgctgttttcaatcattcttgagataccctacgagagacgagcgtttgagctgctccaatattattactcgtatatctatttatcttgcaaggtttttatgcattgctaatttagaacgttaaatgtttactctaaatttagattgctattttctttctagcagagcaatgaattaatatatctatgtatttctttgatcatactattttacagttctaatttgatacaatattgccagatatttgtcctatcaacaacgacattcaaataaagaaaataatccatttatatccattaatacatcaccagcttagtactaataataggacatcataggttaaatataaattgaacactaatttttcacttagagcggtaatcaatatttttccagagtggatgtaagttactcaatacttttgtgtacaatgttcttgtgatgtagatatgcatatatatgattaaagtggtggtgtggtggcttagaagttaataattggtataaatccggtctagaatatggtggagaccgtggtagtaaaagcttgataggatcccataataagtatcggagatgcacattttagtttgatgcatcggaacagacgtacatgttattgtgtaagtgtaatatctcagatcttaaatgtgttactgatgagtgcttgtgttgtgtgaccctttcccatttatgtactcaatttatttatttttggggctttttaacaacaatgttttcgcggaacacttatgataatgttgtatatcgatgcagtatagaggaaacaattcatctagctgtaaaattgcactatttatcatagacccgcgatatagaggctaaaaaatccttctagttatgaaaatgtaattccacataattgcatgcttttcactctagttactttgatttgtttcataaatattttcggataataacttgtccttatatcttttatttaagctttattttaaaatcaacacggaaagctcatattcaacataagcaaaaaaaagaacaaagaaacgcaaaaagaatgtaaatgaaaagaaaagagaaaacaaagcaaaagcaaaagagagtgagagaggtaaggctccacactcaaactcttcactctcactccttcctttcctttctctcttaccacttcccaatggctctctgtctccaaactctctccttcctcctccttcttctcttccgttcctccgctgcgatgtggtgcgttgctcggttcgatgttacgaccaagcgcttcaggcggctctagactacgcatgtgccgctggagctgactgtgctccaatccaacccaatggtctctgttttctccctaacaccgttcaggcacacgcatcttacgctttcaatagctacttccaacgtgcagccatggctcctggctcatgtaacttcgctggcacatccactatcgccaaaaccgatcctagtatgtattttacagaaacatggcttaaccggattggttaactcggtaaaactgtcataatagttgacgatgtttctagttaggcagtttattttttttttcgttttgagaattttgcattattcatgttgcatacattttctcggtttatttttactttttactaacaataagctttgtgtataagattgtttgtgttttaactcgctctatttttgtttattattgtgtaggttatggatcatgcgtgtatccaaattctgtgcggtacgtaattttttatgctatctgtatattttgcatatattactcgtaaacagtaaaaactggatttaagtttcatttttctattaatatatttacgaactttctcttcgtttctgatttcaatatgtttaactgataaggaactccacctcacgattttttcattcatttgactgaggatgttgngattctattatatttcatgcgtcggactaatttgcatgacttattatatgcatatcccattcaatgtttttggacccgtggatgatc

SEQ ID NO: 26954 - DNA, 967 bp, Arabidopsis thaliana landsberg
tataaaactctttaaaatcaaaatctaaaacaggcccaagcccattcataacaaatccctaatatatcaagtaaacctagctccactcaaaacctaactatataagcttcacacacactcataacctcttcctcatcccctcaaaaaaccctaagagtagagactctctcaatcccggcggcgaagatgaagtacaatccaagagtgacctcttctcgcaggaagaacaggaaggctcatttcacagcttcctccagcgagaggcgtgtgataatgagctctcctctgtccaccgatcttcgtcagaagtacaatgtcagatccatgccgatccgtaaagacgacgaggttcagatcgttcgtggtacttacaagggacgtgaaggcaaagttgttcaggtttaccgtcgcaagtgggtgattcacatcgagaggattaccagagagaaggtgaatggaaccaccgtgaacgttgggattcagccatcgaaagttgtgataacgaagcttcgtcttgataaagataggaaatctcttttggagaggaaagctaagggacgtgctgctgctgatattagaagggtactaagtttacttctgaggatgttatgcagaacgttgattaagtgcgagattagaacttttcttgaaaggttttttatcttatagattttatcatctcatcgctctttttattttaagttttgtttcctggaatgctatcactgtttctttatggtgttggacatgagaacctatgttttgattttgaatatttgaagtttggttatggaagtttgtctctctgcccattttttggtttggtttctttatattgatgtgtatgtttggttaagcttttgattgtgttgaatgtgttgagattggtgttgacgttcgtgcgttaatctgtgtatcgcaatgaatttgatgatattggtcatttatcttgtggctgaaaagattc

SEQ ID NO: 26955 - DNA, 2167 bp, Arabidopsis thaliana landsberg
  unsure (1)..(2167): unsure at all n locations
acacaatatacgaattactcacctaccccatgactctcaagcaaatagaaatttctaaaccaaaccgttgatacataatttcactcagatgctggcttactttacctctactccattagagaagatatagaaactttcagaatcataagcaattagagaggcaggaagctttgcggaaaaccggtttataaaccaagatcatctaattcgagtcactatgtaccgacctttctcaaggtcgtaaatcgttttcagctgcggttttctccacttagttaccaaatataccaaaactgtcataaggatcggtatcccgatgagatagtgaagcgtcttcgggtgattactgaaaagagcatggaaccaatggagattaccagaggctgcatgttgagaggtctctgttgcagtctgttgaatgaatgcacctaaagcccaatcgagcggtatgtctcctgcttgattcgcatatccgattctgcccaaaaaaaaaaaaacggtttttatttgattgaatcatgtttacagccattaatctaagtctttggttagggctcttgaattttaccaacatacctttcatcatcaagaggaatgccaagggtatcgtgaagcaatgacacattatatgcagatgagaaacaataccgaagaagatcctcttcatggagtgatgggtcttttactctcaactttgaccaatcttctccacagaatctctctccggctgaaatcatattagatagccacgctttttctcccaacccaaagaactgatcaagacagaaattaaagaccaatgttcaaacnattctcctcacattcagacggaatcttgacatcgaccaacatgaaattcaaaggattataccttggatgtgtggaagaaattctctgttgccaaaaaacttccttgaatattaggtgtgaatgttgatccaatagaacaatgcttataagcacaattctctgtacacaaaatgccaaaaatatagccataagagatcaaatattcccattataaatcatctatacaagtaatgctatttaccttttccttcttgcaacattgctaacgtagcggatcggcatttcgtgaaatcaccagcagcttgaacttgaagggaggctttaagtttgctttcttcagataagaatccggatgaatctttctgtgaatgtgtgtcgtatatgtaccctttaggagtacaagggtcttcaactattccatcccctgtagagtctgctactgtatggaataaaaaaccaaattagttttgaggtaaaagaagattatttccaactcaagagggctattactaattagctttaacaaaaaaaattccaatttcagtaaactaatgattactttaagaagttatcaacaactaacctgagttctgcagtgattccaatagcttgtcttctgctgcatcctgcacgatacgacaaaagttagcaaaaccttttggtagcattttctacaaggaaattttaaaaatcagaatattattaagtagaaaactgggacgcaatttccacttaagtttccggataactttttaaaaagggtgaaatcatagaaaataagtactcaaaaacatttagacaaatgctctgctctcagaagttacctgtccaaagtcgaggaaactgtgactgtagattgtgtacgaaacatttccataagatatggtacgggagaactcaggaggcacatgctcacttggcacaaatgtcacctatacaaatacagaaaatggcttacaatcattgtatatcgtactagtatctttagtctttgatagttttggactaacagaccctacttttcattgtatccataaaatccaaatcttttggatgcaattcataatacatccaaactagtgtagtttgacaaaaggaacagagccaaggacactttcttctggataacaaatttgagaagggaaagagtctagacctgcgcagaagccccaccaagttcaaacaatccccgttgttttcaatggatcaccaccaagcgaaccaagtgcgtgattggcaacaagccaacaacccaagcatagataccttcatcagttcctgaataaatttttccccagtaattagcacttccaattgccaatggatatgtgcacatttactatcactcaactaagct

SEQ ID NO: 26956 - DNA, 1079 bp, Arabidopsis thaliana landsberg
tgctgtccagatttcaatggctatgaacactcactaactcattcactctctctctctctccttattacaaaataaaagaaacatcaaataacgcagaagatctggagaagaactaaggacttgaaacttcccataaagctcgagactttacgacaatttacacctccattatttccaatggctatccaccttcaggctttaggtcatggtactcactcttgtcagtgtctgtgctgttcctcggaggatctgaatctcttgttgtcccgttctgactccttcgtcttctcctatcctgaactcctcaaaattggtaaaaaagcttcagcaccaaactcaacaaaaagtatatttggtttaaagacataagaagcagtttccaaagtggtgatcttttatcttattcatacctctctagcagattgggtattcttcggattcaagcatacgtgccacctggctcatcctcgggcttttctcagacattggatcaacacatctcaaagcagtcaatagtgttcttttcaaagcacttgtagatggttttgtttcaaggtttggatcaaccacttcttctgatcgtctttgttggaccatcatcttcagccactccaccaaatgtacctacaaaatgaaaaagaagaaatgtcagaagactctcttgaggcagcagagtttatgtgtttgtgcaggttcttacgaaaatttttacctcgggtggtggacgagcatagtctaccggatatctaccagttatagcttccaagagtacaaccccgaagctgtagacatcgcttttctcattcagaagaccggaattcgcatactctggagctacgtaactgccaaaaacaaaaaaggttagttattttccaagaccaacaatattttagtcttcaaaagtattatgtcaaatgatataaagagagagatgcaagtacttacccgaaggtacccataactctagtagttataaaactcttatcagcaccaagtagtttagcaagaaaaaaaacagaaattttacaattgaatttgtcatcaatcagaatgttactagactttatgtctctgtgcac

SEQ ID NO: 26957 - DNA, 703 bp, Arabidopsis thaliana landsberg
tcatcatctaaaaacgaaatttggtttattgtgtgatgttgccaaatagaaaatagagaaagaagttgatagtatcacctctgttgttctgctttacaatagttgagaacttgcaaagttcttagcacggtgtgcgttttgtgatgcttattggcaataccatcatatttagaacattgtgcatttcctggcctttaaatgttgcttggtggtttgtgtgcaagaagtttctttgttaacttggtagatgtttcccaaacaatcagttttacttgtcgtatcgtcgtccttttaaccgagatatagtatgattggggttagtagtgtaagagtagtttactaagagcttttgtgagctttcttgcatttgaaaacttgacatattacttgtgttaagataattggtttctatatcttcctgatcttgttgacaatattagtgttcagaaacttatactcggaactcttgcgttacaaaatctgaagttgtgtccaattttggtttgattgcaggttgtatcaccacaaaggagcttgggactgtgatgagatcacttgggcagaacccgacagaagccgagctccaggacatgatcaacgaagtggatgcagacgggaacgggacaatagatttcccagagttcctgaacctaatggcacgtaagatgaaagacactgattcagaggaagagcttaaggaagc

SEQ ID NO: 26958 - DNA, 1673 bp, Arabidopsis thaliana landsberg
  unsure (1)..(1673): unsure at all n locations
ggaatgactctccaagtactctagcaacatctgtcttctgcattctgtctgaaacattcatagattttgacttagtaaggatgaagtaaaatcttggaacatataatctacaatggaaacatacgattaattaacagagtttgctttcccatttcgcgttttaacgatattaccttgagctcacagtattgctgcatcttctttgcctgagccatggctgacttaaatctatccatgtttctgccttgtccgtttcgtaacatgcaaacgactctgctgaaatctttcttctggtacaagcaaatgcactgcgcttgaagcccgtcccttcctgctctccctgactcttggtagtaactttccacagctttcgacaaggtgttgtggataacaaaacgctgcagctaatacgatttaagaaagaggatcgtggcagaaaatttgcaacaaacagctatgcataggcttgacttaccacgtctgctttgtctattcccatcccaaatgcgatagttgcacaaactattcggacttcccctgtttgccatttcctctggacatcaactctttgttttgcaggcaccccggcatggtaataaactgtctnnnnnnnnnnnnnnnnnnnnnnnnnnnnnnnnncatccacacattcacttttggagagacagtaaacaatcccagactgatccttgaaccgatctcttagcagctcttggagctgtttcagcggctcctttgttttgacgatcacctcatacttcaagttgattctgtcaaagctcatcctcagaaccggagccctgggaattctcagaaaatttagtacgtcctgtgtgtggaaaagaggatcagaatggctatataccagtgttcagatcataaagatccgctacatatgattaattgagacccggagcaatgaaaaagctcagagcatttaaatctgttcccaattttaagaggatctatctctaatcatggtgatggttattacctgacagactgattcagttgccgttgctgtaagagccatcacaggaacacggggaaagttctgcttaagacatcccagttccctgtagtctggccggaagtcgtgcccccattggctggaaagaaaaaacaacacgttcatgtaaatcacaaaggaaaaattcttcaggtgcaggcagaaatctattttgatattaaggtgttggtgatgaacaatcagagaacattagtgtagaccacaagataatgtgtgaaagaagggtagaacagtattgtacctcacgcagtgagcctcatcaaccacaaaacctgccagcagtccctgtggttaataaaggaaaatgttaaacatttttcttagagctagaatttggttgttatcgaattatgtaacaacaacaagaaaaactgaacaggctaccttgcggtctaaacatcttagtgtctccaaaaaggatgaacttccagcgattttctcaggtgtcacgtataagagtttacatgacggattatctcttctgcaaacaaaaatgtcaatacaatctccattaaaggaaaagacagataaatgatgcataagatacttggatactgtgaaaatgaaagacatgtagaaaggatcctcacctaagttcttgtaatacagctgctgcttgagaagatgtttgctgagagttgag

SEQ ID NO: 26959 - DNA, 949 bp, Arabidopsis thaliana landsberg
caagaagagatttatctgccggcgagaataataaaggtcaggggaacaaataaactctttaaatctttttttctcgtctttcttgcttcatgcatatgttttgagcaacaacagaaacaaaacttcaggagaaaattcagtcaccaagaacaaatgatgggccaggtaaataaacaaactctttttctcttcttctcgtgtcttctaccttatgcatatgtctctgagctatatacggtaaattaaatataactcattgcacaaaaactcataccacgtttaattaaaaaaaaattcataaccaaatcacaacacaagaaacgaggaaaacgaaaacatcacacacgacatactactttcaaaatacactcaaacgcaacaacctcaaatacaacataacaaacgagcaggaaaaaaacacacaccacaaagtaaataaatcacaacgtcgtgtgagtttctatattatacatgtaaaacgttgagtaaaccaatatacattctttaaaaacttttatccttttctgttatgttatattatatatttatacacaaatcgccttaaatcacatacatggcgactagtccctagctctttctttcttgaacactgattattataacacaatcatatgttcttcatttgtcataatgggaacgcttaactaaaagcctacacaagacaatcagatatgcaaaattaatgataattcttcttagatttgtttttgcagaagctaaaattttaacggattatccaaattatattcaaatcatccaaggaataatgcggttccaataaaatcataaactcagcacaagaacaacagtttcagtgggaaaaaagcctctttgcctttatctgttttcttttggactttacgaaggagaaagcttggaactattaagttcctacactgaagaaagtggagaaacgggcatgggtcat

SEQ ID NO: 26960 - DNA, 958 bp, Arabidopsis thaliana landsberg
gctacttcgggctgaatgatgaagttcccttccctaattggctgtgttacgttagaagattaatgagacattagaaaaagaagtgatgagttcaataatttacaatgcattcatgagtttacaaatagaagccagacctcacgtataagcactgcaaacctgccctcgcagattcttacgcgtatgcagtcactatctgacaactgaccattcgcaggaagcccagatagcctgaaatatatatcgataaaattctgaacggaactgcagaattttgtcgaatcaaggatgctgagaatatcctgatatggaaccttatcaaccacatgacgagtcgtgagtgctgctgtaaattaaggaagttcagaatgtgattatattttaacccttacttgtttattgctcttcaatacaaacaaagagctctcgggagagagaactggatcaaaatcatttcgaatcttaacctgtatcattgggaaaaaaacttgttaagtatcgatacagatcatatatactcaaaagtttatagaattcagattgctttttgtttttcactagctaatggtaatcacaaaaacgagtaagcaacagtaacagattcaaggaaagattgtacagaacaattcactagtaggtgaaatctaaaatctcaggtgtactcacatgtgcatgcactagatgtggctcgatgtgttgctggaacattggaaatacgggcatcattatctcgttctgagacatgaaacacccgattcggcttttatccctctggactctagagataagatgtgaatgaacacctcccacctggttagtgaaagaaacaaaaatcaatatgtttttgataagaaaaatattttgtgaatggaaggtataagaagggaactttaaagttgaaaaggtatttttacaaccagcaaccccaaaagggtccaaaagaaatttgttctggttt

SEQ ID NO: 26961 - DNA, 1377 bp, Arabidopsis thaliana landsberg
cctcaaaattaataattgttctcaagacaaaaccagatgtttatttcccttggattgataaatatccggcggctatatttaccacttttacttttagagcgttatgctgacaaatgtcaacgattgagtggaaaaatctactacaactgagacatcagaaccgtagacgtgtgtatttgtctctattcttcgtcactgccgcgtaggtgaaacggaaaaatcctttacaactagcaaaaccaacgcgggacttaaagtagcgattgcgttgatctgcagcacacggcacgtttctttgattccttcctataagaacgcgtttcaagttttattatcatacactaaacccatctcctatttatactttcttttgggtttttttctctccttcattgaagtagcgtaacattgaagtaagcggtaacatttcggaagaatctctttctttaggtgagttttcgttaatcttcggcgagtttggttaaagtaatggtttttgttctgtctttgcattcttgagatctattgattcggattttggattcagaacaatgttattggtttgctcattgtttcagattactaactttgtttcttctttctgtgtgttttcagttgatatgagccaacaacgtacacgctctcggaacccgttcaagattctgtttacgaagaacaacaatgctcgattatcgccaaagcttctctcactgttgaacaatttcgagactaacttgacggtatcgattagagaacttgtaccaaaggataagaatgatatcgttagtgtttcttggatgatacaagccatggagtctctttgtgagacacacaagagtatcaggacgctcgtcaaggatttagaggttccagtatcggatttggaggagaatttcatttatatcttctctgactttagcttgaagcgggaactctgcaacgcctttacctcagagatatatcatttggaacatggcaatctattactaaagtttgcttttagtaagctggagacaaacagtggcaatattcttgagcgttggaatcagcacatggtttccaagaacccgagtatcgaaaactggggcgcggttttgagtaggcttgttgaatcgatggatcatcatcatcatatctccaagaagtggaagaagaaatactctgcggaaggaaaagttctcttacgagttttatacggtgtaaaggtcaagactttatacatattcagcgtgtttgatgcatcgttctcgggttcttccaagaatctcttctatctaaccattccaaaggagatggaggagcttccatgggttcaagctttcatggaactgcagaacactattaacccggagatcaaaaacacatttttatcagacg

SEQ ID NO: 26962 - DNA, 1308 bp, Arabidopsis thaliana landsberg
actcaattacggaaataagaacctagcaaatttctcactccacactatcaggttcaagcacaagtaaagtcaaaggttttttttttttttttttttttgcagaatccttctataaaatatagtcccgagtctatagccgacaaatcagtttaccatcatgatgtgaaaatccaaaaatcaaggggagaaatcaaatcttttaccttttaggaacttgtctttttcttgaaaatgttcattatggttattgtcttctctgaaattgagtgcaggaagaattctccaaaccttgtgcttatggtaacctaaaccctaattacattctagtagaaagtgaagttgatcaatggagcgagagaaaagagataagggtggaaaaaaggtgtcctttcatcttattcctgagtagaaatgtttttagccgttaagggctcaaggcaatggcactataaaacttcgccgttacacttaggccggggtactctcaaattttggtatatctgctatatgatctgactctaatccttaggagtattaaaattaattatctatatttaatctggaaaaataaatacctgataaaaattagtcgatttgctgaataaccgataaaaataaatcgatttgttgattacctgacatattatatttatccatattattacatttagtttatatctaaaattatactactagaaattcaagtctcctaaatgttttttaagaccatcttcattggagatgccttaaatataaaagaaaaatagagatctctattttaaagataaaaatagaaattggttagaatgaaatagaaataaaaatagagtataaagttaaaaataaaaatgagttaaaaatgctataaaatgcaattatcacttttaatatgtttcattttttattattatcttcttcttttttgtgaactcattatttattgttatcttactttaatttttctcacatagtaagccaattttattccacgcatgtggtggacaaaggagtcaacttctcctagtgggccaaagagcgtgggtcgaacatcaagccattggctataagaaaagttatattactttctgttgtttttgtcggatttctttttctgttttattacatatagttgcatgcgttttattaaagttctttcttttttcaggttaatattaggggttgatttactcaataaccatattagatacaagattcacaatttaagaaaggaatataccactatattttataaaaataaaatcaaaaattgtagggtaaatcacccttttttcaatttggggtatttta

SEQ ID NO: 26963 - DNA, 1769 bp, Arabidopsis thaliana landsberg
  unsure (1)..(1769): unsure at all n locations
cgctaagcagaggcttttcatattcaatgtatattataagatctgcgatccgattaacataaggttttatttttgtttataagaattattcttcgaagtcattctctttggtcactttggtgagaatctgatcggaaagagagattatatgggtcattgcttttcgttaccgtcttctcaatcggagattcatgaggataatgagcacggtgatggaaatgtggtgtgttatggagaagagttcggtttagatcaagaccttccggttcatcgactcggttcggtctgctccatacaaggaaccaaagtgcttaaccaagnnnnnnnnnnnnnnnnnnnnnnnnnnnnnnttgacattatttttgctatatattttctataaatcattaccatagatgaccaacaaagtttaggggtagattcaaatgcgcataacgtaaaatctgtttgaagtgttagtctcaattttttgtgtgttacttgtgaaatatatttgaagttctttgatatcaaaaacataatgaaggattttcaattcatataaactttatatataaagaaatgtatgattgcattaaaattacattcatttcacatgacatttctcacgcagattgaaaaatgtatttaaagtttcatatatcttattattgagtagaattaagtgaactgattagatttaaatagtagaaattgtttaattttaatcccgtaggatcatggaacaagagatacagagctatgtggagtgtttgatggacacggcaaaaatgggcacatggtgagcaaaatggtgaggaatagattgccatcggttttgttagcactaaaggaagagctaaaccaagaatctaatgtttgtgaagaagaagcttcaaaatgggaaaaggcttgttttactgcctttagactcattgatagagagcttaatcttcaagtctttaattgctctttcagtggctccactggtgtggttgccatactcaggtacattattttctctgtttccccgcaacttttaaaaagtgtttgaatggtggtaacggaccattcaattctgtggccaacagacaagattagtgtttcttcttctgctgcaaagttttgttttttcttcgtatgcaccaatatagacctaaacttatgaatagtgaacaaaaagccaatgtctagccaaaaaataattattcactttttttttctgctgccaccattcaaagcctaaattttcactagttggagcttactggattttttattattttgttttggtaaaatgttaaattgcttcagggagatgatcttgtgatagcgaaccttggtgattcaagggcagtattggggacaatgactgaagatggtgagatcaaggcagtacagttaacatcagacctaacacctgatgttcctagtatgttttttttactcctttttttggctaaggaaaggttttattgttagatggttgatgatatttatttagcgagttctagcgtttcaggtgaagcagagaggatcaggatgtgcaaaggtcgtgttttcgcaatgaaaacagaaccaagcagccaaagggtgtggttaccaaaccaaaacataccaggattagccatgtcaagagcttttggagatttcaggctcaaagaccatggtgttattgcggttcctgaaatctctcaacaccgaattacttctaaagaccagttccttgtactcgctactgacggggtaatagcacatatccatcattcaaatatagatttttttgtttt

SEQ ID NO: 26964 - DNA, 1248 bp, Arabidopsis thaliana landsberg
ttacactagtaactctgagaagtggctctatggtgacaactaaatccctcttcctcttgtcttttgaaatcaaatcacattggtttttcttttcttttcttacccatacaataaaaacaagaaacagttgttacggattgatttttccccggtgaactcagtaaacagagcataagcaataagtatgggatgtttgaatctatattgttcaattcttctctcttgtttcatgttttaagtagaataactattctatactataataatgagaatacagtacatgagataatacactttaacagagcaacaaaattaaacaaaaaataacaggcatacgcttcatggctcctgagatgagctgaagcagctcgctgggaagtccacttggtaccgacgatgtttatcaacaatgaaagccatgaatgtagcaaacatcatgatacatataatcgatatgtatgcacagaggaaggtgagcactgagagatagctatttgcgtcatatgaacttgggaatatagtgctgtatgatgctaaagcagcgatacttaaagccgccactgaaccgtaaagtaacttccacttggggagtccaattgtgatgattattatcacatatagagatgatacgaaggcaaatccgttgaggccaataaagaaaaaggcatagatgaacggcatagtcatctgcccagccatgtgaccatacctgccatcatttgtatcctgccaaaatccgccgggaggactgagaccagcctggtatgtagctgttactatcagtatagccaccacaagtattgcattgcgtgggtcactagcgtttatagacctgtctttagtcatgctcaaattgcccagccccaagagagagttccgtttctcaataaacgaaagatttctgctcaaatatcccgcaagagtcgttgtggaaccacaaaatggtctttctttagcacttcggagaagtttttttgctacagggaaacatggagattggtgagtttgaagtatgtccatcgcggttttgccatccaagttcttggcttttactttaacggttttacgcagcaatttcatcacctgcaaaaattgactacacctcaaccaacaattcgaggataaagaatccttcactgataagaataaaatgcctatactaaggtcatgggaacatatttatccattttcatggaccaaaatgattctcttacctcagtctgatttatcaatgcagcgatatgggag

SEQ ID NO: 26965 - DNA, 1655 bp, Arabidopsis thaliana landsberg
gtcataatcgtacaaattggtatcagagctccaggttctcgtggtttctgtacgttgttacaaggatgacgaattcgttgatcaagatgtcggtgttcgacggaagtggtgacttctcactttggaagacacgcatgttctctcatcttcgaatcctaggcttgcaggatactctagtggaacaagctctgttcccaccactgaaagaggaagatgaatcagatccggagaagaatgagaaacatatcaaagaagaaactgggagaattgaacgatgtgagaaagctatggtcattatatttcttaatgtcggtgataagatactgagaaagattgatcattgcaagactgcagcagaagcatggatgttgctagaacgattatatctggtaaagactttatcaaatcgtgtgtatcttcaactcaaggtttacaactataggatgcaggaatcgaagacactagatgagaacattgatgaattcttgaagatgatatcagacctaagtaatttgcagatccgagtccccgatgaggtacacacgatcttgattctgagttctcttccagccaaatatggaagagaaggactacaacttgaagaggtaataagcgcagcaaaatctaagaaattagagtttcaggcagaatccagttctaagtctacagcaaaaggaaatcagaacaacaattcaaaataaagatctcaagatggtaagaagatatgttggatctgtgggaaagaaggtcatttcaagaggtaatgttataagtggctagagaagaataagtcaggtgaatctggactggcaaaagatgatgctcaagacttggttggtttagtagcatcagaggtaaacctgagtgagaatcagcttgaccagcatgaatggattatggacaccgggtgttcttttcatatgacaccaagaagggactggtttgttgagtttgatgagtcacaaaccggaagagtgaagatggcaaatcaaacatattctgagatcaaaggcattggaagcataaggattcagaatgatgataatacaaccgttcttctcaagaatgtgagatatgtcccaagtatgtccaagaacttgatctcgatgggaacattagaagatcaaggttgctggttccagtctaaggctgggacattaaaggttgtcaaaggctgcatgacactacttaaaggaaagaaagttggtactttgtacctcttgcaaggagttgttgtaacaggaaatgcaaacgcagttacaagctcaaaagatgaatcaaagatatggcacagcagattatgccatatgagtcagagaaatattgatgtgttgatcaagaaaggatgccttcaagctgaaaagataaatggtctcgagttttgtgaagactgtgtgtacgggaaaacacatagagttggttttgggtctgcaaaacatgtcacaagagagaaacttgagtacattcactcggatctttggggagcgccatcagtaccaaactcactaggtaattgtcagtactttatcacgtttattgatgaccttacaagaaaagtatggatttattttctgaagaagaaagatgaagcttttaaaatgtttgttgaatggaagaaaatggtggaaaatcaatcaaacaagaaagtgaaaagg

SEQ ID NO: 26966 - DNA, 759 bp, Arabidopsis thaliana landsberg
ttgaaagcattttatttttattttgacccactagaagatattcaatccgaaaagtccctaccttttgaaaacctataactgcagcaaccaggagcatgtgccaatgttttatcagtacgtccattcctgtggcaaatccgccggtggttcttggtggctctctgccgacatctccatttcgtacggtgatccactttgtacccgagataatgaagtatttttgttacttttgatctttttgttgttcatggacaccaacaatgcatctatatagtaaagcattttaagcatcatatatcgaaatacattcaatcttactctgtaataatacttaaacctctataaacccaaattttttaactcctaactcttaaaacttatttgttaactcatccaaacaaaattgtattattcctttaatcgtttttcaaatagttagcctattttttaaattaaattttcttcattttttttgtttgtcaatcatcccttatttatctaattcttgtaaatcataactttactttaaagaataagaaacacaagaaatgaaattaggaaagagataggtggggttggtaccatgaaaaggagggatatcagaagagaatgtagaaggaacacccaatttgtcaaagtgaactttcaaggcttcaactactcttgctggtattattactgttgaacatcctgcaaccaatttatttccatacacaaaagtcaaaaccaaaaccaaaactacatctaaccaaacttaaa

SEQ ID NO: 26967 - DNA, 1784 bp, Arabidopsis thaliana landsberg
ggactacatttcccgatccaattcgtcgtttaaaagccctagcttcttcttttttcgacgatcaaaagtttcgatttttcagcagcaagatggtgaacaacgttgtctctatcgaaaagatgaaagcactctggcactccgaggttcatgatgaacaaaaatgggcggtgaacatggtaaccttcatacattctctctttcgtttaattccgacttgattgtctattgaatatcgaagtctcgattctcttgtatgtttcatgattagattctgggctttcggctgaatttaatgagttgtacagcgattttgaattacggtttaggatttacaaattgattcaattgagcgtacaatgtgattcttttgtctttcttatgaaattgtgtgttcgaatgggaattgaatttaatgagttcgttttgggtttcagaatttaacgtaggattgattttctctcctatgcttcgataggccaaataagatgaccttatcttatctctgtgtcttcttcttatgaaattgtgtgttcgaatgggaatgttgggtctcttagaggtttagggtttatcaatcacaagttaagttcatgcctttgaagtatttggatgttcgaatgggaatttggggatgttgggtctcttagagatttagggtttattatagttcatgcctttgaagtatttggataaaaaactgtctcatacgaattccttttggttgcagaaacttctgcgagcacttggtatgtttgcaggaggtgtcgtcctcatgcgtctctatggggatctcatgggagtttgacaagaagaatggaggatcacgggagttcgagaagactggaggagcctatctttagttttcactctctcaaactcttgtattttcttctctagaattggtgtgaactcgtttctgatttgtgtcttgggatgctataaaagagttaattttccattcacatccgcttcgtgattgcattttatcatcgacaatttcattcaaccagagattgttttacaaacttggcttgtcatgatcgacaagcaagtacattttgtaattaacaaaggatcaaaagactagaacatagcaatacaatctggatctgcaacttcacttcgttctaaaactacactgccttatgatatctgcgatcatttaaaatgtaaaactaaaacctagtgaatagaagaagaatatactttcaaacaacacggagtttatcttctattggcatactagatttctcagaggaatattcttaatgctgattgggttgttacgattttttggctaaatcttctaaagataagttgcaggtctatctatataatgttggattcatgcagtgtggtcgttggaggaatttttctagctcaaattcagtcatggccttcaagtgtaagtgtcaaatctccattgtttctatgtctaagttgattctctcgttaaagcaatttttgttataatttttgcagatcttctaccattgcttttactgtcattgttggttgctaattgtgcctcaaggcctttgtatcgtctcccaagcgaagcaaaacatgcaaccaagaaaccacttcagacttcccgtccttacaaccttgcacacagaggatcaaacggagagctccctgaagaaactgctcctgcatatatggtattggatctatacaaaagtctcttacctttacactaattttgtctggtttacaaggtttttttgattgcagagggccatagaggagggtgcagattttatagaaaccgatattttgtc

SEQ ID NO: 26968 - DNA, 1680 bp, Arabidopsis thaliana landsberg
agatatttataacttaacaaaaaatcgaggagggactaaaaaataacgctcgtaatttagccctagtacacttgatctgtgaaagaatctgattgttcaagaacttagacatgaatctataagccttttgagtcaagtgcactccgtcccaacttatgaacttgtgtggattctgacacaccggaactcccactgctccgtatggcctctttccgtcgtagttgtaagctccaccggtcccgcaacacgatttcaaagctacactcttgtcgaatatttcacttcgtagaacgtattgaaacgcattgtagtaatctccgtatactatagccacgtctggaaactctttttcaaagaagctatagcttcttggagttggttattgtgatccattgcgaattcgttgagatgcgtcaagcaaccgttgtcgtcgtaatcttttgtatctttcacgggaaaagacgtcaagtaaatcggaaaacatcccactggaaagtttcccgggacgaccacgttaaccgcaccagcacggatcacctctctagctgcggctgtgatggctccaaccacgtgagggatgtagcttctgatttcttccattggtttgccttggaagaaaccgtagttgtagtcgttgcctcctatctcaccgaccatgaaaagagagtgcttcaagcaatccgaagaagagccgtgacacgtggaacgtagatgacccttgaaccaagcaagctgcatggagagaggagtgtttgttgccggaacgtggagatttctctcggagaagaaagagctgttgagtgctgtgcttccggaaactgcgaagttaacaaagacgttgtgttcccgttgaggtaagggtttaggagtgggagatgaagcctgcgtgccaagtaatcgatcattagcagtccgttagatagacgaccggtggcttggtgaaagtatgtttgaccgtatggataattagcggcgtgagaagatctggctccaacagggccgttgcggattaagtttccagtgtcggagatggagtcaccgaattggtagatagagttgataggacattgatccgatgaatgaacaagggacacgaagagtataaacacaagaagcgataatgctttggtcgtagacattgttagagaagtttgagagatttgtttgttggttttagacaaagagaaggatgagagaatttgttgcttatgtgtgtgtatatatagagtttcataatctcctagttagtctgtgatttagatagatatattcaataataattattgatagtgataaattcaagaaaaatatttgatagaacgagatctgagaaaatatgtcagaatttttattatattttatattattaaaaaacattattatttaatatttaatcaactagaatcaggcaaaacgaggcaacgtatcgaaaattcctctttttattaatatcaatattttgcctaaaacaaaaaggaaataaatattaaaacgctttctttacttttttattttcacctgaaaaattcgaaattaagaatgaaaaaggagatttctagagagaaagctctgagggcttggactttgcttcacctcatcttcttatagatgatctgtttcggtgcagagagctcttaaagaaacaacaacctttctctctgattatcttcgccatttctc

SEQ ID NO: 26969 - DNA, 1673 bp, Arabidopsis thaliana landsberg
  unsure (1)..(1673): unsure at all n locations
aaaattaaaaataccaatttccctataattatttagggcatattttgcaccaaaagaacatttagtttttttgtaaatcttgttagtgaatatatggaagtgcaaagatttttttttttaagcaagcattatgctaataattaatgtatatttgttgtgataaccttcattaaagattcaacgtgcttagtcgttaacaaaacttgtacaaaagcgatgtcgttaggtgaataattaatgtatagaatattgtttaatcatcatacatacaactaactcgttccaatcatgttagtgtatgttattatgactatatgtgtacagtgttagtgaaatattaaaaccaatactcgatcgataatgaccaatttgcaattctttaacattttttttttttggtgaatctctttaacatttttgttttgtaaaaccgtgaaagactacataactttaaagttttaattactctctaaattttaaatatcaaaagtaatacaatcaagggcgtggaaatcgtgttcttcgaacttctttacattgtttgtggttggccatgtgaagtgtaagccgcttgagtcttgacttgtttgtctttgctctttgtttattattacaactaattattaatctcagtatggcgaattaaaaaatcatattatcattttaatctcagttaaaaatcatattatcattttaatctcatattaatctcagttagaacttaaaactagctagttataaaattctaatgttgaatttacgaaagtctaaaatccggtttacggttttcaaatggaaactctcagtcaaatgcgttaaaaatccaaacacgattcagattatgttagctcgaccaaagtcgatgaacttgtatagttttatataacgtacactactacgtatcgtatgtacaatgtatttagataattgttcttgttttatcatcatttttgtaatccatacaatatctgactttgcaatatcaccatattcattattcatatagaaagtaaactaatatccagatatcagccaccaattaaatcaaatgaattccattttctcatatatgtgaatatacttttattttcatataaatacatacttggtgaaaaatcaaatattgaatcattcaaaagatcaacttcaaaattcaatattggataatgaaagaagatatagacgtgacatatattaaaatttaaaacttggattcacggagggaaaaaacaagaactgaattaactcgtaagtttctacttatataacgaatatttaaagtgtttgatagtttaaacttttctcataattaaaggttgatgataaccaatacatcactaggtataaaaaagtttggttttctgtctaaaatttacaaaataatcacacctcttttcaaagtattaattttttttctttcttgtattacgtttatcccgatttagtaattgtggatataaaaaatactttcgattaatcagagaaaaggtatttggaaataaaattattttataaaaatatacattttgggaagaaaataaaaatatataatacggcggctcaaaaataaaaaagagtgtttctagaagagtaagaatttgagagtggcttctctggacggaccaacacgacatgactnttcctcactntctttctttctttcttcttcttct

SEQ ID NO: 26970 - DNA, 2916 bp, Arabidopsis thaliana landsberg
  unsure (1)..(2916): unsure at all n locations
gctaacagagagtgttgtttcactgcgaccaggctttctttgcaccatatctgctacttgtgagccatgtcttgaagcagagacatccaaagtaaattgataccgacatgagcttattccgctatctcccagcttctcaataagaggaaggcaagctgagagaaaactctcgcagcataacttttgttgttattactacctatctatgggacatcagaatgccgaggcgagcaaatatcatcagcttgacctaacaatgagtcatctccatgtgttcatgaaatctttttcagggcacacaagggtgaacttgtagaagcatatccacctacatatgacaaacacgtcaatgccaagtacattcttgaaacagataaagaaacgtaatgaggcaaattgaaggaaaattcaatggcaattgagaaatgtacaaatgcaagaggcacccagatttgagcttatatttgacttctccaggacagcttgaatctgctgactctagtattgagcttgtttcgctatcaattctctgacgcttggcttcattactcnnnnnnnnnnnnnnnnnnnnnnnnnnnnnnnnnnnnnnnnnnnncctgatgagagctcttctggcgacaacttcggcatgagaatcgttcacaatgtccccacggggactcagcagcgacccactaacgcacttggtccccgtccctaacgctatcactttcgggtctgcacaaaatcctaattagctctaaatcgaaaaccaaaaataaagcaaagagtgacagagaccttgagaaggagaagagacgaggaaagcggagaggacggtgacttcacgtccctgaggttttcccttcttcgggagagacatgtaagccgaaataaccttctctgatactgtctttccccaatcctcctccattgctacgagtaccacaaacaagtccgatgattcatgcgtgctactcataaactgtaaaagcagattcaaggacccgcatgaaaatagtcataagcttagggatcgttttagtaaatatactacaaaattattagagacatcaaaatcccaatgggataagcatctttaactcacttccggcactcgcttccttcacgtgtctctcccaaaattcaaattcctcaagcctaaccaatcctgtgatcgacgtacgcaaatattcaaaagcagtccgtgatccattgcatgatcctcttcctgtgggattcttactctcatggctaacccagacgttaaagagattctctgcgattgtgtgataaacttggtaagaatttttcattttgttttttcttttccgttaaaattcaatccattgctggagatgatttgattgaatttcagagagagaatccgaagaggcgaagggagacggtttacgtcggatgtggtgctggattcggcggcgataggccactggcggctctcaaactgcttcagagagttgaagagcttaactatcttgtccttgagtgcttagccgaacgaactttggctgatcgatggctttctatggcatctggcggtctcggctacgaccctcgtggtatgtttttggactttggaggttgctaaaattacttttagggatgctttgtaacttcaaaatctgtttttcttcagtttcagagtggatgcagttgttgctacctttggctgtggagagaggcacttgtataatcactaacatgggtgcaagtaagtgcttacaatatataatggaggaggccttttttctctctgtttttcttttcatctgaattatcgtgtttttttccttgtagttgatccctctggggctcagaagaaagttctcgaggtagccggtgaattaggtctcaccatttccgtggctgtggctcatgaggtgcattttgaaacaggtaatggaacctactttcatccctgggagatattgtcagtgttatgggtatttaacactgtctgaagccataataagtgtgattaacccttgtctttcaatctttttaaggctcgggatcatcttttggcggtcaatattgctctgcaggggtatgattctggttttctaactcctgatcatatgtgtcaaatgtgatattatcagctagtgacaattattttgatagagtagaagatatgtagaacatagttatgtgtactgtgaaggactctgggttatatgttatatataaagagttttccatggattatttagctcctccatgtgatttgtgtggtttccctgaacttttatcctcctttgttgaagggtactagcacttatcttggagcagctcctattgttgaatgcctggagaagtaccaaccaaacgtgataattacttcaagagtggctgatgccgccttatttttagcaccaatggtgaggcgttcttgtcgtttcctgtttcgtgattaaatctgatcattcttgttgtgtcatcaggtctatgaactaggttggaattggaatgacttggagctgctagctcagggaactctcgctggccaccttctggagtgcggttgccagctcactggtggatacttcatgcatccaggtgcgttttacgcttattggctcagggaagatatgatgaactactgttttccattatcagtatggtcatttcgttcctcaatgttctttaggtgatcagtatagagacatggctttccctcttctccaggatttgtcacttccttatgcagagattggctatgatggtaaagtatgtgtatcaaaggttgaaggtagtggtggaattttaaataccagtacttgcgccgagcaacttctgtatgaaattgctgaccctagtgcctacattacacctgatgtggtaagttagctgtacaaaatctagaagaaataactgtaaaaacggcggaaatatttgatttgaaaaccttctttg

SEQ ID NO: 26971 - DNA, 955 bp, Arabidopsis thaliana landsberg
  unsure (1)..(955): unsure at all n locations
aatgtgagtagcaatatataacaatggaaacaagagtggaaaaagcatttaccctgataagtctgtatttgggttcaaacttcttagcgctctcaacagtatcatagatcaaaccaaacccggatgatttaccacctccaaagtgggttctgaatttgaatacgaagattgcatttggatccttgacctcgtacatccttgctagcttctccttcagctcagccttgcaaaaataaaaccaactctcccgttagaacctctcatagtctatcagaactcgaaatagatgaagtaacaaagtgagtaaagaacaaacctttgaaacattggctcttccagggtgaagaacatcaataacctatattttcaacaatccaccataacttagaatttcattccaaaatctcaaacggaactaaattgcgccagatcaatactatatgatctaaacactatctatgctttaacattaggtcgtaaatctgaaagcctgacctaaaacatcaaaccccaattataaaaatttgacgagacaacgaatgcattctctcgagattgggttcatatcaaattataactagattcccattaaaacaaaacccagaagaacaaaaatgatatgcagatagagaagagaaaaaaaataatggaactcacgaattgctttctggcgagaagcctgttggtcatgaagtttctggacggatggtgccgccttttcagccatttttgctcttccaaggattaaagtgaaagatctctgcaagcttagtgttttttccgctcaggtaagaaagagacgccngaatcgaagtcggagcttttatatagtacaagttcctagggtttcttttgtgttctctttgtatgggcctcaacttttatttgggccacttcccctaccgtttggttttctaggtaaaattaaaaacatttacatgggaaaataaaacaa

SEQ ID NO: 26972 - DNA, 1046 bp, Arabidopsis thaliana landsberg
caactgattgaatccacaacatcatgaaacaaaattatacaattaagaataatatttatttatcttgagttagcagaaaacgtacttaaacaattaaatacatagaagagggtttttaaaaataaaaataaaaataagggttttttattttcttaaagctattttcattttatccttaaagaattttggtttttattcattcgaattttaaataaaaacaataaatttttaactcttacctattattagggctgtttgacgaaatcatcaagcatgcggaaacagcaatcatccataattcacccttgttcttcttgtcacatggatatgaatcaagtagcttggtcacaaaagaaccttgtggataacaataacttatgccccagccatacggtcttgtcttatgatattgttcttccaattgggtcgacaaacgaaaaaaaacatttcgatgtttgatgtgataattattctgtgccaactaacagatatgatatgtttttcagttttgactactatttttgttttaaccacacatagaactcggtttttaagctttatctactgataaatcatattgaaagcgtctgcaaaatgcgatttaataattatgtgacatatacacaaacgcttcttctacaccaattaattatacacatcttaaacaaagatgctgacatactcgttttccagtaccaacacaaatcatacacataaacgcgtgatttgaagaatgggtaaaagaaaatgagtttgtctcaagttcttttatatttaaatcgtacacactaaccctctctccactaaacattttaaaatagttgagttttcacaaacacgtaaatcattattcaaaaacaaacttcaaagagattctctgaatcagtatacagtgttgcacttgggaaatatatgtgaatacgtgatcgttgatctacgtacgatgttataaactatatataaccaatcttcgcttaagcagttttgtcttaaagaagtttcaagctgatatttggctattcattaattgtacaaattgaatgttg

SEQ ID NO: 26973 - DNA, 1175 bp, Arabidopsis thaliana landsberg
acttacaacatttttgaagaaatgcacctgtcagatcagaggctgtctttcagtgtgaagaccttggaatgatcaggcatcaaggaaagatcgaggtttgtgccattaccatttattgaacttttatcaagctatacacagtaaaattggatattatcttcgatataggagccttccacaatggaagatgctcattcagagactatggataaagtctcagaaaatgctccagccaatcaaaaggtacataaagatagtgtaaatgaaatcgatttattgaattcaatattgaagctgattcagatatatataaatggaatgcaggaaagtttaggcaaggtcatgattacaatggagaagtatgctgccctgaaaactgctgtcaaggattcccagaaggtgaaatctaggataatatgaaatttagtttcatgaatcttttgactgatttgtgtgtgttttggttcctgcagaggatagaaatgttggaaatatcactccatgagactaaaaaggtaaagagagacaagagaagctaaatggttacacagcatatgagttttacttgtctatgcttaagatccaatggtctttctcctattttcaggtcttgattggactcgcggagatcattgaggccattcaaccgaatcaacctataaccaaatgcaaaccggtttagaaagcaatatagttaagaatatgtccggtttgattatctgaagaaaagaaatgtattatgatgacgataatgatgatgatagatgatagatgatagataagtttgtggaatccgtactacggcgttaaatgcaatcatgtgtggagccaatctgtctcacatgcaattgcacgtgtgatctctgcaccacaactttcttctaattccacaactcgatttgatcctcttcccgatgacaaatgctccatagaaataacaatattcattacatattacaactattttatttacaagtaaaccattttcttgtaaaaggatctatagacttggcagtgatgtataacaggtgacactaacagaagactaatcatcatcatcattcattatcatgagttgcaaactttatagagtagtgtgagtctcataaaagcttctgcaatagaaaatttacagattgctactacacctaaacacttccacaccacaacacaag

SEQ ID NO: 26974 - DNA, 1088 bp, Arabidopsis thaliana landsberg
aaacgccaagcagaacaagaatatcctcctcggagatcctattcgaccaccaaacgaatcaggttcatcttcgacattaactgacgcgccaccggcgccaccgtcgccatcgccgccggcgttcttccgcttccttatatccatcgaagaagtcgttaaagtgcctgcgattattaacacgttggattaattcactgctcagctttccaaattttagtgggcttatataaaacgggctcttgattattttaggcccatctatttttcagtgaagtcattgccctataattcgaacttccacgattgaacctatcgttcagtgaagtcataataatttgttattcagtttagtttgttcctttattctctttttgttattttcgaagcaatgcttcgacaagaatacactctatggacgttacttattactttacttacgtaaagaaattgacctaatacaacctttacttacgtaagaaacttaactgacataaaacatctatccaaccaatctgtcattcaattgcatgcagagacgtgcctagatgaaaaaataacatttgctctcatcttcccctacaccctttaaatatcacaatatattttgggtcccaattttcttttttataatcttcatctggtaaaacatgcttttttagtggtcaatcattttgtgttttacgttcgtagctccatttcgtataggaacgggagtataattaaaaagttgaacggacagattcaaacaaaatacaatcataaattttctttttttcatcattctttaatacttgtaaaacgttgaaatttatttacttttcaccaatttgattgtttggactttggagtagtactatgtaaacaaacactattttgtaacgttaattaacatctacacaaacaactttaggtaagtaaataaagtcaaataaatcatagtttgtttttttggaaacatcaagtcaaaaaacaataactactctttggaaatacaattatgtaaaaaatcccacctaaatagtctttgtgaaacaaatgtaagaaaacaaaaaaatggccgtttcatcgtcgcatcatgtggtctcttc

SEQ ID NO: 26975 - DNA, 1500 bp, Arabidopsis thaliana landsberg
accgtcatctccgatctcctccctcttcctccctccgccgccgccgcatccgcttcttcatccaccgcggcggattcgtctcttactcctcccggtggttgggcttctctctacaaactcgctgtttgttgtcctggtctcttccacgctggaattctcctcgaaaactccgatttcggtttagaacgtgagctaggtcccgatcaaaacctcgatccgaaacctactacgacggatctagctcttaacgacgaagaagtttcgaaaccagttggatctggtttagaaacgacttcgttttggtctctatatgatgatctctacacagatactattcccgctcctcctcccgaagattcaatcgacgatcaagaagaagaaatcgaaacgagtgagatcagacctggacgagatcttccggtaaggaaacgaaggaagatttgtcgatctctaggatctcatttagcttccggtggctggaaccttagccgtgaacaaggcaacaagcttctcgcgagtagattccgaggtgattgtctctacatttgcaattggcctgggtgtattcacgtagaagagaaacgaaattacatgttgtttagaggagtcttcaaggatttcaaaaggtctagagtttggagaacgataaacgacggtaatcggagtaagacctcgggtttgaaatgcgcgttttgtttgtgcgatgagacttgggatttgcattcatcgttttgtttgagaagagtgtttgggtttcatgatgatggtgaaccagttgtgagagcttatgtttgtgagaatggtcatgtctctggtgcttggactgctttacctctctacacttgatagctcactagagaggacaggtctttcattcttcttccacggtctcaagtctcaatcttgtttgatgtatttgtaggaatagtgtcattgtgtttcaaattctggttaatgtttaagtaatggttgaagaaaattggctcaacatattgtggttgttttgtttcaatgttgacaacatattagacttcgattcaaatgcataaactcttacgtcaaagccaaaaatttcaagtccaagaacatttggaaacaatataacccaaaacaaaaggtagaagaaacttaaaccaagatcaaatccatagaaagaaaacagagtaccaacaacattcatataaaagaggaagtaattcagagggtttcataaacctgaaaagctaataataccatatggtttttcagcatctctagaacagtgtcttcacttgtcttccttaacagatgttgtttcttctgcggctggtgccttctccgtcgcaggaccttcctccttaacggcatcatccttcttgtctcctgattttgctgtctcttctgcaatttacagaaatgtttcattacttataaattctgcattttgttgaggaacaaagaaacacaaaagatatgcaaaatgttttctaagacaagactacttagcataggccatatgat

SEQ ID NO: 26976 - DNA, 1445 bp, Arabidopsis thaliana landsberg
caccattaaagacgagaggcccaggcggagtatgatcgttttcctgtcataactttgaatgaaaacaaaaagaagtgtaattgcgattttccccaccgaaagttgcctaggatacagattcttgaccaaatattatttcgtttcacgagaattcagtacaagtgaataaatgtctgttagaattgaatgaatgaaacagaatatggctagactagagaaatgagctatgaccgcctccaagtggtactcttggaagaaacactgcagatgcctcaaggcatgaacaataactgaagccaatagcctgaaaacacagagaagagaatcaatctatggtcttatagttaaatccgacaaaacaaatgatttaaaatggtgatttcacatactggtatgcagagtagtaatccacagtgattgatcaagacaggaaggctttttcttgcagcggctgggatcaactttaaggacctgagagctttttgtgaggatgaaatagaatgatttgaggttgagcattttgaaagctcacctagatataaccagtcggattcaaccatgtgccgaacctccattgatgtagcagtactcactggacaatttctgcagcctgcttcattacattggtggtcacttaggttccatctgatgagaaaacggttcatgaagtagagattttgccctagacaaagatgtactttatcagaggaagctggaatgttggttccatgctctaattccactgatttctcttctgttttagttaaaaaccgtttagtttcatccctctgcagtagaccaatggttgtatacgtcgattcgctgagaagattgagctctctggctttactcaatacggattcagatgcaacatccagaaactggacttcaaacaagctggttggagccacatggtctgaaaacgattttgcgtctgctatgatttgtccaaggtcatcagatggagtttcattgaaggaaatgttcaagagttctgtctttgatggtaaaggacagtcaacagaacatgagactataattttggtacccttcgaccctggagcaggactaaggtagcaaccagcagctgttagagatgtctgagtagccaaatgaagcaaatgttggtacagatcaaaatctagagaaacagaacaacatggaaaatgattaccctgcacggaattgcgcggatatagttcaaaagcaactttgaagtgtttcctctgattggtctttgccattgagagataaactgcagattcgagagcaaagaatagtcaagaaaacactcaaagggcagtaactttaccaaagaaaaaagctcaagatgtaacacctgcaggaccgcagagagatactttgagaggcaaatgtctttaactactgtaggattaagtctctctagatcaagaatagcgtaccctttctgctaattcaacatc

SEQ ID NO: 26977 - DNA, 954 bp, Arabidopsis thaliana landsberg
aagattttgatcgcgaagttcggatattggcgaaagcgaagcaccctaatctagtatcgatcaaagggtatttctggacaccggagttgcatcttctggtgtcagaatacatccccaacggaaacttgcagtccaagttacacgaacgagaaccctcaacaccgcctctttcttgggacgtaagatacagaatcatcctcggtacagccaaaggactcgcttatctccaccacacattccgtccaacaaccatccacttcaacctgaaaccgacaaacatcctcctcgacgagaaaaacaacccgaaaatctctgatttcgggctatctcgtctcctaacaacacaagacgggaacacaatgaacaacaacaggtttcaaaacgctttaggctacgtagcgcctgaactagagtgtcagaacttaagggtcaacgagaaatgcgatgtttacgggttcggggttttgatactcgaactggtgactggtcggagaccggtggagtatggtgaagacagctttgtgatacttagtgaccatgttcgagttatgttagaacaagggaatgtgttggagtgtattgatccagtgatggaggaacaatactctgaagatgaggttttgcctgtcttgaaacttgctctggtctgtacttctcagataccttcgaatcggccaacaatggccgagattgttcagatcttgcaggtcatcaattctcctgttccccaccgaatcatggatagtttctaaacatctttgtgttatagttaatttttcattagcttttctttttgcaaattttactttgtctgtgtcctttgttgtggtctttgtgtagagattgcttatttcacaatgctacgctttctattccttcgttatcattatcgtaacgatcattgaccattgctattgtgacatttatagtttttttttttttctttatagagaa

SEQ ID NO: 26978 - DNA, 2059 bp, Arabidopsis thaliana landsberg
gcattgagttgtccaaaggttaggtaaataacagaaatttccatttgtgtttacataactgtttcctcctaaaacaatgaacggttcaacatcatactaatctttttttttttttttttttgccaaacaacatcatactaatctatatcttcttttctcttctgttcaaaatttataccagtatattcaaatttagaataaattatgtaagtatttagttcttgcaataaaagaagataaggaaagaagaattatttgaaggatcattgtaagcaaaaaggttttcagttataaaaggatttcaattggtggcagcctaacaatttttctttctaaattatgaagttccagtctcaaacctaatctttaaataattagttgggtagctactaaatctcaatatctgtttttttacaccagtttaaaatttttatcccggcaaagaatatgtaagcgggggtgcgacaatgaccaaacaaacaagacacgtgaccgccaacattgtcctaaaatcccaccgtacactgaaacgtcacgccgacgcgactcctgaacacgcttccttcgcaacaacacatgtcagtgctcattagttggcgcgatcaccggttcgagccaatgctaatatctgctgattcacaagggtataatcgtctgtacttcattaaattgtcatttctatactcttcggccttttggcaaatcacattgaatttgaagcaattttccttccgacaatctctaaattcttacctaattagtacttttggagactaatgttctgctcgagattcgaaactaggaaactaataaaaatcggacctgttacttaccaaaactacaaaataaaaatcgcacctttagaaatcgccttgtcacaaatttgatttcttgccgatttgtcatcatcttcttcagatttcttcaaatgccgaagaaagtagtgattccgtctccggcgatgagtcctctacatcaatggagattaagtgcgctaacatctctcgtcttcttcctcatagttgttgtctggagcattgacagttgttcaatcagaagcttcatcaaatcatggagattcaactcttactctatacgactcacttctcctccttctctggatctggatccgacccgagtaaagcttgcctggatctccgtcgagcaagagcagaacttcacagcgaatgtactcaaaaactggttagctccgggtggagagaagtgcagagaagcaaacaccgttgagatttctgttccgggaatcgaagggaagggtttagtagagttaacggctggtgagattcacgaattcagatttcattctctagatgattctggggaacgagtttgtatcggtggagattacttcgagactgatctttccggtgaaaactggaaatcaagaccaccggtgaaagatttaggaaacggaacttactctttatctcttcagattcatcctgatttcgccggagattatgatctcaccgttgttttactcttccgtcgcttccaaggtcttaaacttagccctgcacgcttcgcattcaacagaacgctacgaaatttcaaactacggtttatcaagaaacctcacgttgttttaccggagctccggagatgtgaattgtccgatttcgacagagatgtttggtctggccggtggattaggcttggtaagaacgacgagtgtgaaatcagcaatgatggacgttaccgttgcttaccagatggttaccgttgccgggaaccatggtgcgacggagctttatcggcgttagaaagcaatggttgggtttactcgagtcattgctcgtttaagctattctctagtgaatcagcttgggattgtttgaagaacaaatggattttcttctggggtgactctaatcatgttgattcgatcagaaacttgttgaactttgtcttgggtcatccggagattggtgctgttcctagcccgtttgatttgaagttctcgaatccgaagaactcatcggaaacagttaggatcacgagtatcttgcatggacattggaacgagactcaaaactat

SEQ ID NO: 26979 - DNA, 1442 bp, Arabidopsis thaliana landsberg
tgaagattatcttttaccaccctttaaactttcatctcatgtttacttatctctagggaccctgaattggctgatgtcaagcttgctcaggccaagtttttactgttacgactagctcagttcaaaacactaatatcagatgaatttgagtgcacaccttcattgctactagctggcgacttcaattcaattcctggggatatggtttgattcagtttcttacattgagtttccctaattgttcaatctatttgcaaaatcaaaagattgggtttacggtggtaaaatcctgatacttgttgtcgttttccaggtttatagttacctagtatcgggtaatgctaaacccacagagaccatagaagaagaagaagctccagttcctctgtctagtgtctatgaagtcacaagaggagagcctaagttcacaaattgcactcctggcttcacaaacacacttgactacatcttcatctctccttcagacttcatcaaacctgtgagtatccttcaactacctgagccggattctccagatgttgtcggtttcttaccgaatcatcatcacccgagtgatcatttacctataggagctgagtttgagattcgtcgggaataggaagtttcgttctttagaaagttttgtcgcataactccattgtttcagcatttgaatatggttcttgtagaaatcatgaagcagtgaatcatacacacacaacacaaagtattaaaggacttggatcatttttgtctcaataaactcgaaattttcgttgtgtgcattgaattactgagaatatttgaattttcttgagaagaaattgtttaatgtgtcttgtttattgcactcataaaataacataagaattggttctattattctgtagtcaactagacaaaaacaatagaagatttagtgaaatgacatgttaatatcatatgatgatctcgtttcaatttgttgaataaagttgcaacaaaattaggtcaagcattgatctgttttatctatcaaccactaaagtttgtactattgcaccaacttataatgataaatcataattttgagtacgaacgaatattcttttacagtctcacctttcaccgataatttgaaccattgttattgaataaagtcgtactcttcaaactttaatccaaaatgacagtgatgtaatgttatgttccaaaaacataagattttttcaaaacgaatagtgatcattcctttgaatatataatcacaaacaaccgaacaaaaatattatattttctatgcttattatatgttcttataaatcaatatcatttagcataagcttctcttgagaaccttattacctactggtaaactgaaaatgaaaatctttgatgttagtttcaccggagagttcatagtcaaagcttctggcgaccaaccggagaaagttatagcctta

SEQ ID NO: 26980 - DNA, 1853 bp, Arabidopsis thaliana landsberg
caacctgccaattttatgaaagccaatttatataaacttttaaaaaaagaaaaaaaatattgatatataatttgaatattaacatatgtttgttgtttctctgtagattttatgcctctattgctatttgcattggatttgggaaagacatatatagttacaggaacatacaaaacgataaatataaatttccccgaacgtctccatgactatgctgtgcatctcaagacctcggttttgacttttcaccctcaacaatggcagcgaacaaagatacattggtgttttcccgattttcaacagaaacatttctagtgagcaaacatcagtctttgcaaatctagatttaatttagtgagcaaacatcatttctaatggcagatttaatacgatataatgttgttgtttttttcttgactactctagattaatgataaatggcttttacttacaattttaaagttttgttttcactcttcttcttcaatgtataataataagaactcgtttgagatttcagagcatgcataaaagatttctaataatatgttttttttttgtagatcaactcattctgattaccataagtaaaacgacgccggttattaataaagaacgtgacaacttacaaaacgacgacggtttttagttgagggtatatgtgttatttacagaatacgaaggttcaaaagaagaaattaaaaattgaattttgggagctgtaaatttcagttcacacacacaggtaccgaaccctaatagctaatttgtctcgttcagcaatcttcttcttctcgtttcccagaatttgggtcgccattgattcgcacctcgcaaggtaggataaaccctaattttaaatttcgtttatctctatgaaagatggcaacttttttgatttaatcgtattgactaatgaagaattttctcataattatgttatttgtcttttgtggaaaaatctggtgtctttcttctaaattcacatttttttctaattcttagtgatagagtcttctacggatgaatgaactctggattgaatcattgtctttgtggaaaattgaaattgaaagtttgtgttttttttttttatcagatggaaagcactagatcagatccagagcttgatgatgactttagtgaaatctacaaggagtatactggtcctgcaagtgctgtgaccaacaacaatatccaagacaaagacaaacctgtcaaacaacgttctgaagaaagatgtgatgaagaagaagagcaacttcctgatcccaactctgtaccaactgatttcactagccgtgaagctaaggtttgggaggctaaatccaaagctactgagaggaattggaagaagagaaaagaggaagagatgatctgtaaaatttgtggcgagtctggtcattttactcaggtaatcctcaaactaactccttttgtagtatatgcatcatttggttgtctatctgattgttgcatcattactctttgttctttatgttagggatgtccatctacacttggtgccaataggaagtctcaagaattctttgaaagggtaccagctagggacaataatgtgagagttttgtttactgagaaagttatggaaagtattgaaagggagaccagctgcaagattaaattggatgagaagttcataattgttagtggcaaggacagattgatcttgaggaaaggtgttgatgctgctcacaaggttaaggaggatggtgagatgaaaagttcttctgtttctcacaggagcagatccaggtcacctaggcgaacttctgttggtccatcacgtgctcgaaactctgaacctcaaaggcagcacctgccatcacatg

SEQ ID NO: 26981 - DNA, 1354 bp, Arabidopsis thaliana landsberg
  unsure (1)..(1354): unsure at all n locations
tttatacttaccgacagatttaatctacggagttaggggtatctgcgaaccattctaagaaatattgttcttacgaaaaaaataagctgctaaaacttgttatatatgtacttctaaccaataagctttcaagccgaatttataacctttcaagtataagtgagggttaagatatctatctatagggattatatgttttttggtttctatagaaaatgaaaacacatgtgcatgtgtacttgtataaaagaatcgtacagtgataaacaataatgagtttggccaacaaacggtatcatgtcatgtgattggtattcctcatccctctcttctttctcgcaactcgccagtcattggataatgatttgtaaaagacaaatttaaaaggaaaaataaaactgaaatccctaatttaaaccatgtaaagttaagctaggacagctaactgaaacttgtaggtctcatagtgttccggatagttttatttccttaatgcggcactattgacttttgcccatgtgaccattataccttatgctcattacaaagttaatcattcaatttttttaaccgctaataatgctttaagtatgcaataatcaactaatcatcgtttgataagcggacaataattttgttgtaaagaaactaaagttaatgtaannnnnnnnnnnnnnnnnnnnnnnnncaacgtttaatgaccaaacatgcactttcataggtaaggaacttataatgaaaaaaaaaacaataggaatgaaagaaaggaagagattaacaaacaaaaatagctcaccacattaggatattcatttatcggccgtatcaattatacaacaacaacaacaagaagcaatcaagcatgctcttacatttatcatttcatgaccaaaacaaaagaagcaacagagtaatgaaaaaaaatagagatttgttgttgtttctgtacaacaccattccattgaagttgcagctcaagaaactgaaacaaaatatgtcataatattaaaactcgatacaacaatgttcactaatctgcacatcttcagaaattttttttgtttttttttttgctgctcataacaattttataatatatgcatcccctagaacagcaaatttcccaagcacttcacaaatgttaaaacttttcctaagcaagttgttgtatagccaaaaccgaagaaggaaaacattacaagagacaaccttacaaaagagaaaagaggagattctggagggagagaagaaagttacgaacagccaaagcatttcctgaaagagagaaatccaaaaggttctgggatcggatccgagatattctgttttgcacttggaagatgtttaagaaggc

SEQ ID NO: 26982 - DNA, 1349 bp, Arabidopsis thaliana landsberg
  unsure (1)..(1349): unsure at all n locations
ttttggttgggttgatatgtccaaaaccggacaccaacatgagagccaatgatatccttaccatggagattagagaacaaatgcgaccacactgtgtggacaatttcctggaaaatctgtttcttttcttctttttataatagttgtcaattttttttcattttaaaatttaaattatagttaattaatgattaatttattggctgtgaacttttatataccaatccatattgaccaacaatgaagaagcacaaagcaagaaaaaacatatataacacaaagtgtattgttagtacgtatatattcactctttggaacgtttttgttttcgtttaagccaatgacgaagaggtcgccattaattctcctccttgcttcacacttgttcgtatcaggtaccattttttaccagattgatcgacgattctttgatttgatgatcatttatttttctttcttatctttattttattcctaggagtgttttccaatagtatcataaccatagaaaacaaatgcaacaacacaatttggccagtcatcttttcatggcggtcacaagtttccaccaccggcttcactctcaagaccggagaggaacgtgccataaacgcaccatcttcatggtacggtcttatctcagctaggactctttgctccaatgactcaacaggaaacttctcatgcgccacgggagactgtgaatccggcgagattgagtgtcccggcacctacaaatggtctcctgtaacttacgtcatatttagaatcgatgacggccaaatcaacagctatatcatcagcctcgagttcggttacaaccttccactaacggttgttccgtcaaacccggcatgtatcagctcaggttgtatggttgacttgaacaagacatgtccaaatgatcttaaggaattctccaggagaggtttagtcgcctgcaaaagtgcgtgtcgacaatccgcatccgatgagaattgttgcactaattacttcaagtataagcaaacttgtaagccgacagcgtacgtacagaacttcgaccgtgcttgcccatccgcttatagctaccccttcagcggtaataacagtaccttcacatgcacaaattcaactgattacgtgatcacgttttgtccctcctccattcccaacaccacaaggtaattaaattcccctaagctatatatgatacatatttttgttaggcagatagtcattgttagcaaaatctttcgtaaataatgttgtgcattttctcacgtttgttttttcttttcttaaaccatcatactatatatgtaaaatgacatgttaactacgtacaatttggccacntactataattt

SEQ ID NO: 26983 - DNA, 1507 bp, Arabidopsis thaliana landsberg
cattaagagcatcatcgattagcttgttcaacttttttcttgtagattcttaaaacagttatcattgtctactactgtgacagagaaccgagctgacagaggggaaaatatacatgatgaaagggctagtaccaataaactcagattcagaaatactttacttacatgcgagagggtcaagctcaagatggcagcctttgtctccaaaagattctgaaaattttcagtaagtggttttctttagtagacacactggaatctatctcattaatttgttcaatttccctgatgatgttttcaggccctttttcaaccctcgtaaaccaatctctttgtcaaatcttggtgaaattcctctttcaaggttaatctcagtagtccaagctttttatgaaacactctttaccgcactttgctaatctataccctgtcatctctaattatgtccttcagtgaatttgatatcgctgcgtacgttgtatatgttggaaatgcatacacggatgttctacaaaagaagcagtgggtgtttgtgacagatggatccgcacaacattcaggggaaatctcaaacagtcttcttgctataagcttcagcacctcattcatggatgatagctctgtttcccacatcagccataatttggttggatccgtggtatgtacaaattctaatctttgtctagttttacacagagagaatatgcaccaagagattaaattttgaaaaatatatgcttgttatgggtcttaatttttggcaggtcggattttgcaatctaattaaaagagcaaaggatgtgacaaacgaaatttgggttgctgaggcagcagagaactcagtctacttcataaacgcagaagctgcctactcttctcacctcaaaaccagcagtgcccatatccaaacatgggctaagctctcttcttccaaatgggtttgttctcggtgccttcctcttggtataattattcggttcaaaaagattggtcttttgtattaagccttctaggggtgctcaattttcaggtcattcatgaacttcggcaaagagtcttatctataatcggtgcttgtaaatcaccttcatgctgaagataaatcataccccacctcttctcttaagttttgtttataagttatctaaccctctgctgattgtatctattaaagcccattttgctacatcaatttctgaaaattgaaatgtatgatctactctcattgatcaagtaactttgaattattttgtgttgtaaacatatctaaaggtttgatgaagttgcattaagaaataacatttatgctatatatgatgctacaacttatcaggggaaacaatggttatgtagtttttgtctactcgttagatataattatgtttagaattcgaagatgaatgttatcaaagaaaaaaggatttgacattgtcaagtctacaactccttatgacagagcaacattgtgttattttttttttctatcagggaaacttcctatgaccgg

SEQ ID NO: 26984 - DNA, 1547 bp, Arabidopsis thaliana landsberg
ccacaacgactacatcggatcctattatccacgaaagagggtctgcagaattttgatacaaggtaaaccacattattataatcttttgaaaaattggaaatatttttgcgcatacgcaacactacttacaactgaagcatctgcatggtggcaactgatgctgcaattcaatgagttcggcaaccgctggattgttttctcaaaagacagccttgcttctttgttaacctcaatgcatttgacagaactgaaatcagatttaagtataaagtattgggtcaatcttttcatcaatatgaacatatacagtctttttagattaaggacagatgtgaacaatctctgttcttgcctgcatttcctcgatgtagctaacgataatccaatcactccggctcctgcatatagatcagcaacagatgatccaccaggaacatacttatgcagtttccaaagcaagctatcaaaagcctgacacaaacatttgacatattagtaatcatagagtattgactagagcaaatatgaaaatttactcaaaataacaaatcaaatgtgctgatctactccccgctcataaaagcttaactcaatatctgcatgctcacccgagtatttgcctggccaaaactggaaggatccaaggatatgtcaattcctcctacatgttcccagaaatctctctcacctaaaagatgcctccatctgtttccaaagattatctaagacaacgggaataattaaagccggatgttaagcaaccgaacaaacgaaatcggaacacttttagacagaaatttctctgaatatttagccgtagcataagaaaatctggttctctgactcacattgttggttgatgtctgaaagttagcccagacagaatgtatcaggtgaaacttgctgtttggtccaccctttctccacaagtactgcaaatgagagatatataagtgataaaaatgaatgaaacaagctaaaggaatcacgacgtccaaaagactcacggtggacaatgcttgcaacttatctgcattatgagatctctcatttctcgagttccaaaccaaggacacctgcacttttcctgaaaccaatattcaaactcagaaaccactctaattgcaatgcagcgatatcactgtgaaaagaaactaaaaccatagaaaaatatgttcaaccatttttatatctctctggagcacgaagatttgtactatgcgtcgtaacagccatctatagaaagaaaaaaaaaactcatcaccacactgcaccagattaaatagcagaacagccaaaaaaaactcaaacataaatcacctgaacatatcgtaagtccccagtaccctgatcctcatcaaatggcacaacatcaaacaccttaataccttaacatatagccaaaaacccatcaaatggcaaatacacataatcaatggcaaaacacatataagaactactatctaccttctctcaataactcaatggcagcattaatattaggatgatgagctgcaaaaaagtaagaactcaacctaaaatcaaac

SEQ ID NO: 26985 - DNA, 6257 bp, Arabidopsis thaliana landsberg
gctcgtaccctgtcttcatgctgagtattgagtagatgataatttagagaacttgagatgtatgatatgtcactctcattggcttcaaagttggagctgcctacttgaatttggatgttccttgtttcagtttgtatttgcagtacgtttcttcttcttgagttaagattcttggattgttacttctcatgaatactttacttgtgacagaatggatcaaatccctcatcgttgatcacggagataatgttatgtacttaatagatttttattattgggcctatatgggcttcttctttatgtctcatgagcccaaataacattgcataactttaaaaactttcttttcttcgtttgcacaggttaggcaaatcgattctctcaatggctctttcatttcgaatttgttcgtcgtctccgttaatctgcagagccactctctcaaacggcgacaacagtcgtaactaccatacgactgatgccgcttttatccgacgcgccgccgatttgtccgaaatgtccgccggacttacttcacctcaccctaatttcggctgtgtaatcgccacttcttccggtaaagtcgccggagaaggatatctatacgctcaaggtactaaaccggcggaagcgttggctgttgaagctgccggagagttttctagaggcgccactgcttatttaaacatggagcctggtgattgtcatggtgaccacactgctgtatctgctcttgttcaggtttttgcttctttctcttagatttttctgtgaataagccataagccaatgattgtgtgatattaggaaacaatttgaccaaattgagattgtatagattaggcaggaattgaacgagttgttgttggaataaggcatcctttgcaacatcttagaggctctgcgattcgtgaattaagaagtcatggtatcgaagttaatgttcttggagaagactttgagagtaaagttcttgaggtatctatgtcttcttactcttcaatttgaagttaattgttaggattctgttaactaaatgttcaagttcttataggatgctcggaaatcgtgtcttcttgtgaatgctcctttgattcatagagcttgttctcgagttccgttctctgttcttaagtatgccatgactcttgatggtaactatttcaacctccatttcatatgtttgtaggatagctgttttagctaacgttttttttgtttattgataggtaagattgcagcgagtagtggacatgcagcatggataagtagtaaactctctagaacccgagtgttcgagttgcgaggaggaagtgatgctgtgatagttggaggaaacacagtacgccaagatggtaaatattgtatcttaaatctcgcatctttacggatgcttacaacatattgaatagatatgtgaaagttgtgcaattttgtaactgcagatcctcgattgactgcaagacacggacagggtcacacccctacacgaattgtgatgactcagagtcttgatcttcctgagaaagctaatctatgggatgtctcggaagtatctaccatagttgttacccaaaggggtgcaagaaagagtttccagaaattgcttgcgtccaagggtgttgaagttgtggagtttgacatgttgaatccaagagaagttatggaatatttccatctccgtggatatctttctatactatgggagtgtgggggaacattagctgcatctgctatatcatccagtgtcatccacaaggtacccattatactatatccatacttatttgtagtcatcttatgtttttgtctggctaaatctcattttcttacacttctttctctcaatgtaattcatttttcaggttgttgctttcgttgctccaaaaattatcggtgggagtaaagcaccttcccctgtgggtgaccttgggatggtagagatgacacaagcattgaatttaattgatgtttgttatgagcaggtaatttttttgctttatgaattaacattcactgtgacaagttaaccatgttactgaatctggcctcttagttccgtgggtttaatctaaatccttgaactacaggttggtcccgacatgcttgtcagcggatttcttcagcccataccagacctcttacctgttatcccatcagaggatgcaactgtcgagattgaccccagtgttgacccctttgaacctagtatcatattcttctacaaaacatgggacctctatggaagtttctcaaatttttctccacatccaattcgaatgccctatggcgaggagaatgatgattacatgacctggtccagtgtggaacattactatcaggtaccacacaacagtccatgtaaaatggtatcttgctctttcaaaacaacataatctcttgatccttcacccaaaaactttaaaggcaaacaagtttgttggggtcgaaaatccaaaggcatatgattgcgttgagaaaattagaacagctagaagtccagaggaggcagctctgataggcagatcaacactgagacagaaacctgaactggtatgaataaaagttgaattgtccagtttcgagcatcaaagcagttttcactcgtttgttgatctctcgagaatcgagatcgttattcaggggatcaataatactgcattctcgctttaatgattgttttaggttcggaatgattgggaagatgtgaagatagaagtaatgtacaaggctttaaaatgcaagttctcaacttatcctcacttgaaatcaatgttgctctcgacaattggaacagttctcgtggaggcttcaccgcacgatctattctggggaggtggccgtgaaggagaagggcttaactatcttggtcgactgcttatgcagcttcgttctgagtatctgggcgaatcctctgtttcagctgaaaagacttcttcggcctgatggatgatgatagtctttcatatttcttccaaaaagttatcaataaaactttcagttttcctcaattttgacatttacattgttgtaattctttaacctatataacattattgtaagtttgtaacattatgataagtttcctagaccatttgattcacattaactcatactgagtattttaaatggtaacgttagagttcttatttgctttgttcggttttaaaaccaatccaacatattcaagaatccaattcgatttggtccggatcagtgaaaattccaaggcttataggaacacctttcgtaaagaagacactaggtggtcgcaacttttcgagaagaacagacactaggtggtcacgaagacactagctggtgacaacgtcagagaatactcaacataaaagtaaaactcttaaaagagttacataacacaaatattaaaatatgtatcatataatcatcatagtaacataaacaaggattgttgtaagagtttgcgtatgcttgaaactacaagagtagaaactgagctaaaagcacatggaaggttactttaacattggaaaaacacatctttcttcttcttcctttcaagtcacttttcctcctcttttctttcattttgacatttctttcttaatactttttaaatatgtaatggaatcaattatagacctttatatatgtgtttgatattatatgattttataatcataggttgctaaataagaatgtaagtcatgatatcatatgaatacaatcccaagcaaagacaacacacatcatcatgttctcccctcaataacaatcacttgcaaagtacatacacacaaactcaaaataataattctagaaaacaattattaactaatttaatatacaaaactaaattccctttaattagttaagacatcacaccaagaaacttctcaattccccatacaaactcatacccaagaacttcaaaaaaatgcttagaggcatctttcacatttgcctcttggcctcatttcttcttctaccgttctcctccgccgtacatgatagtggcttcaccggtggtaccgatgctcctcctccgtgggaccataatgtttccccaccaccagaaaccgcaccatccccaacccccacctcgagtccctctacaacctcaccgccatctcctggaccggtggctgcgccatctccgatcaacaacggctctgtctccggggacatgacatggtggtgcaacaagactccacacgttgagacatgcaattactacttccggaagagctcacaaaacaacattaacctacgaccaccaaggttccggtccgagttcttacggatgctggtcaaggtagcacttgaccaagccgtgatcacacacagtcaaaccgttaagtttggaccgagctgcaccaacaaccaaaggaaagccgcttggtcagactgcgtaaatctcttccaaaacacggtggctcagctgaaccgaacgctcaagggacttaacccggcggcttcgagtgatgtcaaatgtacggacttcgacgcacaaacgtggctcagcacggctcagaccaacatcgagacgtgccgttccggatccgaggatcttaacgtctcggatttcgtcatgccggtgatatccaacaagaacttgtcggatttgattggaaactgcttggccgtcaatggagttctcatgaagcaacataatcatacgactactggtacgttctatgaatattataattactttgagtcaaagcaaaaaattatcaaaattacttcaattaattagattcctcatttacgaatatgcatgccaatttgttcaaatttatcgttttctgcttataagttgtctcgtaataaatttattttgatacaacaattataagtaaattaaagtgttacgtttaacgtaatctttgttcacacgtaatcagattaatcatgcatgaatactaatttacaccttaggctataaaattttattttcctccaaaatacacctttttcatgttagacggtatattaatttgagctgaatacggttaatatgtaacatgactttatctaacacggccaaattccaatttgtttggtttgtcaagctaaccacaaagaatacttcccaagctgggtttcaagacatgagagacgattactcgtatcagcctctttagcgaaatcgagtccccacctagtggtggcacaagacaggtccggccatttccggtcgatccaagctgccataaacttcgcagcgagaaggagattcaagtcaagatttgtgatatatgtgaagaaaggtgtttaccgagagaacattgatgtcggcaatgataaccacaacatcatgctcgtcggagatggcgagagaaaaacaatcatcacaagtggccgaagcgtccagcatggctacaccacctataactctgcaaccggcggttaaaactctatcttaaaatcttggctaaatccaactttaagacttctaatggtactaataagtcttttttcccaactcttttgaaggctttggaggccaaaggtttgtagcaaaagacatgacattcatcaacacggccgggccattacgtgggcaagctgttgcggttcgatcatcctctgacctctctgttttctaccgtgtcggtatccatggattccaagacaccctctacatccattcacaacgccagttctttagggaatgttatatctcaggcaccatcgacttcatcttcggaaatgcagctgttgtcttccaaaactgcatgattctcgttcgcctgccactcaaaggtcaagccaatgtaataaccgcacaaggtcgtactgatctatttcagaacacagggatctctattcataactcaataatcatacccgctcctgacttaaaaccggtggtccgtagtgttaagacatatatgggtcgaccctggatgatgtactcccgcaccgtggttcttaagacgtacatcgatagtgttgtgagtcctgtcgggtggtctccgtggactaaaggttcgacgtatggtctcgacacactgttctatgcggaatataagaatatcggaccggcttcatccacgaggtggcgtgtccgttggaaagggtttcatgtgttgagtaaagcttccgatgcatctgctttctctgttggaaaattcatcgctggtactgcgtggctcccaggctctggtatacccttcacttcagaactctaaggccatctttgattttccatgctttaactaaaacgatgaaaaagtttataacatataattcatttttacaaatcattt

SEQ ID NO: 26986 - DNA, 1837 bp, Arabidopsis thaliana landsberg
tcagctacaacaaacatcaaatcctcattccacatcggattaatactcctgctttgtgacactctagtcctcaatgcctgacttcccattatcactttcacaaagacttcaggatatctccctttatcgctcggtatcaaatcctgagcttcaatgacattaaccctaagataccaaagcttaggagagagataaaccttagatctgatgttagctaaagcatcagttccactaacagttgcagcatcagagtgccaagcttcaggaaaagcttcatcagcttgagtaccaaaccaaacagctaacataagctctcctttaactttttggcctttcccatcttctaatctataccattgtggagctaaaggactatcaggaggaacgcgagactgaacctcacggagatcgaatttaacgattccaacaaaatcatcaaggagaatgtctttatccttgaccataacttcaagaaagttcgactgaagattatctttagcgaaggcaaagacttggttccactcgggatctgtattcttgttaaaatgtgtggtaacacctttgaagtttccgatttttactacgacatacgggtctaggcttcctgtaaggtctttgttggggagatcacgcgctttcacaactctcacgtagagaaatttcatctcttcaacgagatcatatgtaccgcttgttggcctctctgtaccacgaaccactcgtcctccaacgatccgtccacctccgagcaaagggcttgtttctttgacagagaaatctggtggcagctggtgcaaggatggacctggaccgttgacttgaaccactcttggaggcatcggtgcagctctcatctcgtggatgccatagttcatcattggctgttgtttcactaaaggggcagagttatgaaacgtacgtgttttaggctttagctctcttctctcatcagtagccatacttgcatcggctgtgattaaggacttcacatgttctttacgcggacttgggctataagcttgaggagattctggaaccggggttgggacagaaggtgtaacagaagggtcgtctgtgataaaaactctcaagcaaagttctccacgggctcgagagaaaacactgcgtttctctaaagggtaattgaaaggagctgcttcagagcgaggaacaaaagatgttccgttgactcgaactttgccaagaaagggcttagcatcgaattcgttctggtagctgtaaacgtgggcttcaagcgtacgagttgacaagacggaagggtcagagacaacgaagtaaaaacactcgtgccagacaggatttgggtcgttgtgtttggtcgttgcgcggaatatctggttgtcgaacttgagctccacgaaagggctacatgagttatgcttatctctctgtaacagaccctgtgcgcttatcacttcaaccccgagctttatattgctcatttgaggcttttttcttctttcaaaacaccttatcagcaatagaaggcaagaagagacaactgcagaggaaaagagatttctaagttagagaaaactctgaaacacgaaaaaccatggacttctataagaagaggtgaataagagttgcaagaacaagaaagagctagtaaccaaaacgggaggaaaagagaacttgcctcttcagaaacagaagaagagaaccaaaaagacgtaactcgcctttaaagatcaatcacctgtcgtgaccaaaccagttaaacgaataaacaaatcttcgtttctcagaaaaacaaggcaaataaaaacaagtgttaatagattttctttgtgagttagttttctgttttactcgc

SEQ ID NO: 26987 - DNA, 1684 bp, Arabidopsis thaliana landsberg
gatggcacgtgaacttcacctccgtgaacatgcaatgccaatgactgatttcatcaaaggtaatgtcgaagtcgtggatttacagctttgccgttgattagccggatgatagagaggttgtccccatcaaactcgatctttatgtaacctaggttccataatgattggagtgcccatatcagagccgtacattccgattcttcaaccggtgccctaccttggaatttactcataccgcattccatgaaagtcccatgtgagttgcggattatccaccctaatccagacccactggttcctttatggtgagacgaatcatagttacattttacccagcctctttgtggtgtttttcatttcactctaagagatcggtgatggtgaatgtcgttatgaccttgttccgaagtagcaatgttttcaatccattctcttgtgtcaataacggcttgttctacagcttccgttacttcgatcattttgcgattaaatactagatcatttctgcatttcaagattcgccataataaccaaaatgggagtagactttgaaatttgacaataacatcacctatttacttatctcttcaactatataacaactatactacatcaataaaaagaagtcgattagaatgcttgtgtttttgatgtactttagcacataagataagacttaattccctaattttaatgtattttttctttggggggcaaaataccttgtgttcattcattcaaacggataaaacattacaaagctgaagggttttgccaaattaaggcttgatacaacaagtctaataacgtaacatagtgcaaaaatagatagttcgacaaaatatccaaaagaactcggagacgggagcaatatagcaccaagtcaaattccggtttgatgtacatgcaggaaaagcatatagattacataacctttttcactgtctccatttgcgatgaaatgtttttcgtctgcagatatccactgggactaggttattcatcactccaagcatcggattcgcataaacatttgcaacccaagcgatactaaaagtaggtcctttggtgcgaagaatatcctcgcaactatgcatgtatataatatataggtgtgtttaaccatatatatagaacaaaacatccattgtatctgtgaacttagaatccacattggtgggctcttctgctcgttcaaaccacttttttaaactgcaaaaaaaaaaaaagttccaatcagaccaaaacacagtttaatgttgaattgttgaccatgcaatcaaacattacacaagatatctatctgtaactgttttgcatttaagaagaagttgttctgaacaatttaaaagagagaatcaaacgacaaattatttatccaaagattcaagaaggaacaacaacagtttgcatcatgttcttgaattcgaaaaagtcaacgcgaccatcatgattactatcaacagagacaatcatcttctccacttgttcaatctctcctgcttcaggtaatccaagcttcttcaaaaccttttgcaattccacagcggaaataaaaccatctccgtcttcatcgaacacattaaaagcttcttcaagatctgattccggagacccatcacagcaacttccttctcctccaaagaaagattcgtctaaggttttgtggagtgcagcaaagtca

SEQ ID NO: 26988 - DNA, 1529 bp, Arabidopsis thaliana landsberg
gtgatatcattgcaaccttttaatacatttcaccaatttttatctatatatcatttatttatttttactttttttatgtaatcatgaaattatgaatatgtgatccataatctctttagtcccagaattagactgataatatttgtgtcaagctcacggttgtagatcatcttataacaaaacttgaactcggtttcggtatccttgaatcattgtaaacaacattcatctaattggttaaaccaatacaatgagttattaaataagtaaatttatcgtcttgttattatttaaaatatataggtaaatgtcaacacattgaatattgaaaccatttgataaagtgggttgtaatttgtaaaatactaaaccatatgacagggtttactatggatttaaattgattctatgtgacgttctggtgcatgctcaaccatgagcttatattagattaaaatcttgttctatcgaaccggtttgaaactcatcactcaaagccattttgaattcagtttggtgaataaacttataacatatctaagtttcataaataagtattgttatatatcatcaatttatttattaagattaacatacctcacacagttttttaataaaaaacatgcagcatgcagacttaaatatgggttatgttagtcctcattccactttcgacaagaccacaacccacaccatcagaattaattttttctcggatacaatactgtccggaagtgtagtcacaccttaccactagcttgtgcatcatttgaaaagtagttgaatcctacaacagactagtcaaaacaaactcacccagcaccatgaatgcacaagcaaatcatgagtttggtggatactttttccaaacttgtccaaaaagccatcatcgatggtaatttcaaagcgagggttaaagttatcataattaagcagtttattgtgaaggctagcaccttactaacaaatgaccctcatcaacttttttctggttgctcttgtcagccttcactacatgggccagagcgattgaatgtaattgcaactcgggagcatgcaacagcttagttggagccacatattatccatcgtgtaacaccccgtcttcaacgtaaaatttgattatttgattacttgaaacaattcatagttcttcatctttcccatagcaaaagattcattcgacttgtcacaattatcttaaaactcatgttactcataatccatcttctttgggacatctattgatgaaaatggtaccgatcggtatatatctatatattccaaagtaatacaaatgcgttttaatttgtcattacatgacaaaaatttgtctacatcagctaaaagacacaaacgttttcttcagaaatcctccaacacccccgacatgtgtaatgccatgcggcagataatacgaaaccgaggaaaaaattcatctctttttattataaatctcaaaaccaaagaccaaacactcatcattttctctaagtcatcatcatgttgtctcttcaagcttctctctc

SEQ ID NO: 26989 - DNA, 1695 bp, Arabidopsis thaliana landsberg
  unsure (1)..(1695): unsure at all n locations
attcaaattcgaacgttgaaagcattaaatccaaagacggaaacggaagagttaaaagagtattattttgtataattaagaataattagtaggtttttgtataaataagagaggtcttggatcatgtaagacacccacaatttttctagcaattttcgatagtcattttgatatcaatttttagcttttacattttctttttgtcctcaaaaattaatccatctcacaaaacaaataaatacttgagtgtgtgaatccgacatccacaatacgttccatctcccttcattcttatgaagcttattattgtttttttgtttaagattcttatgaagcttataaacttgagatctagctctagctcaaattcaagaatggtttagggccgccttagaatactttctaattgttaaaaccctaaattagtactttaatttatatggctttaataacaaggaaatatagtaaaaacgatacttttgtttttgcttttggcttgaactattgacaatgacataggagatagtgcacttgcaaatatggagtataagaaagagttcttattaccacacacatccaccaaaataaagacaaaaactaatgggagtgttacgtcagtacatcaatcacctcttcactcaatacatgtttgtttaccccatatggtcataaccaaaggcccaaaatatcaacttaagacatagttctacctcagtttaatgaatcttaagaacactatgccaactgcggacaaaaataaaaaacactatgccaataagagagaagcaacatgtaccttaaaagaattccacaagtttattttgtacttgtgtgtgtttggacaatgtaaaccctcaggcccaagagagaagaaaaccacaaaccgccacaaactcaagatctaaagcaagtatctaattcctatctcaggtactgttactagatacaaaaactcacttatcaagctcccacaacaccattcgacttctaaagctgtccaagctttttgtctgtttcctcttctctctttttattttctaagcttcaacagttgctaccaatataacccttaataaagtcaagagacacttctctcatatcccccacaaaaaaaaggtgaagaaagatctaggggtcttaatattatttttaacacccatagaaaatttatattatgagtttttctactctaaataacaagaaactatagaaatccataccttcttctttttggattaatttaagagattttgtatatccatattcgagatagtgcctgccaaagaatataagaaagagttcttattatcacacacggcataaaagaataaaaggcagtagaattaatgggagtgttacatcagtaacaccaatcacaagacactctttaacgatcaagtttttttatataatggccttgtgacatcacaataaagagaccctacattctcaataggaaaatccctcaaacatatggacactaaagatcggaataaagataagaaatcattagagatttaatattgcgagtgtgatatcgtgtagacacagcacagtgttgaaatttttaccttataaatatagtatccaaaggatgccatgatgaatcaagctgagaaataactntnttagtaacacgagagagataaagaagagctaatgagacagagagatgaatatgatgcangaggaggg

SEQ ID NO: 26990 - DNA, 1623 bp, Arabidopsis thaliana landsberg
acgcgattctatgaggtcaaccgcgcgtcttgcgatctgcggtctccctgtcttaatgcacgctgctgttagctgccacagcaaaactgcacattgaccagagaaacaaaaaggcggtcagattttgtattcgattttattgacaaatttaacactacacaacgtgatgttcattattcaatctatcaaaatatttcaaaacaaaatatatcaaaggttgccacaaatgtatatatatataagaaagaaatgcgatcataagatacaaaagttgaaccaaactaaaatgtatctatacgttcatatgaatcgtttcatatgaataatccaaaccacaaccaaaccgtagctaaactaagtactgagtttttataactaaaatctagctaaactatcttaaatgtatatttctgttcttatgccagtctacaaaaaaaattgagacccaaatcaaaccgaaaaaaaaaactaatggctaggtctagcgaaaatctcagttaagcgaagtaagaaatgacttatgcaatcagtctccagggaaagaaaaaagacctggccaagatccaccattgtggtagctccaccgtgtgttcttggggtcacagccagtaacgatgcgccactcatggccctcgaggcatggataacaaatcttgagaggcatctcacctacaagctctgcccaccggtgctcaaggaggtccataatggccatggattgatctggagtggccaatgaagaaagtatggagacacaattaccgagtgcgaaccaccggaaatccatatgggcaggtcctacgtttcccacaaagtagcctccacggagaggcatgaagtcgaaaacccactcgggtatagaatcaggcatcacattgaacttgttcaccgccgtgtgagagtattcctcagtcttgaacctttttaaacaaatgtactataagttatagtgatcttttgtgactctacatatcatctaaagcaaatgaaataactatacctgtaaatgtcattgaggttctgatgatcaagccagaagtaattgcgcatatggaaactcagcgcgtgaagtcgcttaacgatcctttctatgaaatctcgaccttcctcgtctggtttaagcatcgacaaggcgcatctcaatgccatgaaaaacagagcttgaatctctattggatatccataaacaccctaataaataaacaaatcaagatttggttttagtgtgatgaatcatataagatttttgctcgttcactaaaaagttagttcttaccattctcctatcaaccatagaacaaccgtcagcacaaagcagcgtagggaaagtgtcaaacccttcggacaagcagagtgatagtataagcctcattcccctctgacactctggtgtctcagacaaagtcaaatctcccgtagatttcgtgtaagcacggagaagtataatccaccagaatcctgaatccactggtgctactcttcctatagcgctttctccaaaatccgcaataattgtgtcggttttacgaactggatcatgaagcaccttgaaactcgctggcataacgccttccccaagcttgaaccggtcaacccgtttctcccgaacctggaagaggacct

SEQ ID NO: 26991 - DNA, 1823 bp, Arabidopsis thaliana landsberg
tacatgttgagaagctaagaatagcattagatagcagatttaagtggaacttggaagtttacataagagagcaagtaatggggtattgtatagtagattattagcatgacctcacacaatatgtacttctcatcttctaagtctaaactaaacaatgatatcatcccattattgccaatgttacttatatggatgatatgtacccacttattaattaacttacttatgataaatagaaattgatgataatgtatgaagagaaactgaataaagcatgttacaaacggtcaattattcaaagattaagatttcttacataaatttccacacgaaatcatgttacaaacagtcaaacatttgcatacctatgtaattataaaaatagtcaaatacatatgttctcctccgtaagtgccattgggccttctcatgacttataagacgcgagcgtttcagctgaaaaccaaaaaattctcatcatattcaatcagacaataatgtcaaaagctatatattaagtccattatcagttctatttcacaacgttcttaactgtaaaatgtatgatatgatcctcttttggtttaaacctcatgacgtggattcaattttttgcttaaaatgtaaatatctcatagaacatgaaaccagcttaggtttacaatcgatatttctatcatgatcgtgtattccttttcgacatttctgtcaacaacaactgagtactgatacaaaggccaacgaccagcagtatcagcaacttgagggggatatcctttggctttcaagtgaacctttcctagttattaatctttttggcctcatatcgcttccaaagtgagttatattcattgtaaaatttgtaagggttagtacatccaccaccgagacttaatattctctattcaaaaagaatgtgaaatggcctactggacctggagagtaggattggagattctgatctaaagaatgaagtccattaagaattatgtttttgtacttcgaaatacccattaggtttcatgacccatctattaaaactcatatagcaatattcatcaaaaaaaaaaaagatttctattggcttttgtaaaactcccaaatataaagtgttttattctaccaactaaactgcatgtgacgaatcttccagctatatttcttgttgttttctctccttctatcttcttcttacgtatgaagaattaatgatgatgatgattgctcaatttgttcgttagtgaaaatattataagatacacatacaaattaacctgtttcttctatatatagatgattacaaagcatgtgatgtgggagttggactattggagtagttgattaatcgagctggagagaaacaattacaaagattctttacaatttttaattaagcaaattagtacagacaaaaaaaaagtgtagaaggagacaaagagttgcgttgaaggaagaatgattgagaaattgaattaagccgactcacgccccactccttccataaatagtttagttttattttttgcatgttaatgtattaaactagtaatgaaacattgaatttaggataagcagtaaatttcatttggtgacaaataaagaaagaaagatcgggttaagtcaaataatggcaactatgaaagttagagatgtgaaaagggttctggtgattccattattgtacctggctgctaacatttttgtttttcttttaaaatcaagaaaaaagttttgattaatcaaaatcgacgccaactaaaaacacgtgtcaaaacgtggttggtgacagtgggatatgagactgtattataaaaagctacttt

SEQ ID NO: 26992 - DNA, 1240 bp, Arabidopsis thaliana landsberg
tccaccaaaagaaaagtgtatccaacataagctatcggtggagcatctcagaatatttggttgtgtttcctttgctttagtaccatatgaaagaagacttaagcttaatgagaagagcgtcaaatgcgttatgcttgggttaaaaaaggagtctaaggcataacacctttacaatcctaaacaaagaagatcatagtgagcaaagatgttcattttgatgagagcaaaggatgggaatgggaaggaaatatgcagagtgaggagctgattgtgacagaatccgaacgggaagagagttttgatacattacctatgacaccacaagaagatgtcacagttgaagagcatggtaatggtgaataggaaagagtggaataagaggtaacccaataaatcagtcacaaccaaactcatgtgcgagaaggaacaattagacagagacaagcactagtctgagtgaaggattacgttcttggaaatgcaggtttcttagttacagaagatggagaagagatcattgcaatgtttgttgctgccgaggatcccgagtgttttgaagatgcagcacaacaagacatatgaagaaaggcaatggaggcagaattcacttctattgaagagaacaatacatggtagctgatggatctactagccggagcaaacattattggcgtaaaatgggttttccaaacaaagtttaacgagaaagcggaagttgataaattcaaggcaagattggttgcgaaaggctatcatcagaagtatggggttgattgttatgaagtatttgctctggcggggagatgggatacaatcagatcgattctcgcattggccgaagaaaaggggtggaacgtgttccatcttgacgtgaaaagtgctttcctgcgtggagaattgaacgaagacgtatacgttgagcaacataaggacttcgaagtaagtaatgaactgaacaagttatacaagctgaacaacgcactatatgggttgaaacaagctcctagagcttcgttcgtcgaatcgaaggatactttgtgaaggaagggttcgaaaagtgctattgtgagcatacactgtttgtgaaaagagaaaatgagaacatctttattgtaagtttgtatgttgatgatttgatctataccaataattcatttttgacccttgaagagttcaagaattcaatgataaaggaaatctcgatgactaagctcgcaaaaatgaaatacttctgggaggg

SEQ ID NO: 26993 - DNA, 1538 bp, Arabidopsis thaliana landsberg
attatccatcgatctcataaggacgagtattaggatccaaatgagaccttttggtcctccacatatcatgcgaaccggatcatcaatcatcactgattagtataatgaagttggcttttagataaagtattcaaccaataatatggggaatggacatcttcgagactccgaccaataatgagaaagttaatcaaatctatttatgggtcggaccgatcactatttttctgatgcggaaacttatcaacaaactttgaattttttagctttttgttttacaatgaatctatttgcattaattttaaaactgtgtttataattaaacaagaaaaatggtttgaaatgatgaattcattggcctaggacgtgagatcaaaacgccaactccaaatccaaccaagccaatgttcatttctccacgtggcgtttttaatggatcaaaatcattgcaccaaacctaatttccaacaaatcaacatttatgcggcgaacttactccccaaatccaacgtaacaatcgcactatacacaattttttttttaattccataaatttcatagttcttttttctccaaatttataattataaacagggtccaaaatgtttcatgaaaatcaagtaaaaaataattaatattaaaaatgataaaatataggacaattacctaaaaacagagtttttctttgctataaatggtaggttaatttttctaccaacattaaaaaaaaaacactattatttagtagtaaattgtagtcttacctagattgattgaggaatttaatgaaatacttttacaaaaaaaaataccatgaaacaatatatgtgattacaaaagttaatgatctatgcgattaggaagaaaatgttcgaaattcaaagctattactaagatagttaaaaatatatccaaaacggataagaacgttcgatttaaaagtcatgtattcatttatcttatggaaaatattttaatcgaacacaaacttccgttgacacagattgagtcacacaatggataaacaaaaggatcacatttggcaatacaagaaggcgtgtaagattggatgagaacaaaatgccacgagggatgatgagaggtggctcttgggaagaggcaaaggtcggtttattgcaataaccggcttttctagtttttttttaataaacagctctttgacgcaaagccaaaaaaaatattggtcccggatttgttcactttccacattggattgataagaaaacataaatctgcctacatggaacaaaaaggtcgtcttgtttttcgggatcacaagcaaaagcaaccttataatagtcactttttttcaggaacgtaaattatgcaaatattttcattttttgttttcatcttattttcctaatgttgggaatataatacggacagtgttacacggtgtaacttacaccgttggtccagctcaatacacaaatcaaatagaacattatctatgttaaattcttatagaaagttacaccaagtcggtaatatatattaaaaggtttaaaacaaat

SEQ ID NO: 26994 - DNA, 840 bp, Arabidopsis thaliana landsberg
tccccctgcgtttgtgtttacttctctaaagaacctatatggactatatcttacttaattaactgtttctaattcttgaaagtttttataccttatggtactcggcttttctttgtttctgtgttgatgtctgtgtgccatgttgcatgttgcaatcacatgttacggtcacttacattcccttcccacttgcgtagagttcatctctcatgatctttcttgcatatgttctcattatatgcttagcaaattctcgtttgcatttattcgtttgtcttttgcaggttacaaaagcctcagtagattaagaaacctggagattctggatctctcttcacatagattcaacaacagcatctttccttttcttaatgccgctacatcccttacaactctttttcttacgtacaacaacatgcatagcccatttcttgttaaaggtgtgtttctccatttttaactaattagtaataactagcgagacctatttactgatgatcgatgtaccttttgttagatcgaatcagtttattttgctataactttatatttctaaatttcaattttatatatgttgaacttcctttcagaattcaaagatttaacaaatttggaacatctagacttgcgtggaaacagatttaatggctccataccaacacaaggtagttaatttgttcataaatgcttgcttttattggattggtttttgtcatctgttcgtatttaaacctgtttaaatatgtgaattatcattctatgcttagcaagattctcatttgcagattataacagcctaaggagatttagaaagctgcgagattctggatctctctgata

SEQ ID NO: 26995 - DNA, 1204 bp, Arabidopsis thaliana landsberg
  unsure (1)..(1204): unsure at all n locations
ggaaaccaattataaaaaggaaatattggaccgaaaaataatttaaaggttatataaatttccaaataataatcgtacgtgggctattccaccgcctcaatagagtataaatataagaatctctgaatcttacacattacaaatctctttggtctacccacatcatggaagctactcctgtattcaactaccatattgatgtcaatcctgaacgcaaaaagattggcacaatccaagtctgtgtaagtttcgtcggatcagccaacatgccgccgataccaacccggtctaacttctcatgttcattacctgccaatgaattaactgacgacgaagattctccccacaaacaaagactctattacttcttaacagattcagcagttgattcacaagatgcttacacgttaatactaaaactcactcaacttgcacgtgatttaacttctaattcgtttgaatactgtccacgttatgctttgtcagtgtggttgactcttgatgtggctcctttgaatgaatatgagaggaatagcgagtatagacgacccgcgagcaatttaagggtcggggccttgagcaggagaatatacaagaggaaacaaaagaccagctctattgctaacaagagcacaagatacatgagaaaacgagagacctattctagtggtgacaaatgcgcaatttgttttcaggagtttaaaaccggacgagaagttgctactttactttgtggtcatgaatttgacaataagtgtattatggaatggtttaaggttcgctacaattgtccattgtgccgcttcgaattaccacgtgaagatgatcatattcctcaaagaactacagatttataactaacatacattaacacttaagcgctttatttggttttatttaattttaggtatagagatcaatattatacggtttttgaaatgagtaagacacttatatctttcgtcataactgataacttagtggtttaatttgtgctagtgttgtcgttgtgtcaccatccatattcaatcatgcataatgcacgcatgttgacaaataaaatatttatatctattattacttttccaatgatttcgagagcttcatctcttgattttaagatattntcttatgttttccgtgtatcgactttagcttttcaatttgttttctacggacattgtattatacaatgaaaataata

SEQ ID NO: 26996 - DNA, 8758 bp, Arabidopsis thaliana landsberg
tgtgtttgttaatactgatggaagacataaattttaaaccattaaagtttctccagcgacttcaagaaatttcaagattaaagtagtgaaagaatgagaaatacttcatactataagctattttaatctattatacatatatagtctaaatacaaaatagtagttaggttacgtacaccatcatgttaaatgcaaaacacaaacagccaatagagaaatatcatataattcatgcaaataaactaaacattatctattccacaaatgagattaattttttatttaaaatatatacatataacaactcgaggtttagttttaagcgaaacgtatatgtgtgaaaattagttaatgaaccttattttttcttcttttatagctggttatttcttaatattcgtgttaataacattagtaaaaacacagtaaagatttttttgtctaatacgataagtaataattaattaacgttacatgtccgagacgaccgcaaatttggggcatacctcttggagcattcgtcattgtctcgttgatgtgttttcatataacgtttggataattttcaatttaatgtcaagacaattttgaatgctagttgagatgattctcaatattctgatctcaaaagaagatgctgaccaagatgtttatctctgatgtcatgccttgcacaatttcaaaccaacctactcctctttctatatatacgtggagccaagtttgtcaatcttatgatttggtggtaccatagagtcgacttggcgggttctcgcaaggagtttcaaagagaatttcaacacatggacggttggtgtttcacgatgaactagctcaagtgatcaaatgtgtggttagagtcacactcaaacttgtcttctttttgcataactaaacgagacataagataacttattctttgaactctctcgattgagattggcataacactcattttctaacggcttcttcttttgatcatacgtatcaaatacattcttcttcagctatctttccaaacttccagttgaccgaatataacaggaaaggaatgaacgaacacagactcaaactcaagcataccacattattgacgtctaatcgacgtaaagattcaccacataattcactccttctcagattctgacacttctcacctttaaaacattatgcaaacatagtttggggattgtcgttagttgactcttagttatttagtatgtcaatttttgtttgttccaaactttcaagaaaaaaaaaatgaatttgttttttttttttctatcaaagatattcgtaaataaaacagatatttcttcttctttgtggtaacatattttttgcaaaaaacttttacgaaagaaacttgtaaactctagaagcatataaataaaataaagtatatattggttagaacctaattactaggctaaaaactacaattcattatgatattttttaattccaaatctatacaaaattatttcttacataaatatatatgtagacatgtattcaataattttcatgataaaacataggagtattttttacaactagaaggttacatgtacttaattatccttaattgtacccaccaactgtcaactatatatacatactctattttttttacagcagctataattttctttatttaaattttgtaaaggttctgttacttcattaaattcaatttacacaaacttgtacaaaaaaaaaatgatctcacaaccgttgaaaaaatgacctcatttaaaaaatataacaaaaataaaatatgggacatgaatgacaaacataacagatcggaaatatatttaaaaaactgcaataaattaaggtcattaatacgtggccgaaagcaactaatttactaaccaatgcacacatctacttgcttcgtcttcttcttccttcttctttctaccaccattttcagattcaaaattcaattctaacagtttcacttaccctgctcctctctctctctctctctctctctcgctctctttctcatgtgatctctctcgctctctctttcttctctaaaagccaaaacttcgatggcattactgtgattttcctcataaagtaagctccttttttcgccggagattatgggaggctgtacttccaaaccctccacttcctccggcagacctaaccctttcgctcccggtaatgactatcctcaaattgacgattttgcccctgaccatcccggtaaatcaccaattcctactccttccgccgcaaaggcctctcctttcttccccttttacacgccgagccctgctcgccaccgccgcaataagagccgcgacgtcggcggaggaggagagagcaagagtttgactagcacgcctctccgtcaattacgccgtgcgtttcaccctccgtctccggcgaaacacatacgggcggcgctacggcggaggaaagggaaaaaggaagctgctttatctggggcgacgcagctaacgacggaggtaccgcagcgtgaggaggaagaggaagtagggcttgacaaaagatttggtttttctaaagagtttcacagtagagtagagttaggggaagaaattggacgaggacattttgggtacacttgctctgctaagttcaagaaaggagagctcaaaggtcaagtggttgctgtcaaaatcatcccaaaatcgaaggtaacaaaacttgagtttagtttcttgatcttgatgattgcatactctccattgtagtgttagctgatagaattgaatgtgttttgattcttttttggcagatgacaactgcaattgctatagaagatgtgagaagggaagtgaaaattctacaggctttatctggacataagaatctggtacaattctatgatgcatttgaggacaatgcaaacgtctacattgcaatggagtaagatcattattttatcataaccttaaccatttccttgtttgatgttgaatttagttaggttttagttatgaatttggtaaaaagaacctattgtttcataattggatttaagtagtttgaatttgcaggctatgtgaaggtggtgagcttcttgacagaatactagcaaggtgtgtgtctgtgtgctactaaagagttatcgatacttatggccagagattgttcttattttataaaaagattcatcgtttttttctacaggggagggaaatactcagagaatgacgcaaaaccagtgattatacaaattctgaatgtggtagctttctgtcatttccaaggagttgttcatcgagaccttaaaccagaggtgaggcacaattttgaactggaaagaagattatgttttacttttatgtgtagaatgttttctgatcgctgcttcatcatcagaacttcttgtacacttccaaggaggagaattctcagcttaaagcgatagactttggcttatcagactttgtcagaccaggttcatcatcacacattttactatgtcactatttctccagttctttttcttctggttagtaaactaaaaatggtattttgtgcccctttttttgaaagatgagagactaaacgatatagtgggaagtgcatactatgtagctcccgaagttctacacagatcatatacaacagaagcggatgtgtggagcatcggagtcatagcatacattctactatgtggtagccgtccgttttgggcaagaactgaatccggaatttttagagctgttcttaaagctgacccgagtttcgatgaacctccttggcccttcttgtcttctgacgctaaagactttgttaagcggttattgtttaaggatccccggcgaagaatgtcagcctcccaagccttgagtcagtcatttttaatttcacagctctttatagttttatgtctcctgtcttttggtagtcataaatcaccaaattcagttcctatttacttttttcagtgcatccttggatccgagcttataatacggacatgaatatccctttcgatatcttgatctttaggcagatgaaggcgtacttgcgatcttcttcattacgcaaagctgctttgagggtatgttttaggcattcttttaaagtgtcgaaaagagcattgaagattactttctcactattatgtgctttcttttcacaggcgctatcgaagacgttaatcaaggatgaaattctttacctgaaaactcaattttctcttctcgcaccaaacaaagatggcctaatcacaatggataccattagaatggtttgtgacactataacttctcttatattccttcctcttgagaaaaaaagagaaacaccgtagtaatctaatctgtattgcattttttgtttctgtttaaacaggcacttgcaagcaatgcaacagaagcaatgaaagaatctcggatcccagagtttcttgctttggtaaatgactgtgttctctcggattttgataaatgctttaacaatttggtgttaatgatccttcattgactggctttttacagctaaatggacttcaatacagaggaatggattttgaagagttttgtgcagctgctataaacgttcatcagcacgagtcgcttgattgttgggaacagagcattcgacatgcttatgagcttttcgacaagaatggaaaccgagctattgtcatcgaagaacttgcctctgtaagttaaagcatctgtcttcagcttaaatacaaaaatatcgaaaaacagatcctctaaaacgacatgcttttgaattgcaggaacttggtgttggaccatctataccggtacattcagttctacatgattggatcagacacactgatggaaagcttagcttcttcgggtttgttaaactgttacatggagtctctgttcgagcctcggggaaaactacccggtgaagataacgaaaacaaacatgacctaagcgaaatcgtaaaagaagatgtcaaaacctttactctaaatcttggattggtattggaaatgtaatagttggtcaaagactgtacaacaaatgaaaagtttcttacaagagcaattctaaaaaaaagattgttgtaataatatagtaaccacagatactttgatactctatgtgaagtcaagaaaatgaaaatgaaaattccaaaaagatttgatttttgtctctctttcttcccaatgattatggaatcagcgaaatcttggttatttccggtttgttactgtgctttaatttgtgagatctgagtcggtgtaaccagtgaaaaccggttctagtgatggaaataaattagaatttagaaaacaaaccaaaccgattttcttctcccccaattttatattttgcttctcctctcgagtttgggattcgagtttaaggaattagggattctaatctctctctctttctctcgagatttttcttcacttagttcttgattctgattaaaagttgatcttatagttccggtaacttcgttttctgggtttaattttcgattcaatcttcatctccttgatccacagccatgactgaggtaaatcaaaattcgcatcttttctctccaaatctctttgaattacgaaacctctgtcttgtttcgtaattgaaattgatcttgagtttgtttttttgttatttcagtattgggtaagtcaagggaacaaatggtgtgaattctgtaagatatggatacagaacaatccaacaagtattagaaaccatgaccttggtaagcgtcaccgagaatgtgttgataagaagctcactgatatgcgtgagaggagtgcagccaaagacaaagagctcaagaaaaacgaaaaactgcttcaacagatcgaagctgtgagtaatcattcttgtttcttttgccagtgatacttattctaacgtttttatttctgattccgttgtttatatctcaacttgtttcagaaagcaactcgtagctatcagaaagatattgcaactgctcagcaagtagctaaagcaaacggtgcaccagaggatggtacatccggtaagtatctctctctatgatgtcattagtatttgttcttcgacttatagctgctatattcagggttgttgcttagctttggatctgtttgttatagacttaacattactgaggtcgtagagtatgtgtgaattggatttgtgaattgctttcattgaccaaaagtatgaacaaaccaagcagcgtttgattcttcgattgtcatattacacatctttgcaaatgacttataagttttaatgcctataaccctatagagaatcatcacgaaagagcgaaacggttgcttcttttgagtcactctcaggttctttcatcattttgattgccatttttcttagcctttttcatttatacatataccatgtagtaaccatattgttatggcagattggatgctcgacagtgcttcaggctattattacaaccagaccaatggtctgcactatgattcacagtctggattctattacagtgactcaataggtatgtaatatatatcgagttttttttatttgtttccttgcaaacatgattgtatacaatttcgtcgtgtgtatgcttacacgggtaatgaaacaggacattgggtgacacaagacgaggcctacgctgcggttaaaacatcatcaggaaccaaagtacctctcgtgaaaaagcctgtatcttcttcaggagctggaccaagtgtggggaaaccacctggccgtcttgtcacagcttctttaaatcctaaaagagctgtgaaaggagcggcttcatctgttgatcttggcaacaacaagagaaagaggcaagatgagaaaccgaagaaagtatctgcagaagagaaagctgcattgaaggcaagagaagctgctaggaaacgagttgaagatagagaaaaaccattgcttggtctttacaatagacccttttgatgcatcattggcttgatcctatatgcaaaagggagaggctaagcagagaagagtgatgattgatctcattgtggcggttatttcagttattcctacatgacagtttattccaaaactctctggtatttctgggagcattggtcttgtgttcttctaactgttgttccagtcatatcagtttcctctttgttgtacacacctattcaattttatagtcagaatgatggaagtccacattttacccattttgatgaagttacgaggtctttgcacaactttttttttgtgttcgtcttaaaaaaagtttagaaaattaagttctttttggtctattcttctaaagtttattggttgactttcatgaatcagtttctgaaattatgcataaacttgttaagatgggaataaatcgaaaccaaacactactctaaagaagtaaaactatcaaagcactgcaaagtgcacactaataaatgatccaaacgatttaggaaattacttattgtggaccaagctctgactttgaggaagtctcagtaacaaagacaaattaactcaaaaaaaaaactgaaaataaaaaattcaagtatcagacgaccccaaaattttgacagagactgagacagcaagataagcaagattcaaatccaggatacaaaaccctctttggacactagaggttttagtttcgatggtgcgagctaacctctgaaccaacaactatcatcggatggatcactttgatcacccaacggtttgtttttatcccaatacccgtaagtccaggactcacagggtttctgatgatagagacataccaacactttcaagaagctcccgggactgcagccgctgcagtagcgtacatgtttgagtcctgattggcatatccattgttgtatccttgacctcttgaatatcctccattccattggttgccagagtcacttctccactgtcatttttagatttaaaagttgaacaagattagtaaatggattaaaacattcaatagaacatcacggataaaaactaccaagttggttattcttgtagagattaagttagcttgtccactgattacaactactaatagagaattaagacaaacatgaaatattgaaacttcgacaacctctaaagataaacgataacatcagtacatgcttcaactagctcatgaatcttaatagctgtaaattttctcaatcctaagaaacacagaaccattactattatttcagagattggataattcagggagatgataagtgggccaaggtgatatgcattagatttgccaatagatatagtcaacgaaaaccgtgggaaggtggtaaattccactaggtctttatggcccgcaatacacctactactatccattgtcaaccactgactttggctttaaggatttctataactttatccaccccatgaagacagaaatataaagacccaaaagaactctaaagctaagtttgacctggaccataggaccataccaatagaaatgcatattttaaacacaaatccaactaaaattttcttgtacctgtttgttggggcttcttccccatgaaaggcggacagtgttcttcccaatgactgtcccgttcaagttcccgatggcttcctcagcactttgcctgtcaaaaccaagggcacgtcacacattgcaactaccttacccatcttcactgttaaaataatcccctacggattcgctcatcatattgaacaagcaccacagtaccggatgacaaagctgacaagcacagaacaggtttagtacctgttagcaaattggacaaagccacatccttttccgactgggatc

SEQ ID NO: 26997 - DNA, 918 bp, Arabidopsis thaliana landsberg
atatctgcaatgtaataaaagacaatgagcagtgaggtatactgttattagcagaggaatagctaaaagagaactcactgttgagttatttgattctccatcagacattgaaccattccctccatgtccaccagcaagtgtaagagctaatccaatgaaaacattacaattcacttcagatgctatgtttaacgcatcaagacaagttattaaaccttaaaattcatattcatagttactaaaagtgacataaacagaaaataaaaccacttgcattcactgaacagagagaaaacatggaaataaaaacataataaatgataataaactgaaactaatgctacattaagtcacaaagattatctcatcacttaccttgtgaagaatgttgttgctgattagcaatcgctcttttgggagttgcaatacctacacgcatttgcctgttcgaacagtaagctccattcatttctgtcaaagcccttgacctctcattttcatcaccgaacctcacaaaaccataacctttggaccggccggtgttggaatcaatcacaactttggcgcttttgacagaaggatatctatcagaaaaggtctcatgcaataaaacgtcagtgacatctggagacaagtctcccacaaaaacagataggtctggaccattttccactgctcttttttcaccagtactaaaagatgcccagtttatacggaagggttggtccgagtttggcatcactgaaccactatagttctgaagaacttcttcagctgcagcacgtgaaagaaactcaacaaacccatacccttctgattgagaagtgagcttgttacgtataacttacacagaagaaacctgctcatcacaaaaaaaaacaagaaacttcagagaaagaacaaaacagaaaacatgta

SEQ ID NO: 26998 - DNA, 1138 bp, Arabidopsis thaliana landsberg
  unsure (1)..(1138): unsure at all n locations
tggaaaaactctgaagtatctaatatctcttgatttctccatgaacaacctagtaaaacatagtagaagtgggcgaaaatacgatgttatcatccaccatggctctccatcaaccaaaacataattatgaaagtcttaaagacttctgaaaagtttgggctcaaaccaagcttgtttgccaaaccaaacaataaaacttgccactaattactttaaactaaagtgcttcccaaacagatttataattccattactatccggtagaatttgattcgcactgtggaatatggagtatgtggtatcatgaagaactccaccaatttacagccagatcaaatatcatttcgacctccaaacattgctattgatattccatctcagaacttttttctggttcataattagcatatatttgcagatcattctaacagttacttggccggaaagtaacacgcataactcctcaagtttgactcttattgaagatctattagttgctaaggattcttgggttggtgttctttctagagatgttgtactcatgatctaattctttctggttcgaggagaagaagtttcacaattttcccttcatcttcttccatctttgcttgtgttttgcttttctccagcctagatatgctctaatcttcttcatcattactccccctcacttttatgaaccatatctccccctctcaatgcttttcctttgcggtgatgatgatcacttcttcttggccatatctcgcccttcatctctgttttattctctacttctttactttcttcttctctttcacgatctgctccttttttctcaatatgacagcgagaggaaaagctcacaacaattgattctcttcatttatttctctcatcaccaaatgcaactagggtttattaatcttaacgaggaaggacatgcttacatatatagatgtggtcacaactactagaccttgtcgctttgtggtttttcattcacttgggccttaaatgggctgaatcataatgttaaaacaaaatgctccaagaagatgggagtgggatgttacatgattgacgtgaatntagaagttttgtaggttcaaatcggatggacatggacatgaaaggtgtangcgatagtgctgat

SEQ ID NO: 26999 - DNA, 1508 bp, Arabidopsis thaliana landsberg
  unsure (1)..(1508): unsure at all n locations
acatctacaaattgtttcttgactaaggcacttatcccttaataagaactgtacctttttctcagcttcttcttgagtataccttttctttggaatataaattccatttttctccctagcagcatagacctctgatacagtcaagaacagacagttaacccaagagattcacatataagtatttaataagcaaaggagatcatcaatatgtaacaaatatataccttgcttcagacgttcaatttcagaatacaaatctttcataatagctgatttcatcatcttctggttaacctgaatgcagaaggtgtgttaatacaactaaactggcagaaataatagagcagcatatgtttgacagacctctggtttatttttgatgtgtttcgcacggtgtgcataatcaagtgtgctgagtgtttcttccaggcaatgaacagagggtgaaactgtagcaattacacatgtttttgtttttcctcccaaagagtctctcaataatcttgtcaacttgctttctctgaaatttaaatgtgtataatcacatggttagaaacattagatcttgtctcaaaacttcccgagagagagatattgaaggcagaatctttctgttacctatatggaatgtgaccagagtgttcaaccaaagcatttatgacacgtccaagtgtgagcaaacttttgttgatctcaccagcttccctggctctaccctgcaaaatagtgactcttatattgtttagtaaatcatcaaggtaagacactattattctgtcaataaaaaatcatggttcctgactgttttaggtacctctcgagcaccagaccgtgaaatattctctgaaccagcaagatcaactagattcagctttccacttttgacaatctcttccccttctggagtacattccttaatatggattgtaaccgaaaatattgaatgagatctactactttgtttgttgagaagagtctctgctgtgcgtctcttagctgaacctttctccaagactttgtcaatttcatcagcagtacacaccaatctttttttccaatccgcggacaaaaacaccatctttgccatcttccataagagccagaggtttctttgatttatcatcagcgaattttgtttcttccggagctaaaaggtctgtcagttcttcattgtagagctcaagaaatgaaactttcaaactgtattcagcagcactttgtgcttccagtatatcaaatatctgtttaactgctctagggataacacctgcatcactcggaatttcaccattctnnnnnnnnnnnnnnnnnnnnnnnnnnnatgaggattcagttaccatcagtaaagaaacttcaaatgatgttcttggaatagttagcgtaccttttttcttgctcctccttccattgtgtatgtcttaccagttcctgtttgcccatatgcaaagatggtgcagttatacccatcaagaacctcaaagacaattggagaaactgcttgatgatac

SEQ ID NO: 27000 - DNA, 2978 bp, Arabidopsis thaliana landsberg
tcgattgatttttcaattaatattgccaaaccctagttcctctaatccatctcccaaaacttatcaatttatcgttagacgaatcatgttgtttcttttaaattttaatcttggtttgtttttatctcaaagagaaacatatgagtgtagtctacatactaaaaaaagagatgcgaattaaaacgtttcttttataaagtagtgatactgttaagcatacaacacacttttcagtctgaaattttctccagcaatttctctaccatgattctctgttgtgtcccgcttaaagtttcagaattcatcaacgcattggcgacgataatcactatacgaggagcagccgcatgcacctgaaaccagacagaagatattaaccatgcgatttccagttgcattgtttggattcttaagaagcaatcactgtttttcttacccaacatctcccatttaagccaaacgcagtctcaaacgagagtttctttccaagagcttcaaggaccgggcaagttggtgaactcaacaacctaataagaacaaagtgtaagagtgagaaaaagtcgagaagaggccacttcatctagaagaaaaataaaggaataagagtgaaactcacattctagataaaccagttgaagtttcaaacatgaaaccatcttttaagggaccaaatcctgcagcctttccactttctattacattgtccaacaattctagtcagcaattgcttagtctaaacaattaatgcggagaaacaaggaaatgatttaactttttaaactttgtgagaaaaaagaatggatggactaaccgtctacacatgacagctccgggttcattcctgtgtttgtcttcacaacccgagtataaagcagagtgcttacctgtatcaacaaattgtcacaactcccaaaaacacgtgatcactatgttatcacttaatacagcgaatccacttgaaatagagttgatgagctcaactccagacgaagtaaaagtgcctattatgctcataaacaaaccaatgaagtactggatcctttcaatatcacacacaagccattgtaatttccagggaaattctcaatacactgtaatggcaatactaacatctcaaacaactgaatgcagttaccagctagagactattttgatgatggttcagattgaagaagtatattcagaaggtacttgcctcaaacttgggataatttcttctgtttgctccttcaaatgcaagcacaggcaaaagagccaattgtggtcctttaatgtctatccaatagttctgcaatgaaacatgtgtcaaaacgattttcaaaatattatgatctactttgttacatgcaacatgactttggctgagaaatctaggggtaacactctaaataaaggcttatgccgttttctttatccatgatctcaagtatttattaacatatacatgtaactaacaaacaagctgagcaatgatagaagttggataatgatagagcacaaccgaaatcaatattctttatacatgatttttgcattaaatgaactgtatacagagaaaaaatgcttgattcagagggtccaagggaaaagggatctctaaacaaaaattaaggatcgtctttagagtacttacttctcctttacaacctaccacaatgccaagaacatgatcctcaggacgaggtacatactgcaagaaaaacataataacagaggcaaattggagtaacatggagtaattcttcaaactagagagcaaaaccaccactttttcgacaagttaagcgcagatgaacaatcgaataactagtagagctaggagatatcaggaaaaaggtacatatttattgcaaaatacaaccagcaagaaactaattagttctcacccttttatgagaactttccacccaatacttatttggcttagagtacctcaacttcccagctctcataacagatatcacctcattatcctgaaaaaacctcaaaatcatatgtcaatcttctagccttgcaagctcaacaaaaagcaaactgtagattccaaattaagtttattcctcaaatgccaatgcaagatccaaaattcaacataacttgtttaataatgagcaaaacattcattaattcattcatacactcaacacatcacatctcaaactccaaaaaaatgatcgaagatttggaacaagtgattttgagaaagttaaaaacctgacagataccactgccgagtttgattgtttggttagtcatgtttgataaatcgagaacaacatcacctggaacctgaaacccatctcacaaaacttaatctttcaatgtaatcccaatctaaaacgataatcaaagaagcagaggttttagtagaaaatacgcacaacagtctgatcaatgaggcttgtcggcgaggtagaaacttcagtacccatctttcttatttcttcgctaacaacaccaattgatttatccaatgaagggagacagagcaaaagcagaactgagaggtagagagaaagaagaaccctaaaaaacactaaaaccctaaagttttttgctttggtgatgttgaagacgatcggaaattaaaaactccgaaccaagtaatttactataatggttatgagtggtttatttcggtttagtagatccatatgatttggtcaactaaaaagtctccttcgtccttccttttttcttgggacaaaatgacacttctttcactgattttcaacgactgctctgtggaccatgagtgatggatggtagttgtttttggtgaacaagaaacaatgacactgatggtttcgaattttacaatggattaggtgatctgatgtagacatgtgtgtgcatatacatcaattaattacataaagaagaatctgactcgcatattcaaaataagggatttacgtcactaaccaactttctgctctacttttctctgtacatggtatatctattctataagctct

SEQ ID NO: 27001 - DNA, 7188 bp, Arabidopsis thaliana landsberg
tactcagtactctataccgaggtgccttaccaaagatccggatgctcttggacacagcttccaatggtaactttctcaacaaagatgtattctgaaggttgggaacttgttgaaaacctatcacaatctgatgggaattacaatgaggactatgatcgcactaacagaggcagtagcgattctgaggataggcacaagaaggagatcaaagctcttaatgataagattgataaattgttgcttgctcaacagagaaatgtccactacattacagaagaagagcttacacaactccaagaaggggagaatcttactattgaggaggtgagctacctacagaatcaaggtggctacaacaagggattcagcaactacaaaccccctcaccctaatctctcttacagaagcaacaatgtggcaaacccacaagatcaagtctaccccccacagaaccaaccgcctcaaggtaagccctttataccctataaccaaggctacaaccaaaagcagaactttggacctccaggcttcactcagcagccacagcaaacttcagcaccagactcagagatgaagactctacttcatcagcttttgcaaggacaggcctcatgctccatgaccatggacaagaaactagctgaactcaccaccaggatcgattgctcttataacgacctgaatttaaagatagatgcacttaacactagagtcaagaccatggagggacacattgcttctacttcaactcctaaacaccccggacaacttcctggaaaatctgttcaaaatccaaaggagtatgcccatgctatcaccacagtgagtacttctgccactgaggacagtgggattcaagaaggggaggttttgagaccaaaatcaagacaggagattgaactcgacttctttgctcggcttgtcgaacgagcatatgacccgagcaacccaatccctattccacctgcctatgaacctaaaccatactttccagaaaggattgcacaagttaatgcaaggatcttccagaaacacaagatgatgttcataaagtgtatcaaagagttagaagagaagatacctttggttgatactcccaaggaagtaatcatggaaagaccccaagaagctcagcatatagttgaattgagttttgagtgcagtgccatcattcaaaggaaggtgataccaaagaagctaagtgatccaggttcctttactctaccttgttcactaggacccttagtgttcaacaacagcctttgtgatttgggagcttcggttagtttgatgcctttgtctgttgcaaagagattgggatttgataagttcaagcctagcagcattcatcttattctagctgatagatcagtgagagtgcctcatgggatgctagaagacttaccggtaaagatcggatcggttgaaattccaaccgactttgtggttctagagatggatgaggaaccgaaagaccctctcattcttgggagaccatttttagcaactgcgggcgctcttatcgatgtgcaaatgggtaagatcgacttgaaccttggtaagaatctccatatgagctttgatattgctaagaagatgaagaagcccactatagaagggcagcttttctttattgaagaaggaaatttagatgctgagttgttgagtgggttggaaaatcctattccgtactccattccgactcgccacctaggagagcccgagaagcttcttatgatagaaggaggacctagcttagaggttgagactaaggggaaccatttggaagttggtcctattgctagagagcttatggagctcaggaaacagtatggagctcaaggagagaccatggaaaagttggacctcaagatggaggagctgaactacgctatcctggagcttaaggagatgattaaaggttatccaggtcctgagatcgatgaatactttgaggaacccgatcttggagaagaggactatagtactgatgagaaagaggcttacttcgaggaaagatcaaatgagtactccacactccagctatcaagagaaaatgcggagtatgattcagactttgaggattcaacaagtgaggatgaggacttctcagttcctctcctcaatctcttctctacctaaacattgtgagagtcaagcttagtgactttaaacaagctcacttgggaggaagtcccatgtctatccttgtatatattgctttcttgttatttttgatgtttttgtttaagtgtttcagggaaaaagacttctagagaatttcaggccacactcgaccgtactactcggctacaggccgagtgtgggcttcaattgaccaaatgcccaagattgaatagtactcggcccacaccactcggcccaaggtcgagtatggacctcactgttcaaaggcccaacaagatgcagcactcggcccgaagccgagtcagaaaaagaagcccatcaggcccaacaccgtactcgacacgcgcgtcgagtatgtcggccgagttcacacgtgcgaggtcaacacaattcaaattcgaatttgctgggccccaccaatcaaatcctgctccccaaagcccttcaaagagtctgctgcaaaaagtgagacatgtccccttgaccaaatgaagggtgatgatccaaggtgtttggagggctaggatcaaatcttcttgtctataaaaccacactcaacaagctaagtcactcacactctctctttgctcaaaaatttcgagttttacttcttctctccaaacatttcaagtttttactctcacttctctttagaattcccagaagctgaaccataatcttatactttctttccatacaaaccatttcagaacctcttaaaacttcaaattctcttctactttgacctactttgggttattttgggtgactagctccagtacctctccacaagactatggattccgaagaaacaagacgaagagcctctgcttgtgctgtagctagagggtttgccatgatcaacgagagagctccggtttggaatcaggaagctgtgagtcctggttttactcggttgacaggccgagtgcagtggccgagtatgactccagaatcttctatgggtcgttctgctgctgttagagaggaagttacaaggggaagttgtgccaactagagaagaagaagagcctatgttagagggggaagcatctgaaaaagatgtagagattgttgaggaggttttgccagttactgtaagaaggagaaggaactatccaaggaaaaagagggagcccaccatagaagagcattaccagtacctaatggatcttaagtttgaagggacaagatatccccatacgccaaccatgctagagacattccttacctacaagttcgagggatgcaaggaggggagctgccagttccttgctacttgataagtaggtttttaggcctacttatgtgctgaatgtgaggttcagttcaatttcccttaaacactaacatgtcgatgcagctatagggggtgtcaacccagtccactgttattgctagcaatcaagatgtgtacataagcaactaagtcaagccagattatagagatggttggtttctagtaacaatcctaggtcaggattcagacaacaaaaataagaactttaagagccctactcgatcattgggtcgagtagaatcaacaagccgaactaaaaggcaatcaacaagggatacagataacaggtaaataaaagtgcaatcaaggggtgaatacaaataaatctaagaagaatagaagtcctaaggatggattcattgataagggcaactctagggttcatcaggtggctaacaggcgaaaggcaaataccctagatgatagattcaaaaccgggtcaatccactctcgtgacaaagacacagatgactttaccacttcctaatctcaactctcgttgatgaatagcagagcaggctttaagcaacaatctaccaaagtcaagcagtctaaacatccaatttcttgggctagaatctacaaatctcttgaattcctagatcagacatccatttgaacgtcttttggaagctggatacctgtggtcgaattcccacattagccagcgaaaaccgcataggggccaacgaatccagaagggatcttacctaatcttaaccacctgactaccctagagattaccttaatctaataaatcctcaagaaccctaatcactactcaagcaacataactaagaaaaaaacccagaaattactgaaagcatatcaaaatgtagatctaaacaagataaacaactttgttcaaagaactaaatgcaaaaacaaaatagattaagagtaattaaggttttaagattcaagaacacaaagaaaaactaagagataaaagcttattttctttagacaaaccccaaagaacctatttatacttaaatctcaaaaaccctagattcactagaagacaagagacttgaggcggtttggatggatgctcgatcttgaagatcgagtaaagagggtgctgcaaagtctgcaccttttcctccatgctctgagtgatcaattggtcgagtagtgtcttcttcctctcttattcttatgctcactatctggttgagtggggaatgatcaacatgtcttgtagaataggttgccgttgatcgagtaattggtcgagtagaggatcaagtaggggatcgagtagggggtcgagtagtgtatgttgctagctctggttcccctcttgggcaataaaataactgcttctcctctggctcccctctagggcaatgaataacagcttctcttgttcccctctgaggcaatgaataattggtcgagtagctgctcctctggttcccctttggggcaatagggtagagggtcgagtaaactccttgtaaacttattttgcacctgaaaacacaccataacatgcaatatgtatgcaagatgaccctaaatgcctaagtgtgcaaaataagctaaatgtgatgcaaaatgatatgaaacaatgagtgatcactaagctaaatgatgataaatacatgcccaaaatgagtaaattacagtgttatcaactcccccaaacttatctcttgcttgccctcaagcaaacaaaaaatcttaagttgaaggagaggtttgaaggtggggattcaaaacccgtagcatgcatatagaacgggtaagctcaatgtccaggtagctaattataggttgcaaaatgatagacccttacttaaaaatttagccatactcgtcacaatgcaacctaacaacctgccttaatctattcaagcattcacatcaaccaattcctttttacattcactaagcacgaatagtgaatcaagcaatgcaatggttatgaactcacttcgtttcgggcttaggctaagagacaaaaaatggtccctctagtgatttggtcgagtaacaggggactctcatagaaaagattgagctttagcataatgctaaaggtaaaagctaacagacacatacaagaacagactcccatctacctaactctatcctttttcccattctttctcttttttggtttaagttaaaaggggtgcttctttaaaacgattcaagagtctagcgggtttggttttaaactttgacaaacttaaggcttttcttcgtaatgttagcatagaaggcgttttacccttttctttgaattacaatgcctaactttcttcgaattccaaaccctttactaaactaacactttcttttctatcccccttaagaactctaaactcttactcctttttttcttttcttttcattctcattctctttcccgttcattccatacacaatcccaatcccaaatacaagtctccacctagtcctagctaacccaaaaagcatgggctaggcctacatgaaagactgctcttgtcggctcatacctaacacgttatagcaagctcagtcggaaaaaagacctcacaataacacacaaaagatctttggctcgtaataaggttaggcttagagtatgggaaactgctctaaacgtgagagtcagctacttggattaacaaagggtggtgaagtgaataagataatccaactatgtatatggtagccatgagttcacaaacaatgcatagacatgataattgcaaattcattttaggttctaatagatagggaatgacatcagattagcgagttttgaatcaaagctgtatagtcaagttgtaaattcaaagtagggtgcagtcttacttcagagaaacaatgtgttatgcaacagagaactaacaacctgggcattgaacttacttcgccgaatcaaaacatgcttaacagtttgaaatcatcattatctcctatgcacattagcaatcgtaaatgcaagcactctatatacaatgctaaataaaatgcaatctacatgacactctatttttgcgaaatcattttctgaaattttttcaaatttttatggttttttctatgccttagatgatgcaaaaatttgaaataagaaaagagaacacaatgtcaaacatgtcttgaaccctccctcaaacttaaattatacagtcctttgtgtaataaaaatccgaaggagaattaaagaccagaacacaaaacaaacaaagaaaaataaaaagctatggtatatacaatggtggtggtgttgttacctcagcggtcaggtgaagtaggcggagacaaagtcatccgtactctcctttgtgtagttccaaggagcgggttgtgctgaacttggattggttggatgctttaccctttgcttgggctgttgatcgagtggctcctcgagtggtgcggaagagtggcccgccccaacgtccgatttcgttgtccttttgcgcttctttatgttactcctccgctccttctccctaggttcaaaggatgattacctcggtggtgaagatgcagcatggtgttctctcggcttatatgaagattgtcttggtggcgaaggcggatcatattgcataggttcatgtcgagtggatccgcttctcctaaaaggcatgtcatgtggcatcgccgtagtagaagaagaacagttgaagttgagttggagagcgttaaacttcttgttgagtgctgcgaaatccttgctttgaagtccacaccacatttgaaggaaaccaaggtgcttgaaaatttta

SEQ ID NO: 27002 - DNA, 1815 bp, Arabidopsis thaliana landsberg
tataccaaaagcttatttgggacacatagggaaactaagttttccaccgaagataacattggcgttacgcaaagagctccgaccaaaccgcctgatgacgacttcttctctcctcctgtcttgcctacatagtccaagttcacgtcaacaacgtttactccttggcacggcaccgatttgctacacataatctgaacaacatcttttgtaattgttgttcctctaatgttcttgaacaaaatatcacttatagcaacttgtgaatcctacaaaacatgccaaaaaaaaggaattgttaacgcatatattcaaaagaatagttggtttgagacattttcagtgatgtatatacttactccgcctcttgaaccgtagttttgatcaatgatgattgggttcttgacactctgcatgatgatgttttcaaacttaatgtccacagccttgcttgggtctgaaccaccccatgtcttgatcctaagaccattgtcggtctcaatcatcgtgcagttgttaacgtggattccgctaacgtcttcctcgttcttgtacttaccaagactaccgacacttagaccgtgtcctggaccacaaatcacacgttcgacggttacgttgttggagccacgaccgactgaaacacaatcgtctccagtcgctatggtactgtcgaggatgctaacgttgtctgcattgctcaaatggataccatcggtgttggggctttcagctggtgcggtaatcctaatgttttgtgatgttaacattctcagttttgactaagaacatgtggaaggcctttgcgttcaccgagcttatgccattgatttcaacatttttcatgttcctgaatttgagagactgcatgtatgcgtacaaatgtgtgattagttattgcaagtatctatatatacatgatttgcaataatatatagttatttggtcttaccgttggaggaagattgcattggacctttttaccacaaccatctgctttccagacagcttcacctttcccgtggaatgtgccggttccggtgaggacgagattgtcaacacgctcgaacaagaaccactcgggagttgcgtacccgctggtcgtagcgatgattgtgcctactacattgacggtcactttgctcttgcatggaccggcgaaaatgactggaccagcccaaaatgttcccttaggaactagtagcgttgctggtactggactgtcacacacttgtatccatgtgttcaaaaacgcctgcatgaatgttattggatcaatcgttagaatgtcacatgcattttactataaaatactcaaaaaggttatggatcgaaaatgaaactaaactttaccttaaaagtattggtggaaccatctcctacggctccaaacttagtaatatcatagaccgtggggttaccggaattagcagcgagaccacggcggccgccgagatattcaccattagccacgcaagaaccaaacaccaaggccattagaatcaatgaacctacgttaatattgtttgccttggcgaccaaacttcttgcgttagccatggtgataatatctttatttttttttttgctttttttgttcttttaaaagagtgttaacaaatttaaaagtgatttgctcataggaggattcataatgtttttatagtgctagttagtatgctatttttagatttgattccttatagaaaagtattggtattagagtgtgtgattccatcttctcttacggattgttgaccccaatcttatgtagttacgatttccaattttaccgtaacttttttatatcaagcaaaa

SEQ ID NO: 27003 - DNA, 1938 bp, Arabidopsis thaliana landsberg
ctgcttgcctgctacaatgggttacgcccagctagttattggtccagcaggcagtggaaaggttatgctatagtctatgttaagttaatttctgttaactagtttcatcagtgagatttgactaactgtgtttttttgtgtgttttggatctatcagtcaacttattgctcgtctttgtatgaacattgtgaaactatcggtcgaacaatgcatgttgttaaccttgatcctgctgcggagatcttcaactatcctgtggctatgggtgagtgaagaagtttcttcttgttcaattacctttggggggagttttgagtgcttctcacttttttgacatcgttgaatgcagatatcagagaacttatttctttggaagatgtgatggaggatctaaagcttggtcctaatggtgcccttatgtattgcatggagtatcctatgttttggttacattggcaacttgagaatgttactagctttgtaaaatcgggtcttccaaagttgttaactttgtgtgtaaaaatagaataagtacatgatatgttttggattagccttaacttttaatccataggtatcttgaggatagcttacatgattgggtggatgaagaattggagaactacagggatgacgattaccttatctttgattgtccaggtacatacatgatcaatgagtttatctctgatctatgtgtttgataaagtgtgtggtttctacaaagctatttagtgttggcataccaatatgaagcatcccaactatgtttaaattctgtgaattttattctgttaataggccagatagagctgtttacacatgttcctgtgctcaagaactttgtggagcatttgaagcagaagaacttcaacgtctgtgttgtttatctgcttgattcacaggtattatataagttctatctcccttccactacttactccttattgtagtgaaccattttgcctaactaaagatgaatttttgtttggatcagttcatcacagatgtaaccaagtttatcagtggttgcatgtcatctctcgctgcaatgatccagcttgaattaccacatgtcaacatcctctcaaaaatggacctcttgcaggacaaaagcaacattgatgagtatggattcctatttttccctttgtttttctccgttgcagtttcggtatttattaaattgctttgtgtttgacgtggctttagttacttgaatccggagcctcgcacattgctagcagagttaaacaaaaggatgggtcctcaatatgcaaaactaaacaaagccttgattgagatggtatggtatatgattgtaatggattataaaaacaagtagttcggtttcatgattgcattttttgtgttatgattattaggtgggagaagtatggatggtgaatttcatacccattaacttgaggaaagaaaagaggtaaagctatttcctcacagttcgttctctaactttatccaatacgaagttaacatcaacattgctttgtatgggcagcattcaatatgttctgtcgcaaatcgacgtctgtattcagtttggagaagatgctgatgtgaacatcaaagatgatgacgattttagtgacgatggtcctgacctataattgttatattcggtttctacaacttttgttaaaagtctaaacaagcttggtctcattgttcttgtcagttaccaatggcgtttgtgagaacttttgttgaatatcaaaagccttcaatgtgagacgcactcaaacttagttgaaatttctcgaaccagactggatcaatttggttacattgaatatttgtcgtaggctattttttaacccataaaaagtaaccttaacactattgcctccatcactgttgttgccaaaagcctaaacaatccatgccactaaaaagaatattcatatatgcatatataa

SEQ ID NO: 27004 - DNA, 1638 bp, Arabidopsis thaliana landsberg
  unsure (1)..(1638): unsure at all n locations
gaagcaaacgattgaagaaggaatagagaaaaagatttgagttcattgaaatggtagagatcgaggagtacgagtacgagatcggagtggaaacggaagagaaagaggtagagaagaagaagccattagagagagagaggataaagtaatcgaagcttttgttagttaccacatacacatggcgggaagataatttccattttctgtgttatttattttttaatctcttctcgaagtatctcttgtgtatttgtgtagaaagcccttccattatcggtagtattctagaaaagggacttaaacttccaaattctcgtttcagacccttgagtttaccttaggtttcaaaatatatcacaaatttagtggcattattttttttatatataattagttgtagtgctagttgagtctattttagtagattgtcggtgcaagattttagactataatttcagtgaattttcgtttgtttgtataatttctgaaaataatgaaacatgataactatagtgtttcccacataaattcaatcatgtttcattatttttgaagccaattttggatatattctttgtctactaggatatatttatattagatataccggtttgtatattttcgtgtcagcaaagatgggactggggcgagtttgaaaaatcttctttcaaaagaaattagattccgatttattattaaaatttcacaacattgaattattaaaatttttgcacatctcttatgatatatatatatatatatataatctaacatatccacaactgaaacatttaaaatttaaaataaattcggaatacatcttcaagcaaacaaaacaaaagaccatggtaaaacataagaaataaggaacannnnnnnnnnnnnnnnnnnnnnnnnnnnnnnnnnnnnnnnnaatattcatccatgcgtttgtacttcacatccggatagagcttagtagcttcttcgtcgtctccaacttcgtgatctgtgagacaaccttcgtagtatatgtgataaaagtgtcctagtcccgcttggtgtgatatctccttatctgcatgtacattataaacattttcacatttaatagaaaataaatacttggtctaaaatctaactctttctcataatttactagaatctaaaagacaaaaacgtctactttaatttatgagatgtgatatatagaaaataaatacttggcatgaccaacttttacatttcggttttaatactaaactcaacttacattaatccaatgctttatttaagagatgtgatagaaatctataatccaaaagctaggtttgtttaatttggttactagctgatgattagatttaccttcaatgtcagcaagaaagtcgtttcctgaaacataggtcttctccaactcttttccggttagtttctcccatatctgaactagttccatttgtgtgaggatgttgtcggtaggtctaacatacacagttttattcaacgttcgtggatcattaagcgtcttcgcggtatattttgccatgtcatcttcatctacgaacaccactattataaaaccaatgggaaacaaaaatagtgtttttttagaaatttcatgaatattgcagtggcccccataaaaaaataaaaatt

SEQ ID NO: 27005 - DNA, 1183 bp, Arabidopsis thaliana landsberg
agagatttggataacaaatgacagcaatccctataaaattggataacaatatcgcccaaatttgaagaaatccactatattttatatataggagtgggacatatcttaaatgtgaaacacgccgagagttgttgcagtaaacaattcctcattcgagcttagtcaatctgacaatctttatagagatacatataatgaagttaaaactaataagatgatagtgagccaaaattatatagaaaatattaaatttcgaggcattatattaaagacaagccatgttcttgagagaatattatggaacagaacatttacctgttattgctataaaggataaatttcaaccattccgcgattcaacaaacaccgtcgttgttcttgccggtacagtgaagcccccagaaaacgagtcgtaaactgatttcttgactatttcatcggctgacatcacctgttagtcactcagagttaacttatcgcttagagatcttacaacttttctaatacacaacaaactgaaaggtgaaagcttgtgatattgttctattctctgtgatgcgtaatttacctgaaccgggtgtaattcgagcttcctgtcttttagagcgggactgggatatgagaactcagacgggcgtgcattgaagattaccacaatgagtgagtagctgtaggggtaacagcaccattactgaacaatgtctacatatatgaagctttgaaagatttgtcgagtttttttttttttcttgcttacattggatcgatctgagatacacttgggatgcctttgtgaccatcttcaatgctcatgacaatggcaccagggattgatgaggggcctgtgttatgaaatcgcactcgctcctgaggaaaaaaaaaatagaggtcatatcagtccacaagtttttgagatctcttatctcatttgcggtgattgtgaatgagtcaatacaaccaccgataagtcacttagaacctgcatgagcttctggtagtattttatggcatagcaaaagaaggataataattcatagcagagaacccagtgtagagaatttattaaacagtagtcatcctgacctgtatagcccttgctgtatctaaacgaaagagaggtgaagagtatctgatgcgtaacaaatctaagaaattgtggagggtggcaactatgtgactgctc

SEQ ID NO: 27006 - DNA, 1169 bp, Arabidopsis thaliana landsberg
tgttcccttagcagttgctcccgttctgctttcttttgttcctttcctacatatagacacttcgaacctagcaagcagaaacaaagggttaaataacttggggaagacttaagtgaatattattgtccgaggaaagaaacagatccgtcagaccaaattttgttccattcactgtttcagctgcccgtcttgcatcctctgggttgtcaaagttgacaaatgcatatcctctacataatcggttctcatcttttgcaattgctaggctaacaattttcccaaactctgcaaacttttcccttaaaagatcctcactgacatctgcatcgagattcttcatgtacaagttcgtgtacttttcctcaggtttcactcgatcagtctttttcatgaattttccaacatagctgcataaaaaaattccagagattcagatttggaaaccattggtagaacataatggtagaacgcagatatctcatccaaagacacaaatcgtggaacaagtaagtaggaaagccttacatctccttgtcagcaacaatggtactattcaaggtctgaatagcagcatgtgcagcgtcttcttgctcaaattgaacaaaaccatatccccgactctttccatcttcaagagttgcaaccttacaggaaacaatgttcccaaatttcttgaacatatcttgcagaaccgcattggtgactgactcaggcaaattctagccaaataaaaacaataacattaacaacagacattgagaatatcatccatctctttgggttaagagtactaccttaacaaagacatttccaaccccatttctcctagcatcaggtgctcgaacagaccacattactcgaatcatttttccattcaacaaactgttattttttttctcaatggcaaggttagctgcaaagttgaagtaaaagatactatcaaacaaactgtcactaacatctttaaacatcaacaacaggattctttaaactaaatagctctaatcaaacgtaaatctcagtgaaaatatcagaaatcaaaggcataatcagtttacaacaaacatcaaaataagattcgtctccctttcacaacaaatcaaagagaaaatcagtgaaagagaagagagtgacattttcttgggaaaatcggccaataaacacagatt

SEQ ID NO: 27007 - DNA, 1366 bp, Arabidopsis thaliana landsberg
taatatgtgtaaaaatttgtgaacatttttcacaatttataaataagctcaccatcattgccatggatccttctggtcgatgcgaggaatcaatgcaaggaatctccttgatcctttcacaacaaatatccgaagagttcttcaacgagttcaaggttttcttgaagaaagactcatccgtctgttccaaaatcgtgggaactgcagcctaatgcaacacaatcaagaacaaaattaatgtcttcagataatcacaaacaatagaagttgattttgaatgtgacatatacatatatatatatatatacctgaataaatgtagctggtccaccaagaatatcaaagtatttcttaaaccgctcaatgatctgatcaaaatgaccaagaattcagtaagtaagcggcttatttgcgctctttgcatcaatttaaacaaacaaaaatgaagctttaattaaccttaggatccttaaaggaaccagaaggatcagtggtaacaaaccacccgagtcgccaaccaggaactatccatctctttgataaagagccaagagtaagcacaggaacaatagatccaaacacacccattggcacaaacggtttgctacccaaagcaagatgaccgtaaacctcatcagcaatcacaagaaacccgagttttttcgcactttccgcaatctaaacacacaaatttgtatacatcaatttccaaacaacaactttggttctgtttcctcattgtcaaagttaaagctaaccttcatcaaatggtggtaactatagacattcccgcaaggattaccggggtttataacaaccaaagcaacagtgttttcgtctgcaagagattcgacagcatcaagatcgatctcccatccgttttctggaagaagatcgacgtagcgaacctcaaggtgtctaaacttagcacagagttcatagattgggaaaccaggccttggaagaagtatattagccctgggacgagctaacatcgacaatgctacatcgatcgcttgcgtgcaacccgatgtgataaacacatcatctagtgacaatttgtatggaagatcacgcgatagatactctgctattgccctgtttttaccattacacaaaagtgtgagacttgatttgcaagttaagtctcccatagaaattaaaaaatgaaacattccgttgcaatcagaagttcaaaacaacctaattctacaatcatcctaactaaaaattcggtttagtcatccaatcggttatttctgattccggttgagataaaccaacttttacccagaaaaaagggaaaagacgaaagtgacaaacgagcttggggaagaccgacggtaggagagtaaccatggaacct

SEQ ID NO: 27008 - DNA, 1547 bp, Arabidopsis thaliana landsberg
agtttatcacgagaaaccaaatgtttactagtcgtttatccaacagagtaaagcaaaatattgatgtatcagcagcctattaccatccaacgccatgaaaaagagagttttgttgtttatctccaaaaaccaattttaaaaaatgaaggctttcaatgtagaaacaaaaacggggccagcagaaaacaacgagacaggacttggttgttataatgcactgtgtattttaccatagaactgtcaaaagaaaaataaaagaggctaataatgaaaacactgaccttttgtttttgagcatgaatgcgactcaggtctaaaatgggggattgtggagtgtgacttaattgtttttccctttggctcttttcccatgatgccttcacaagccacatgagttctggaccccctttccctgcactcaaataaattttccgtcgtgtgtaaacacgaaaaagattccgttaacgttttctccagaaaggagatcaggagagtcgtgtacacagagataaaaacaagtgtattataatactaactgcatccacaacctccacatggacgagatagttcaaatcacattcacagtacctagtcaataagccagtcacatctcccttgggtaccattccagacgctatgacacgttctggctttcagcatcctcaatcaccagatagtatttacgcttctgtttgttggtgaaaactttaatatcttaacaagtacgtttcatttcttcacacgagaagacactgacggtaagaagaaatgatacagttaaatgtttataaggttcagagtcctataaactgaatcttatttgctggaacataatcaatgggtaatatgccttgggggtacacatctctggtttgatgtaagattaggagaaaacacttgaagactgcatttcattagataaattgacttctttccgaccacagagtgcaacaaatctatcatggaacaatagcaatgggcatttctcaatcaaattggaaccagcataagcatctttgagaaataccgtaccccttgctcctttgttagtaatgtagaagatcccttgatgctttatcaagcaaagtattagtcttgatggaagcagatactcagagtggaatgcatccaattgagcgcatgtcactcttttctccattgttaaactgagcagttcatgaagcacagctacaactcgtttcctagctttaggatctgcagcatcaaatcttctcgcattaagataaggagatgggaattccattttctgccacttctcaaattcctctaaataactagcgttaggcctaaaaccaggaggaaaagaaatcttaaacgcatttcgtcccaagaaattgccatcctttgtgatcctgaccctctttctgtccccaactgactcggagaatccttcacgggataacctatcctctcgtgcagtgattgccagtgaagaatcccaattctctaaaacaagattaacttttccattgataaccttcaaagagaaaaattagggtacttagggatcaatgtactcttaaaat

SEQ ID NO: 27009 - DNA, 1975 bp, Arabidopsis thaliana landsberg
tgtctctgatcctatccttgattccaaagttctgcctatcctttctggaaacttaagctttggatccggtgcacagcttaaaaacgcggtacaacattaagaaacataatcagattgtatattcacttaacatgagaaagtactaatgtttttgaatgttgtatctctcgcttgtagattgggaattggtctagatgccttgcagaaatgttctccataaacactagagattcagttgaagaaaatgatccaatagaaagtgagaaatctttcagtttgctaaacgaactcagtgatctacttatgcttccaaaagacatgcttatggaccgatccactagagaagaggttttgttatctttcattatcacgctttaagttcttgattaaactttcttgaccacagagcctttattcttggttgatttataggtatgtccatcgataagtcttgcgttgatcaaaagaatactctgcaactttacacctgatgagttttgtcctgatgatgtccctggagctgtcctagaagagcttaataacgaggtaaaagctctaaatccttcattcatctgtactctgcttagctctcactatactttttttttggtttgtttcttcatcagagcatttcagagcagaagttatcaggagttagcttcccttacgcagcttctcctgtttcgtacactcctccatcatcaaccaatgttgcagaggtaggagacatctctagaatgtcgaggaatgtgtctatgatacaaagaaaaggatacacaagcgatgacgagctggaggaactggattctcctcttacatccatcattgaaaacgtatcgctgtcaccaatttccgcacagggcaggaatgtgaagcaggaagctgagaaaatagggccaggggtgacaatttcaagatatgagcttcttagggaagtgtggtctatgtgagtgattggaagtcaaatgttgagctttttaaggaagccctttgttaccatctactactgaaacaaaataagttttgtccaagttttatgtagccgtaagtatttgatcaaatgaatatgctcctagaggattgtatttaacaattagctatctttatttctggacatttcttatgtttctttgttgtttttcctcctcaataaaccatcaaagatactaattacagtcttctggccactcttagtggcagacgaaaggtgttctcttggaatttgaatctagaatgtgaaattgagaccaagaagaggatataactaactacaaacagaatctgagcacaaatcacgttgaggtcggtaagtctctatcattcaagtccaaaacaaccaaaatataagataagtaaatctgtgattctttctgtagtaaatctttgacattatctatctctcttcgtggtaaatctgtagtagaaaaaataggtacttctcgttaaacttttgcttgtctctgggcaaaaatatgattggtaatgttttagcctgaagccacaatggcattggatggctttgaattatggttacgaaaaaatcttcaattaaattgcgtcatgtgaatctcatctgcgagctacggtttgatggataatttgcagatttctcaatcagcatgatgctatgtttataaatcatgttatcagaaacgtcctcctgactcctgtttacgttatttcaatgtttatgtccattgggttttgttagttaaatattgcagctggaagcgtgtgctttttctatcacttagatgctgtgagaagaaagatgaagatatgccaaagatgatcgaagtagcttaaagaactcaagtggattcagacatcagttagagattctctgttctgatatagtctctatgaaagatttattacatttgcttagattatgtgtagcttaagtaaacaatccttgcattatgaatgatgaaactcagaatcttacatacaacatatatagtaaagaagctaa

SEQ ID NO: 27010 - DNA, 2575 bp, Arabidopsis thaliana landsberg
agtagcctgtggcgttccgcgaaactctctatacttaaagctagataaccagagaagtcgagaattcatatgctaaaacatgcattgttaataagcttgataagttcacctagtatctaaaccagagcccttctatgagcctacctgttttttcttaaatgcctaggctcatctatgatagttctaataacaagtacctatggcgggcatacctattatctaatatcaagttctagttaggtactctagaaggggcagggagaacaatctacatggagaatcctaacagataatctagcaagggggcaatctacaaaatcatctaaatccctaatgagaaaccctaaacccaacaagaaaactactcaaacatgatgaatgaagcgaacaacatgattagaataaaaatcaatgaataaaacaagaagagaatagagtgagaaagatccaaagggagtttccacaaggttttgctcccaaagtacaaaagagatagaaaatagcctctccaagcttcggtctaaaaacaatgacctaaaaactatataaatgtcttaaaaacgttctggtccttaattaaacataggaaaaagttctgaaccgaatttggaaatcttcaaatatcaataagttgcgttatcgtattgccgtcaggtattggtggggctggacacctccgcgctttttagtcttcagatttcttatgcagcataaattctctgtttttctccagaatgctccattatctccaaatgaatctcaaacatgtaaagacctgaaaaaaactagaaaagattctagaaataacaaatagactctaaaacctatacctaaatcatagctaaaagcagtaaaaatagggttatatcagaatcctagatttcgattctagaagaagatgaagtttcaatgtacagaacggagattacaagttttttcctttttcatttttttttgggctcaaacagtcaaacctttgaatatgagccaattaattataataaagttaaaagaaacatttgtctatcaaatattatacggaatccatttttatttatcaattatagcattatttgtttatttttgtgttatatattttggccctaattgtttcatcatttatcatttacatccaaatgatccatttacatgatccatttggatgatgcatttgaatgatgtttgtttcatcatttataatttaatctaaatgatgcatttaaataaatatttatttgtttgatcattttgtagttcatccacattttcatttagataaaaatgactaaaatacccatgctttcattttaacgaatgacaaatatttaacatcattacccattattaataccaaacatattggcgggaaaatatgattttacggttttgacggaaaaatacgattctacggttttggcgggaaaattatgagtttacgtttttggcgagaaaatcacggatttacgtttttggcgggaaaatcacgggtttacgtttttggcggaaaattacgagtttacgtttttggcaggaaaattacggatttgcgtttttggcgggaaaattacgagtttacgtttttggcgggaaaattatggatttacgtttttggcgggaaaatcacgggtttatcttttttagtggaaaaattacgagtttactttttatcaatgtcatcgcttgtatatttaagaaatttggaaaaatattaattttattaaattggtttaaatatgttggttaaacttaaattggcattggtttagagattttagttggtttaattcaattttacaaaacttgaccggttacctgggtaaaccattgaaaccattaaccattacaacccaactcattttactcatcaaaccaattgactcatcaacccatttgacccatcaactcatttgagtcaaaattttcaactcattagggttcatgggttgagttgagttgagttgacccatgaattttgacccattttgacacccctagtttttatcaatttttatggtaacaaacttttacaataaaatagtaccataagaggtttactcaccagacgagcatttctcatcccaagttcaatttccttgcaaccaaatctacacaagaacattcaagaaatgaaggttaataaccactagattgctatgctaaatttggtgtgaaaattatatacgaatttgatgaaataattaaaatgattgagtattaagtcaaaagtgcagttttaaagtctataccccatggctaaaagtgttagcgaccaagcaatggtggcggcagagacagctgccgggagactagtcgttgtccatgattggagatgactgatgccggagataaccgaggcagctccagcaactccagcaattaaagcaaacataatgaagaatccggtggccgcattacccattggaaaatgtataggcgagaaatgagccggaagactataatccgcaccttgaattttattattgcaagaaggaaaaaatattgatatttggtttttcataattattcggctatatggatgattaaattaaagaaaaaaagttcgttggcaaaaata

SEQ ID NO: 27011 - DNA, 1493 bp, Arabidopsis thaliana landsberg
caaaaccgaacaaaaggtacacatcaagtaaatcaaattgaatttacaatttacaaagtatcaattttaacataacattatttggtcattataacggatactaattctggacttagataccttatgtgatcacatatatctaaaaagtggaatcattatttgtcaagcaaatacaaagcatgattataattaatgacaagaaagtcaaatgggaatagatcgagagactttgggataaacttttctggccggatgacccattatacgacgacccttggcgtgtttaaagatataaaccaccgcaccaactggccactcgatgattccggttatcagaaaagccacgaaccctaaagttggtccaaccactttgcaccgacaggggttttgtcttgttccgcactgtacacacgccggaaacaccatcgttgtgagaatatagtattgcagtacgatctattatcgatgatcgatgtagtttttttgcggagaaatcagattcaaggagagtggaaatgtgatttgtttgatttgagatagttggatcttttatagagacgaatcatatgagtttttttaatatctttcttgtttccacgtagggtcagtgtgttactatttttaatcgttatagatatttttgggttattatgtcggcctgttactatttaattattatttttgagttttgagtttaaagaggggtcgataagatagacacgtttcagggccagcacaaaggtcactaaacacgtggcttaagataattggaaataagtttgtgaaactctcttacgttaggcttttttggagggtcaagttatgactaattgactatgtcggcgtggcacgacaatgattgaggtattcaagtattttaaccgtgtttacatttatgtggagtctctctttgcaagtcagaaagatcaatcgatagatctttaattttgataaatataggtgattattgttttcttacatatatgcttatgcattcgtaacaatctttagattcaaaaatatggtataagtttgatgtggcgatcgaagaagagcagaaacatcacgataacatctaatacttacagcacctcgtcaagtatacggaattacggattctgcaagatatcacgagtcacgactaccgttttgagaccgggacgggaccggaccattaagccttacatggattccgaacttagttttaactggattaactgttaggctttgggctttgaattttagaactttgaaagttgggcttttgagtagatataaaaacactgcagatatttttttccaaagattaagagaaagactaaaaagcacaagtttgggtcgactaaaaaaacaaaagataaattatttctgttgagtaatttctaaaaattttggtgttcaaaacaaaaaaaaccaataatctattaagtgttttttttaatctctataaaacgaatcattgataatgaactaaatacatagaatccgaaatt

SEQ ID NO: 27012 - DNA, 1539 bp, Arabidopsis thaliana landsberg
tggggagcgacgtgtgcagtgtatctactattatctgtctagagacatcatactacttttattatggctaactcagaaactttagctactagaaatgttttatgaaattgcagatggacatattgtaatctttactctcaccgagatatcacattattcattataaatcacagcacatggttaatggcatcgagtattatccacaaaaactggtcagcacgtcaactatgggcactcctacctactatatactggagatatggataaccacctttatgatttatccacaaaatcaaagtagtaataaaacatgggaaatgcttaaatccatatatggaaaagttctggagagccaaattataagaatgtataatacacatattaaacgataaagtagcatattaataagaaataatagaataatcaacaacatgagtaattataaaatgaacagtacggcaaatacaataaccagaatggcaaacattaaacatttgagatcatgagtactagaattgttctgaacgctctcccttatagaattgttacgcctccgggacgaattgaaagaggaagacaacgacatttgctatcacataatatcgagatgtgtatatataggcgtaaataataaattaactattcaattaaataaaaacataagaaagtgtcattaaccataaaatcccttacatgagttcgtttcaagtatgttgaaaaataacaaaatgccaaattaataaatatgtacaattcggtaacaagtcaatatgggtatttataagtctactgcacttaaaatatgtggacgcaaatttgtggataggaaattcaatgtgaaaatatgagattcctttaaataactaagacattctgtatactgaagaatatggacaaccattttttggatttatccacacaaacaaataataataaaacatggtaaagcctaaatccatatagtgaatattttggagggccaaattataagaatgtttaatacacatataataatataattattttactaaggttaaaaaaaaaaaaaaaaaaaaaaaacagaaatagtcgttaaccaaaaaaccgcgaacatgataccatatcgtcaaggttatcagagtagcaaaaattgcaaaattaataaaatacatgtgtacaattcgtgctaatgtgacctggccgacaacaacggacgcacctaggtctaaccattctacgttgtttataaggaggaagacataaaatttgacatccgttaatctcctcgtgagtgaggcgtccatcaacaaacttgttgtaagctgcaattctgccattgtatgattctcaacgcccaaaacggtagtgagcattaaccaacgtttgataagcccaagatttactcatataagcgaacatggctgatggattattctgagcatggcatttcaagaaaaacttgtggtaagaagaatggggcacggtccaccatatgaaattttcagatttatcaagcctgactcgactcaacgtttcattcgacatcacagattcagtgcc

SEQ ID NO: 27013 - DNA, 1353 bp, Arabidopsis thaliana landsberg
cacaaatgatcttctgttttggcctttgatgatgaaacattatgttattagattacttggttgctacggttctgtacttctgttcatgtttactagaacctctctagttatccgtgttgagtcggtatattgtgctatagttaatgcgtttctttctggttcaagcgagcatgttttggaccaaaaaccttttggtaaaaagaaactttgcaaagtgcaatgaagtttgcattttgtttgttttctataatttacaaaacaactcaagaaaatgtagtcctcagatttatcacagtgatcatccatttcaatcaattgcttcttcaagtactcagagagtcgcgttgatttagaaaatgttattcatgatactccaaaaagctattaattgtcctgcaacaacatgttcagagtcttgttatggcttgaagtagtagttgagagtcatagtgacttgttggaataactctgagtggtccagttcataatttcttctaacaagttgccattgttttatttatattctctatccatataataaaagaatgtttacaacctggctcttatgaaaggcatgtttgtgtaagttagtctatattcagcttgagacgctaaagaaactcatctattcctttttttgaaaattgtcaatataatctcttctcattgatcttctggctcttccctgtgagcttaattgttgttgtctctgcacagttatgctcggacaagtttggaacttttacaccaggtggtacatttgacaagaaccgccgaatcattctctcatctcttccatctgaagtcacagctcaagatggcttctacaacgcttcgattggaacagatcctgacaaactctacgcaatggggatgtgcatcccaggtgctaaacaaaagctttgtagggattgtatcaaggacgtcacaagacagttaatacagacatgtcccaaccagacagcagcaattcactggtcaggtggagggaaaactttatgtatggcacgttactataaccgaccgtcttctagaccaatagatttggaatcagttgctattggttataacgatggaaatctcagcacaaatttaacagattttgatagattatgggagcgattgatagctcctatggtgactaaagcttcatcatcatcaataaaatatttatcatttgataacggtagattctatgcagctgatgaagcaaacttgacaagttttcagatgatctatgccttaatgcaatgcacaccagacgtctctccttccaactgtaacacttgtttaaaacaaagtgttgacgactatgttggttgctgccatgggaagcaaggtggctatgtgtat

SEQ ID NO: 27014 - DNA, 915 bp, Arabidopsis thaliana landsberg
  unsure (1)..(915): unsure at all n locations
tccttcattcatatgatttaagctgacacggcatatgaactttctttatccttctttgaattggtctctttgtgatgtttggtgggcagcaggttaacatgggtcaggctgcaccagacttcacactaaaggatcaaaatggaaagccggtgagcctcaaaaagtataaagggaagcctgttgttctctacttctaccnnnnnnnnnnnnnnnnnnnnnnnnncaagcaggttgttaaatctttactttctcctccttcccgcattcattgatcgcatattttgtgtttgtaaacgtaaatggttttacttgtgtacaacaggcttgtgctttcagagactcttatgagaaattcaagaaagctggtgcagaggtcattggcatcagtggagatgactctgcttctcacaaggtacacacatcaaaaatctctggtttcttgaataaacccatttcttttttacggattttaaagagagtggtgggactttaaacattgttgcaggcgtttgcaagcaaatacaaactaccgtatacattgttaagcgacgaagggaataaggtgagaaaagattggggagtgcctgtagacctgttcggagcattgccagggagacagacttacgttcttgacaaaaacggtgttgttcagctcatctacaacaaccagttccagcctgagaaacacgatcgacgagaccttgaagtttctcaaagctgctagaacattctctctttctcttctttcatgcatgtctcaatgttggctccatgagaccatgaccttcttatattggttctggagagtatgaattttcaatcataccctgttataccaatggggaggtagttgggtttgggctaaaacaaaagatacaaccgggttaggcttggagaaggaataaaatggcgggt

SEQ ID NO: 27015 - DNA, 871 bp, Arabidopsis thaliana landsberg
cttctatctcctcattattttgatcttatcgcaactgatctctcatctccttcacttgttgactgtgtaagtctatccgattctttcgtcttccgtggatttttttctccgtcaacgatcctttgttcagatcgatctgtttcgtctagtctcagtttcaatttcgtgctttgattggtttatgagtttgatttattggaatatatgatcttatcttatccatggttgacgatcgtgtctagaatcgaagttgctgaatagctttgatcgtcgttagcttatatgaattctgatggtttttgttattggatcagcttaagattattcttgttgatttgttgttatttgatcaaattttgtagttataccacaggacaatggctgacaaagatgaagcagcgacgcgtggaaatgattgggaagttgtttctcttactgcttcagcttacgctgctgctcctggtcctaaaccagtagtggacttgaaagatgatgatcacaaggaagttactccttgttacgaagctgagacatctcatcccttatacatgtctcgccactttgttttcccaccaactggtcagcttgagaatactagtgaccttaccgaggctagcttaacagggtctcattgcaaggaagggagtgatttgagtctgaaagggttggatttatcagatgatttcggaggacttgagttttccgaggataaaggcaagaaagaagaaaacatttacactacagctatgagttctctggacgatgaaagagctattggtggctcacacgtgtatgaacctgttgaagaaccgaccgagcctgtttcttcttctgatgttacacttgatctgaatcctattaaagatgatga

SEQ ID NO: 27016 - DNA, 1353 bp, Arabidopsis thaliana landsberg
  unsure (1)..(1353): unsure at all n locations
tcgtttttttcgtttttatggcggatggaaacgttttgggttacgctgcgggatcttattttaaatttttcaaagttgtgcctttcacgatgactgagtcatgcgatctctactgcgcaaacctcaaaacgtgttttttcctatccataacgcttctcctcatagtcactttcgtatctctctgttacgtgaaggagaagccatggacgccagagccaacagccgatggaaaagcctccaacgttccgtttttcggagaaatcttcggagctttcaaggaactaaaaagacccatgtggatgcttcttatagtcactgcactaaactggatcgcttggttccctttccttctcttcgacactgattggatgggccgtgaggtgtacggaggaaactcagacgcaaccgcaaccgcagcctctaagaagctttacaacgacggagtcagagctggtgctttggggcttatgcttaacgctattgttcttggtttcatgtctcttggtgttgaatggattggtcggaaattgggaggagctaaannnnnnnnnnnnnnnnnnnnnnnnnnnctcgccatttgcttggccatgacggttgtggttacgaaacaagctgagaatcaccgacgagatcacggcggcgctaaaacaggtccacctggtaacgtcacagctggtgctttaactctcttcgccatcctcggtatcccccaagccgtaagtatctctctctctcttgttttttttgtttatccattggctaattattttagtactatatctgatttgtcgtttataataaggaaagaagtaaatcaataacctaatttgatgaattttttttcatttttattaactgcagattacgtttagcattccttttgcactagcttccatattttcaaccaattccggtgccggccaaggtaaatattctattttttgagctttttatttaatctaaaattaccctttttgttttggataatcaaagtcgacaatcttcttaaagtgttgggacctaaaaaagctaaaagcatttaatacgtgcagattcgtaatttaataacttattgagaagattctataagtaaccaatatttatatattcgtttgagtgaccatatatacgcgatataccaaatttacaatttctatagcctacgaaaatttgtaatcttgattcctaaagctttttatcttttcttccacaggactttccctaggtgttctgaatctagccattgtcgtccctcaggtaaaaacccgtttaaaatcagttttacttattttcatttaggaaaaattatgactaatatatatatttggtttcttggttaaatatagatggtat

SEQ ID NO: 27017 - DNA, 1490 bp, Arabidopsis thaliana landsberg
  unsure (1)..(1490): unsure at all n locations
tttttgggtaatcttcaatatatgtgatttaataagggaataaagattagtttgtttgtttgtaaaggtgggatttaatagctgggaggattccaggaagaacagcagaagagattgagaggttttgggtgatgaagaatcatcgaagatctcaattacgttgatggccaactcttatatcatttttataataatgagagagaaaagaatgagaaatatacatatatattcgttggtaattctgcagttttgttcctgagttttgaagtagttgtgtgttcgggattttatgaatcacgaatggaacctttaataaattgaaggtaaagttttaatcaatcgtaaaaaataatttgtggatatgtattggcttgtagcactgagcctgaggcataagaaaaagattgctgggcctaaattaggcatgtgataaatccgtttcacatgcacaccaaaatccaaaatatatatacattgattacaagtgcataaagacatttattatcatattaaataaactatataaagataacacaatctagtaatcagatgaaagtatgttaccttttaaattttatgttgtacaaaggtcattttgattttgaccaaggtcaaaattacagtttattaatatgttggtgactccttgcaacacaatgcataatattgaagcattttttatcttgagcatggtcgcatacctaatgtgcataacatagctcaaagcctcaaactcacatatttagtgggacgtctcttggttgatatctcgctggtgcgttttccactttaacaaaacttcaccaaatgacttgctggacaatccatcgtcacccaagactctaacaactccttctttcaactccttcactttatttcctatggcttttccctcttcaccttccatcagtgccttcaccactctcaccacttcttccctccgtacaatcccatcttcacccgcatggattcttagagccgctccaacatcctccacgagtagcaatgtattcatcttttgctccgcgaataaaggccacgctatgagtggtacaccgtttacaatgctttctaaggtcgaattccatccacagtgtgttaaaaacccgcatgtggatnnnnnnnnnnnnnnnnnnnnnnnnngagcccatgatggaaccaccaaacctttctctttggttcggtctaagaacccaattggtaaaaacgaaaaggggtctgtctcgctgtgtggattgaaatacgacgaactaactatctcgcttggacttcgtatgacccaaataaaccgttttccgctctccgcaagaccaatagcaagctcattaaactgctcacatgtaagtgttccgccgcttccaaatgatatgtatagaaccgagccgaatggttggttgtctagccaacttaaacatccgaacttgtcttccaagttaacattagatgaacttgtgttaaccagcggcccaatcgggtataccgttggttta

SEQ ID NO: 27018 - DNA, 1604 bp, Arabidopsis thaliana landsberg
aatttaggttcccaatcactacgataaagtaatattggggttataaaagaaaaccagattgaaattaacctcaaaagacacctaggctcagactacaacattatatattatatattcacccatcatgttaactcttaatttttttagcatgcaaaggaattgttatagtttacctacacaattcacaatgctttacaaactcatcattccctattctacttttctcttctacttaaacccaaaataagcttgttagactcatcgtgccgcttttgttactgctgcccaccattgttccttttagccaccggctttggttttctcggaatgcacttagctcgaaccgcttcttcctcatccttctccgtcgttggtcccattcttgaacacctaataaaatttatcaaatatcaattattataacctttcatttcattaaaaaaaactattagaacttttaaaaattgagaagacgtttgaaagacaccccaaaatgtacttctacaaactttaccattttcagctctttcaatcaacagttcaacacaccataaccaataattggcaatgtacgggtaaattcataaaagttaaaatagaactacgtgccgttcatctaaagagaaatcgaactgcttgatgttttatttttctacctgtcagcattgtaagaagaagatcttttcaaagcaggaacaagctccttcttggtctcaatcaaactgccgctaaaatactccttatcttccaattgtacccttccaaaactctttaattccttatctaccctctcctcaccattatcctctgctcctctcgttatcgtacacccgctacgcccgttcaacgccagcccttgatctttcaacaaaacaggcccacattctttaaacgacatcgtaccacacgatatcagctgcattaacacagccgaagctctcattcttccgctggataaactctcgaccgtccgatgatcggtgctgctttcgctaggacgcaatatcagccgtccatcggctttgatcagattctctaatgtctcgggacttgaatccgacggtggaggagatatctcgtctctgctcagctctgtactctgattctcataactcgccggacttttcacctcttctatttcctctttcgccggtcttctcctccgtcgtctatcgtcagtctgagtagaagcgtccgcagcgagtctttgagttgactcggcgcttgactcggttgctttgtacactttgtactcgctgagatcgatagagctccaagactggttcctccgtcgatttatcaccgccgggatatcatcgccggagtttttatctggatttaaagatcttgggtctctaaacgacgacgtttcgaggaggcttcttgggtttgagataagacaagaatcaagaacctcagagcctttgagaacatattcttgaccttgaacagggaagatgaaatcgtcctccgataaatcgtgccagacaaatccatttttgtagctcctgaacaataaaaaaatgtcaagagattttaaaaggaagaggctttatagagatccgacggtggaggagaatcgtttaccgtttcgaagaccaaga

SEQ ID NO: 27019 - DNA, 1011 bp, Arabidopsis thaliana landsberg
tatgatgcgcttagttaatcccaaaatcggctatgatgagatttaagaagccccaaataaataaagtataatgtttgtggcccttcttcaattaatataaagaaacaaaaaaatgaagccgatgaaaaagaagaagtattcaactgttgcaagatataaatatttgaatttatccgttacaatatacgagtatggcagattgatttatttgtacaagtgatccaagcatttgatgtataagtaagtagtaaatcaacgaacaacaaatacagtagagagagtatgaaaaagaaatacgagtcaaccagccaacaactaatttcaaatataaagtcgaatgtttgatggatccaataatgcgagttatagaacatataataatgaaagaacgtccatatattatttattaatcgaactactttttttgttgaatgtgaacgtacaataattgatttctactatatgtatatgcagcaaaataatcgtgttgtttttaaaatcaatgcataagtcatacaaatttcagttttgaaattgttaaggtattaatttaatcacaatcacgaacttaactagatttttgctgtgtaactgattagtaaataacctgctatattttaaatagtacatatgctttttttttttttttttttgggcaaaaaatagtacatatgcttataatctaaaacttataaaagagaaaaatacaagtggttgacaaaataaaagaagaggaaggaaatatcggcaccgtcatgtgtataatagacctgaccgcacacgtgtgggtttttgtacttgtcataagttttgcttttttatttttgtttgcttaaaatggtgttttaattaaaataaaagaaaggaagtcgaatctgtaatataaaagtgaagtccggggccaatgtaatggattttgctaagatcttcctgtcccccttcctccaatccctttttgcttttaaataaaaatgaaggccacctgtgtggtaccctgtttgttaccttaac

SEQ ID NO: 27020 - DNA, 3027 bp, Arabidopsis thaliana landsberg
ctcgtctccgaggtttctaaaggggcaaagaccggagagcccaaaacggaaaaccctagaagcaccattacatcctctaaagttatggttgcttcaccccaagggaagacaaacgatttggtttcagggcaccatttttcagaaacagagagaatcagagatgggtttttggtgatactgtaagtagatactttaattgcttcaaaaatcccagcttttctccatgtttgtgcgtgtaaagcttccatttttgcaagccaagatacgaaaggagcatctacaacccaaaacccagagaaagttctccgcaaagagaagagctttagtagctgcgaagaggaaacagagagacgttcatcacggcggggaagctcagccacagagcctccattgatggaggtaacaaagggttttaagaaatggttttttctcaagcaacgacctttatcagttaccattacttcttctctctcttcaatgagaagactcgacgatgacgatgcgttctccatctctcaagatgatgaagaagcaaatgattcaggaaaaactagggattttgaaagtcaaaatcggagacttgaagaaggaatcagtttttgctaagaaaggtgcaatctttgttgaagatgagcagagaaaaatgtactcaacattttgctttttatcattttatggcaaacaaaacaagttccttcattaaatctaaatgatgactgtacaataaattaacgcaacataccatgtgtataattttttctaaatttaggaatgtacacaattgacgaaacatcattttcataatttgattttttaggggaaaatcattaatacatacatacacaaaccaagaaaattttattgtcattgaagagattcatggtcacatcatgaactaaaaatcacagagacggagaaaccaaaccatgtttcttggtcatcaggatctctctgaaagaaaactctgatatgcaacacaccaagaagctattagttagctcataatttagtacgttcaaaaaatacaaattaaacacttaaaaccaaaccaagtccttaaaaagatactaaaagcataaacatcacccagcttatattgatcttagattactctacttgcatttgactaactcaaaacaagatttaacatgcctaaatccaacgagctgctgctaaatttctctctattacggctctcatttttttcaacgtccatgccacatttttctgtgtttccataatatactcctttagcgataatgccataaccttgagttcttgaacttttttcgtaggagtcattagcagcatcagcttcaccaaaatcattaagatattacagttaataagaaatgatgcaatgatgatagttttgagagtggctaataactcgctgtcaatcatgtcaatataaagtaacaagactttgtgacataaaatgataaaaaaaaatatgtgccaatatagcattttagtagaattgttgggtcaagtagaataaggtgttcagaaaaaaaaacgttaaagtaaagtagtttatttattttttaataaaaattggcaaaaagaaagggctatatttgtaaatagtcctttttagaattaataatccgaagcttcttttttgacagagcaatgcaatctttatcatcttaggttttacagtgtgattagtataattaacactaaagatttaataataatagaagcaagggtttaaggctaatacacacaaaagagcgtcttcaagcgatggccacaatcttcttcttctgcttaagctttccttctcaggcagacccacttgcttgaaactagctcggaacgataacgacaaaattcgccaccataaaccctatttttaatctccgactctgtcgtcacttctccttcaagctgggtagattaagttcgcttatggccatgggggtttctcttacttcccacaataaccctcttcttcgccacttatctccttcctcttcctgggtttctcgttcctcctctcgcctctcttcttctccactcccttccttcctctttccttgccgtcgaacccttcttcaaaggtttgcacttttttcatcttttatggcttttagtatattttgagactacacttgattatcgattactttgctctgctctatgctcaattttacttgattgtcgattactatgctctgttgtatgctcaattttaccttattattgactaatttgctctgctcaagcctcagttttacttgattatcgattaagctactctgttataggctcagttttacttgattgtacattaatttgttctgttctaagctcattttgttcttgagtatcggataaagctgcttctttctaggctcattttgttcttgtggggtttgttttgttttgctagctctgtttgtgactgcttttgaatcttttcaggaaactagcttccactgatggaaatgtcggttattgtactactacagtttgtcagggatttcagcattcgggtcatcaacggtcgtcttctgttgtgtttaacggagagtgggaacttcgatcggaatctaacaaggtaaggatggttcctaagattatcaaggttggaaatcagacggaggtagctgaaactcatcaagttcctggaactgtaagtgcttggagggaagaagcaaataagcttagagaaagaaatggtctaatcgctagaaaccttgatgacaatggttatttcaatggctctgtcccaattatatctactgctccgtcttatgaaacctctcagaagattgattatgacttcaagcccagagggacctctaggtccacaactgctacactcaataaggaattgattggcattacccaatctgaacctgttgtgtcatgccaaggaaggttttagatggtggggataatatggatgtaaatcgtaaaggagagggaatacagagacctctcataagccccaagtcttctggtaccgcaaatggaaacaagaaaacagttgccatttccaaagtggagagcagc

SEQ ID NO: 27021 - DNA, 844 bp, Arabidopsis thaliana landsberg
tgcaaaatatccaaaaaaacagtctttgttttcatactattcgacaaggagatggccgaaagttttgaaactgggaattcttacgaacttgcttaccccacaggaagcggtattgagtatgaacccgagaagtcaccaggaccctcaactttcaggtttgagccaaagaggatatcgcattcactgaggaaagagatggtacagaagggacggagaaagtcgtggttgtcgatgttaggaggtatgcagtcaccttcatcatagatgttcacaatgcagctatcgggcacacaagttggaggcagtacatgccatttaatcaactttctaatgattactttgaaaagatgaggtaatggatccacttcttcacgttgaaggatacccggtgggtttccagctctgtcctatcaacccaaaatacaagaaggcaaaactctcaactccttttttaagaatgaaacagattaatgaaagtatgacagagaacgttacttactggagcgtagttgtagcaacagccaaattgtatagtctcacgtccttttcctctcatccacttatgtggagcagtaaatgtacgctctacagagagagaacaagacaagattcagattaaaaataggtcacaagttaagataagagcattttcagatcaaaacaagaagttacttttaagttctcctcttcgtcccttctcttgaagttgatacacttgatcaacaatccgtttctgctccactgcgctaaaaacaccagtgtgcaactcaagtccatcaagcacgttaacaatctttcccttaactctctccaagcaaatgaagtctttctttctcttcacatt

SEQ ID NO: 27022 - DNA, 1593 bp, Arabidopsis thaliana landsberg
gagaagtttgtctcccaaatgtccttcatggaaaatgtgagatcttcggcacagcatgatcagaggaaaatggtgagagaggaagaagattttgcagttccagtatatattaactcaagaagatctcagtctcatggcagaaccaagagtggtattgagaaggaaaaacacaccccaatggtggcacctagctctcatcactccattcgatttcaagaagtgaatcagacaggctcaaagcaaaacgtatgtttggctacttgttcaaaacctgaagttagggatcaggtcaaggcgaatgcaaggtcaggtggctttgtaatctctttagatgtatcagtcacagaggagattgatctcgaaaaatcagcatcaagtcatgatagagtaaatgattataatgcttccttgagacaagagtctagaaatcggttataccgagatggtggcaaaactcgtctgaaggacactgataatggagctgaatctcacttggcaacggaaaatcattcacaagagggtcatggcagtcctgaagacattgataatgatcgtgaatacagcaaaagcagagcatgcgcctctctgcagcagataaatgaagaggcaagtgatgacgtttctgatgattcgatggtggattctatatccagcatagatgtctctcccgatgatgttgtgggtatattaggtcaaaaacgtttctggagagcaaggaaagccattgccaagtaagttcactagaaatttacagtttggttatttattctccgctctttctatttatctccttctttgataccaacattttttgcttgaaagaagttaatatttaagcattgttccgtagtcttactgaagctttttcctctgttgttttttgctattttcattgaggactgtggtagggcatatttcactatcaccaaatttcaaatttctagaacactctccttcatattttttttcatgattaatgctgcaattgattgctgatatacatatatgactataactcagtttatattctgtctcattttgggagaaagttattttaggtttatgcttgagaagtgatggtggtagagttgagaggcccctgattcatctaaaatggtcctattatgtgtttagttgtagagtcctcggtagaatattaacgcgtttaacacgttggatcatgttatagcagggagggacattctctgttgacctatattgtgcaaggtgcccgccgatggctttattactataccttctttgcatctggttgttggaacatgtccctgtctcggtttggtattgcttttattctgcactgtcgtcttgggcattttccctacttgtcattcaaggggttgaaccaggtagggaaatgtttttccgaggaccccaggatctaaattttagttaaccatacgtaaagttagttttgagtcttatgacgatgcagaattatagtttcttcttactactgcttaagaggatccttactgtggttgtgaactacagagtttttatgattgtaggcttcatgacttaactttaaggttcaatgtactctaatccatatggtaaggtatcggattcacg

SEQ ID NO: 27023 - DNA, 1210 bp, Arabidopsis thaliana landsberg
atatattttaaataaatattggaatatgaaaaagtttatgaagataaatttccttttacaaatttaacttttaaaattgttttctcttaaaaaaaaaatcaaattgtatactctggctagaattaatgtcaaattccttaaacttaccaaaaacaaatgtcaaattccttaaaaaaattgttggcccaagtcaaatttaagaggcccatctataattaatattttccaatattttttctcctctattcttctccactgagcggagaaaaaaaaaatcattatcgtccgcgagatatctggtgttcttctcgtgcttgcggattcctccgaattgtttcttcacaggttggttttttttattcgatttcagtttggagtgaatcttctctctattctatagattgtttcttcgatttcaatcgtttggtttttgaatagaaaaccaaagagaagatgattttacttggttccattgttcttaggttttgagaaaaatcttacgtatttaacatagtgtttcaaatacacagaatctcgaaattgattccgatttatgaggtcatgaatctacaatttcctacctcctgttttagggtttgaacagattaggtttaatattgaagtgaatttgcatcaaattagggaaattttcattgaatccagttaagttcttgtttgcatcaacttgtagtgttatatagtttagctacaaatttgcatcaaattagggatttttcattgaacccagttaagatttttatttacatcatcgtaatgtgtgagctttgttgttatttggtgcttcttgtgcctcttttgctattattcttaaatctcaatgagagaagagtttattttgcagtttattggcgtttctgttggataactttattggcgtttctgttggtttattttgcagtttcttaacgcttggaagtatggttagtgagagaagagtgcatccggattgtataaacgcttcaaatccttatcacgagtgtgtcgagtattgctttaagaaaatcgctgaagcaaaggccagattcgagaagcagaacactggtttgtgttctttttctattttttgaggcttagctgttcttgatgtttctgtcatctgtgtccattctcatggaggtctataattttagatgtgtagcagtagctgttttgaggtttaatgattatttgctacttgctaggttattcg

SEQ ID NO: 27024 - DNA, 1828 bp, Arabidopsis thaliana landsberg
caagagataacattgccgcacctgcaaaacaattttacaatattcaatcctttaaaaaatcataggagagaacgctgaatttaatgtagcaaagccataaaaatgtagtgttgcatacccaatcaccaacgacgaataagctaaccaagatagggttttggagatctttctttcccctgagagcataaacatcaagacatgctagcccaaagctccacaacaattgaagacccattgacgcaatcaagtagctgaaaccaaccccaaaatcataatcaacatcaacgagacttgtactactactaataaacaccaaaattgcttgcagaaattccactaccatttctactaaatccgacaactaagcgaacaaaacaaggttaaaggaaacaaatcaaaacttgaagaaagcgaaaccgtaccaaaaagcagtgtgaacagagaactctttagcagagaccataacgccgattgaagcagcagctgaagcacattgtccgattctcagtaacagaccacacacagttcccggacctcataaaagcttcttcatttcaatcaataacgactccaatttctcttcccaaacccagaaattccgacaaaatcagcataggaaagaggaaccaaaatcgaacataaccctagtttagcaagtaaaaagctacatttgcttcaggtagaaattttggcggggcaaaaaaagaaattgcagaggaaattcatagctaagaataaccctataagaggattttgtcacctacaaacagaatttcccgaaacggcttagattcgattataagctaagcttcttccttgtttctcctttgacattctctctttcttgctttgctttttagtggactgagataagtgagataagcatcctacgtggcagcacaaactaactttttttttttttttttggctttttttttttttagcgattgtatttggtcgttaagaatctgaagtattatttgttgtatttttgagttctgaaatgtgtatgcaaatgcaatgcctttttgcctgtctctcggtggctattagaccattacataaattttcgtagtaactcgtaaaattgatcaaaattgcaacaaaacagagttaaattgagttccaacacaagttaagtgtttgtgcttatggatcaaatatcatcatcttatcaagtctttacaaacagtggaatcataatttaaataactccactgtaataagacctattttaagctaccttacatagtaccaaaacctgttcttaatagctaagtgttgataaaagatccgatcccaacactgcaacaaaatcaatggttggtcaaatctactcacaagaactgaaagagatggatctctagaagatatagtaagccaatatattatttctgggaacgcggcttgactcaacttgtcatttcttcctttactacacttttaagtctaccctccttatgtggattttttctttgtgcttgaatgtgatgcacaaatgcagctactataacatggagctttgggggaggcttgcttgatgaagagacattgtgaccagcatcttttaaagctttggcaacattcttctgtgctttctggtagtgcacattacacagtacaggaacagtcgatgctagtgttggttttccacaaagtaatggtcctgctggagatctgaatgtacaaagcaaacaaatgcagagttagtagagaaccgctcaaataatcatcatgtgctaattacaaaccagcatgaaaaagtacatatctatgaaatctggattgtgacaaaccgaatctgataaatacagtgtatcaatctgaa

SEQ ID NO: 27025 - DNA, 1437 bp, Arabidopsis thaliana landsberg
ctcatcttcaatattttaaggaaagagtatccatcaaactgacggtagtttcgtttataaacgctatcagcaaccgtcgtcttgccaattccagtcatcccgagaaccccaatggtacggatacaatttgtgttatcaaacatcaataactcctccagttcctttgaacgcgattcaatccccgggaaaccactgatttcacatggagacaaatcattcagcatcctgaaagtttccttggctattttttcaacaaattcactctctggcctgcacattaaagttcaaccaagttaaaattatacagttacaaatttaaggaaactgaatcagtggtagctgaaagcaaaacagaacactggaatcaatcttgttaatttctatagtagaatgtacaagacgtcaatgcatcataagaataatatcacaatttcagggttgactacaattccaaagaaagtcaacgctagatttgcttagtacctttcctcacgaagtacatagcccaggatattggaagcaatcttcagagcttccttccatgccccaactttgtgcccatctcccttgaaactctccttagggcttaggaagggagctccaaatttacctttctgattctccacatcagatttcctgactttgtagaagacaggtaagaccccatgaccgaatttctccctacactgcattatcttccagagttcctccaagcaccaggtggagttggcatagttctctgagaagacgacaatcgacatttttgattgctcaatcctgtcaaagacaacagagatgtccttgcctcgccggagtttcccataaaagaatgcatcaataccttttcggtgaaggaactgaagaaggtaagaggtgaaggaattacgtgtgtcgaagcctctgaaactgacaaacacgtcgaactggcgcgttgagggatccgatgacgaggaagaagaaacatgagccattaaaggatggccacgataatgcagatttttggaaaaggattctctcttttggaagtgaaatggaagaagcgaagactttgaggcattgaacaataagtcttcccacacgaaggttcttttgccttatcagtattcagcacacctttgttgactcttttcaaaaagccgtacactctgcttcgcttcgctatgtctaaggtggattcaaaggtatggacgttatccacattttccttgactgaaaagtggtctactagtaaaagccataaacaaaaatgatccaatttcttgccttcgcttttttacacccccacaggctgtttacaattccagaaccagttgcttcacaatcgaactgctttgatccaaagtgttgacaaagaacatctacttcacattctgatgttgaaatgccacataacctcgcaagacaagcgagatttcaggcggcacaagaataagaggc

SEQ ID NO: 27026 - DNA, 10425 bp, Arabidopsis thaliana landsberg
ttcgactttatggcttgcatcctaactctaggataccatttgagagtgtcaaaagagtttttgacaacgttgccatgaagatatccatggggtcggtaagcatttgaagcccttgttgattctgtaaagttgctgatgcctgttggtaagtcgtacaccatcagtggtatgactttcgtgttacaggcttgggcctatgattcaatcaacaccattggagagcgatttgggaacgtagtcaatgagaatgagattttgttgcttagatggggaagcaaccgttcccgcgcaacaataaaatcgatcattggtgaagatatcacaacgcttggtagtgaggtaaggttttggctctgttatgatagttactgatgactgagttattaattttgatggctgagttattatttttgatgtttgggttattcttatatgatggctgtcttatattgtttagttatgacttagttgtggtttagtgatggttgaattattgttaagcaatgtctgagttatacttattgatgactgactttgaacatattgatgggttttataatctcttgtgttgtaactgcgtgtgcataaaatggttatgaaggatgatgtaaacgagctgtttcatacttggccagatgaaataaaagatccagcacttgatcactgataacactatattttactcattttaggtgtatgtttatcatcatttagctttgcatttgctcattgtatcatatcattttgcaccattttagcttattttgcatacttaggcatctaggatcatcttgcatacgcattgcatgtttggtgtgttttcaggtgcagaaggagcttaaaaggattatactcgacctctttactcgatctaggcagctacagaggaggctttagttcactcgatcctcttactcgatcaaggcagccttagtggaagcagcagattgatctactcgcccgtcctactcgatcctctactcgaccaagggtgaccaactctacaagacttgttgatctatcaaagtgacttcggatcctcctcattccccacacaaccaaacatctaagcatgattagaagagaggaagatgcatctactcgaccaattgatcactcggagcttaaacacaaaggcgcagactttgcagcaccccctttactcgatccccaaggtcaagtattcacccaaaccgcctcaagtctcttgtcttctatggaatctagggtttcaacattttagtataaatagaccactttgggatttgtccaagggatctatgctttatctttcagtttttctttgtgtttatgaatcttgaaactttaattactcttaatctatttcgtttttgcatttgctgtttaagtaaagttgtttagcttgtttagatctacattttggtatgattttagtaatttctaggtttgtgttcttgagaatgttgcttgagtagtgattagggttcttgaggatggattagggtaatctctaggttagttaggtggttagtgtttaggtttatacccttctggattcgcttggcccctatgcggttttcgctggctaatgtggagattcgatcatagacgtccaacgtccaaaagacgttcaaatggatgtctgacctacgaattccagagatatgtagactcgaccaagggattggcttgtctccctattggctttggtagattgtttcttaaaccctgctctgctatgtttcatcaacgagagttgagattaggaagtggtagagttatgggggtctctgtcacgagagtggattgacccggtttttgaatctatcgtcatgggtatctacctttcgcctattagccatttgatgaaccctagagttgcccttatcaatgaatccatccttagaacttctattagatttatttgtatcccctattgattgcacttttatttacctgttatttgcatcccctatttgtatcccctgttgattgcatttaggttacttaattttgctgcctgttggttctactcgacccagtgatcgagtagggctcttaagttcttatttttacttgtttgaatcctgacctaggattgttactagaaacccaccatcattataatctggcttgacttagttgttttcgtacacatcttgattgctagcaatacactggactggattgacaccctgtataactgcatcgacatgtttgtgttttaggggaattgaactgaatcacacattcaccataagcagacctgaaaaacctgtttatcaatttggcgccattgccaattcattgttgcattgttacattcaagatatcagaaacttttaagatcaagttcttttacatttatcaagttactaactcatattttcgtctgcttgtttttgtggtataggtactaatctttgtgcatgcaaactcgatccaaaggttctgcacacctactaccattcaaagacagaattgacagaatagctcgcgagttacaagaaaccaaagcaaaggcagcctgtgatcagccaagaccagctactatggatcaacagaacaggccagttgatgttcaagacccacctaatgttgatcaaccaagaaacattggtgctggtgatgccccaaagaatcatcaccaaagacaagggataatgcctccaccagttcagaacaacaattttgagataaagagaggtctcatctccatgatccaaggaaacaagtttcatggcttacctatggaagaccccctggaccatcttgacaactttgataggctctgttgccttaccaagatcaatggtgtcactgaggatatgtttaagctcagactatttcccttctctttgtaagacaaagcacaccagactccacccacctcatgggacgattgtaaaaaagcttttcttaaaaaagcttttcttgtcaagttcttctctaacgctcgcaccgatagattgaggaacgagatctcaggtttcaaccaaaaaaacaatgaaactttctgtgaagcttgggagaggtttaaaagctacacccctcggtgcccccatctcggattcaagaaggcttcattattgagcacactttacagaggagctttaccaaagatcagaatgctacttgacaccgtctccaatggaaacttactgaacaaggatggggtacagggatgggagttagtcgaaaatctagcacaatctgatggttgctacaatgaagactatgatcgctccgtgagaggaactggagaaactaaggatagatagaggaaggatatcgaggcactgaatgaaaagctagacaagttgttgctggctcagcagaagcagatacactacatcactgatgaagagcatttccaaatgcaagaaggggggaatgatcaaactgaagagctctgctacattcagaaccaaggaggattcaacaagggctacaacaactacaagcccaacccgaacctctcctacttaagcactaatgtagctaacccccaagatcaagtgtatccaccacaacagaatcagtcaaagccatttgttcagtataaccaaggttatgcccctaacaacagttcaatgaaggctaccaacagcagaatccaccaccagggttcactcaacaaccacaacaagccccaacagctcaagatcctgaaattaagcaactcattcaacaaatcattcaaggacaagctattggcgctatggcttttgacaagaagatagctgaattacacaacgagattgattgttcttacaacgatctaaatgtcaagttcgaagccctgaattccaaaatcaaatatgtggagagtcaatttgcatcaacctcggctccgaagcatcctcagcaacttccagggaaagcagtccagaatcctaaggattatgctactcctaatgctatcaccatccaccaagaagatgaatctccaccaagtcatcaaactctcaatactaaggacagtatggttcaagaaggggggggattcaactcaaattgctccacctgccactaagcaattcttttggactacagagcacacacctttgctgaatactcaccattctaaaaaagttcagaattgaaaaacttaagaaagatcagaatcaagagatgattagcagtgccaccacccaagaaacttacaagaagaaagtcatccaagaaaagcttgatgatcccggttcattcactctaccatgctctctaggaccattgacattcaataggtgcctttgtgatttgggagcatctgttagccttatgcctctctgtacagctaaaaggatagggatcatggaattcaagttctgcaacttagccttactcttagttgacggttctgttgcacatcctcatggtctaatagaaaatctgcctcaagattggaaatgttgagatacctacagactttgtggtataggacgtacatgaagaaggcaaggatcccctgatcctaggcagaccattcttagcttcaggtggagcagtcatagatgtcaggaatggaaaaattaatctgaaccttgaaaaaggcatcaagatgaagtttgacatcagagaagcttcaaagaaatcaacaagaggaggtcagagttttggaattcaagatatggatgttgatgaagaaacataagctgaaacctcaccaaaagtcaactatacttctcaactcagcaagctgaagagaacttttgaccacaagaagagagcaacagaaaggctatctcagacggaagatcctacagaagatgactggtatgagatgagaaaaaaatttaaatggcaaagcagagtcatagagggattatcttggagggtgattaagctgaaagatcaactttggatgtttgaaaaaagagttcaaaagttttcagatggtattgacccagagaagatggaaactgcactagctatcaaggaggacaaaaatctcacaacataatggtttgcaccagaagatcaaaaaggagttcacttagaggaaagaagcttggagagcaagttgttgagtgagaaggaaattattccgacttattctccagaggtacctaaaccgcccactaaaccctcttctgaagaagaacacttgattcttgattctattgctgaagaactcctggagctttggattgggtataaagctcaggaggatacaattggaaagttaattcataagatggaagagttaaatagcaccattctggaacttcaagaaatggttaaaggctaccccagttttgaacttgaggattggtcaaaggagcctggttcaaaagaagaagactactctgctgatcaaaaagaagcttattttgaagaaaaatcaaatgagtactcatcctaccatatgtcaagaaaggatgcaaagtatgattcagacactgaaaattcaaccactgaagatgaggacttctctgttcctctcttcaacctttttctgactaagctttgtaacagtcaagcttagtgacttaaaacaagctcaaagggggggaagtcccatgtctatccatgtatataactttatatttttcgtgttatttttgatgtttttgtttaagtgtttcaggtttattttagagaccctaagagagtcaacggtcgagtaaatttaaaccaagtcaagaaaaatctcaaccgttgatcgagtagaatgaggaggagcatttttgagccattgatttgaatgaccaaatgagagaagcatcaccaccgtttgatcgagtgcaggttgtggccgctctgcaggttatggtcatattgtgggctatcgcaagaatgctcgtcaatgaatcctaagataacagacgctggtctgcagcattggatctcggagcgttcagcgactggagttcgcggagactgctgtccatcttgatcatcatgaggttgggaggtgcgttttcggcgtcgaagtcggtcgatctgactcttggaagtgacttgtgctgccacaagggcgtcaatccgttcggtcgttcgtgcttcatgtccgtcgagtcgatcaagaatggtttgaacgaggtcgtctaaatgggtgcctcgttctgctgttgtggtacgtctttgagcggcgccttttgctgctgctgctgcagctgcggtcgcttcgtcggctggagctactgcgaggggggtaggcgcggcaggaggtcgtgcgacctgaacatgatctgtttctcctcctgtgtctggtgtgaacaagattcggcgcgagggatcatgctcggcacggatggctgctgggttgagcggaggtaagcccagcgcgtcgggcgcttgaggtatgccagtatcagtttctcgatcgctggaagtatctatcatatcaccgcgaatcttgtgagggtcaggatgcataggctcgtcaaaaaaggatagcttcgatcaacggccccacagtgggcgtcaattatttgtattggggatgcaataataataataatatacgagattttgggggctgaacggagttggtccattttattaacgataacaaagatcgagagattacagcaaactagttttgtctcgccggttatagactatcctgccgagccgagaacttcatcgtaaaagcagaaagacaaagtacagaaatgggcgaggcaccgatgtcgggctaggcaacgaggtcgggctaggcaacgatttcgggcaaggcaacgattctctttgtctctcagctaataacctgtggatcggatcttgctcccaatagtgtttctctctatttatagggaatctgaaccctaaattccgttctgtctcccttgcaaattatgattttgcccttctcgacctaatgggcctttttaatggcaaaaggccctcttctttgttgatatctgttttgggcctcctaacattgaaggggcaaggcccatgtccaacaataagcccccccttagtccgttgtgcgagagtctttttaagcttgacgggcgtatctcaagaatttggatatattagttaggcacaagacagaaaatggtttgagtgattctggcacatttttcgagacaaacaagacctgttgcgggtgaacattaacttcggcacgtttttcgaggcgaaccgaaacatgtttgaatgaatcgtggctttgacacgtttttcgagacaaaccgggcccgtttcgggtgaacagtaactttggcatgtttttcgaggcgaatcgaaacatgtccgtgtgaatcgtggcttcgacacgttttcgagacaaagcagacccgttgcgggtgaacagtaactttttcatgtttttcgaggcgaatcgaaaacatgcatgtgtgaatcgtggcttcgacacgttttcgagataaaccgggcccgttttgggtaaacggtatcttcgacacgcttttctagacttgctggagctttactggaaaataactgttagaatactcttagataattaacaaaaaaggtgtgcctcggtaatatgtctcccttttttcatttctcacttttcactcttcttctccacatttcgtaaagtaatttttgctctctctctactttatttcttctctctctcttattgtttgattgcgtcgtgagtttgtacccatccacgaaattgtcagtcaggtacgagccgtgtgttgatgctcgtcaatttgacttgtggagtggcgggaatggaggagtaagctttgccgcgccgcaggtcttgtcgctgcggctcttgccgaggcgagacgtgtgtgactcgcgtcgagccgctctttgagctttcaatttttgaattacgtactcccaatgagttgaaagctttcgtgtcgcgcccaaggtttgtcgcgcattgccgcaccgtattgcatcaccttgcaccatgccaactcgtgagctgccgcgacggaagtaggtttgccacgggtttgaggtgacgttgtcaatgcgttcaattgctattgcgatatattgcagagcagtttgttttggaaaggcaaatttgtgagtttagtgtcgcgccttgagtgtcgcaattttcttacttggattcgacgatgtagcagagtgacattgttgtgaggtgggcctaaaccatagccggttagttctttgcgtgcttactagtttgtcatttgtttccttgttggttttgctaggtttcgttcgatgtctattgcctcaggagatcatgttgatggagacgttccagttgagttggggaccgactactaccgccaacttgatgatttgccagttttgataaaggaagactttcgagatctcaacggtttgttcgttcctgagaatgcagaagttaggccgagtcccagtcgaccgagacatggtcgtggaaaggtttttgaggttgccattagagagaatatgcggagtgaatcaagatatctttttatgggtttgagtgcttcaagaacgactttgcaattttgtgggtgtcgcgcaaccaaaaatcaagcgacacccgatgagaatccaggcgagacttgcttttctcacgagctagggagatcgttttctactaagcattcgttgacggccgtgttcaagtgctgtcaggcgcccgaaggcatggaaccacatcaacgtcctttggattgtcctaaaggatatatatgtcttttcgagtcctacttcacggagtgcgggctttggttaccactttgagaatttctcacgagctactgctgtcggcgaaatattgcatttttgcaactatcggtagctagcatcccgaacgcggttggcattgtgattttggcggctcaggagcgtttagttgtgcactttgatcttttcgaagaggtaactagtttttcgattggagttaggatcccaggcatggtttgtgcgagttcgagatgaggttttaagattttttacggtgcaactagtagggttagtgtcttcaagaaacgttacttcgtcgtttaactgagtgatgtctctgttgaagatactaaattgtcgtgtgttaacatgtggaacttgaatccttgtagctcttagttggttccggttcgacaaggttagcttctccattgtttacttatgattttttatgttgggtttgcagggttcgttccacgacctaaagcgtcttccgataatacctttctttcgaaccttagccttttgcacaagaggagtgctttatagtggccacacgtgctcgaacattttagtgattgtgaggcctctacacttggttgtcaacctctgtttgttttaagcgtcgattttgctttcatttttcttatagttccaagatatcacgtaggttctcctttgtgcctaaggatgggtagctgtgaacttccgcattatgccagtcaattcgatgacgatgaagagctcgtttgtgaagatgagccgcatgtgcttgttggtgagcctgttcatgaaggttcagctgaggagactgagacggttgacgtgtgtgtcgtcaagccggatgttccaagtctggatagagcagcggaggtagctactcctcgtactgggaagaaggtttcaaaggaggcgacatgaagcattccctctccttccgtcggtggtcgtcgtttgagaaagagggcttattcgcgtcgtagccctgagacctgaccatctaatgtcggtaaaccccctaggcacgggacgcctattcgagatgccttggaaggggttgatcactcattctccttcaactatggaccaagagactgcatgttccacaacgacgagagcgcatgcccagaggttgcgaggaatgtccgtggcgattttctttgagtttccgcaagtcgaaactctcctcgtcgcatatctctatcgcaatgtttgtcgtcagaagtttcaggtttgtaatcttccccttctcttttattctcaagttttctcgggtttggacattgtgtattttgcaggaaatgagccaaacaaaccgtatggtcggtttttatgagaagaaggtgagggaagtcattagggagagagatttgctcaaattcgctttggagactacgagaaaatctcttgcgatgtatagagcggataggcattatgggcaaggaaaggctagcggtttcgatttagaggttaaattgctaaaggaggctcttaaggttgcaaaggcgaagcttgagtccgaatcgacctaggaaatctcgcgaaaatgctgtagcggcagagcgtcgcaaggtggtgactgaaatcgaggataatcatgctcgtatcgatagattaaggaaccatattatcggattgcgagctcagtgtgtcccaaaatacacgctctctcagataaagggggttcaagagtgtctcgagacaatgattgctcaagggtttgtctttccgtgggcgaggatggagcctttagctaacgctcccgcggtttggttgtctgtggttaataaggtcaaggttccaatcattatcgcaaacggccacggccccttc

SEQ ID NO: 27027 - DNA, 1073 bp, Arabidopsis thaliana landsberg
atctctttttcttacacacacatgcatatgtagagggtatggcacaatcatcttatcttatcaaattcctacactagctttacattatttcgaaactagactagggacttggtaacattgacagatatgctgtctcttcggttttcaattgcaataatgaaataatcttataaactacacgcaatgcatagatagagctttgttgcatgcgtgtgtagagtagacagatgggaagggtctgcaatgtgggacacataaattgaatacgcctcacgtgcacacgattactacctttaaaccccttcttctactctctagcttcagtccttttcaccatttttcacatttcaattttagatcctaccacttcctttaacaattacagtttctttacaacaaattctttgaagaaataaaccaatctccttcttaataatctaagtaccacttggaatctgattgatagtaaaaaggttattagttatacaaaattttaagtgattagcccttttttaatgaaaccttgaaatggtgagataacaagaaggctgataatgctgaattgtaacagttatatttgacatacaactactcatcaaagagacagctaacatggcaatatgtttcagacagacacacatctttgtcattctcattcatacatcacttccttcaaacttatcaacaagaatcacacaaaaactatttttcttcttcttctttcagagctagctactataattattggaatctaactaatttgtattttacaatgactacattgtgtctattaagtcgagattactatcttcactcaattgtaactctcctttgatctggcttcaccatcttttcccctgtcatatagccaataaaaaccattaaagtattttgcatctctcactagttataaacttgcaacatttgtttgcgacctcaagcaagtcaacaaatttcacaaagccttatccaacttaaacttgaacaaactttgggaagagatacacaactcttatattgtctatgcttatggaaggcagaggttctgtcttcagaatatatcacattttcag

SEQ ID NO: 27028 - DNA, 1258 bp, Arabidopsis thaliana landsberg
aacagattttccgcgttatcactctttgagagtagtcgtcaatacacgttgatgtcccaatggatttccaggaatgtttctgcaccgttgctgcctcggtttaacggtattattgcttgtcatcaaatcattattcgccgatgaattcttcatccctcgacataatttcatgtgtgaatgcatcttctcaggtttgaacaacttcccacattgcctatattatgaattataaacgtcacaatataaatttaagttatgaacataatgagtgatataaagcagagcttacgagcataatggagccatggaaggcttgcttggagcaacctttggtttacaaaactcaattgtctctttcatctttatgccactccatgctccttcgaagctttttctataatataaaccaaacaaaatgagaaaatctcgtttttaccaatttgaattcaagtactataaggtatagtcgtataaagataataatattaatattatatgatatagcataagattagtcccaatcatatatagcattaacagtgataaagtaactaattttaatatttgattaattgaataaaaatatgagtaatggctactttggagcgtaccgagcattgtgctgttggtggtattggtatctgcgttcatcttcccaagccggaccaaaagccccagacctagacttattcaaaggcaccaatacggcgtcgtttgtgtccaaaccaccacacttcatcaagttccgtaacacgtgagaggcacgtacgctcgaatagctcttattcttgatataactcgaagacgacgtcgtagacgatacacttggtcgacccgactccacatcgttacccgacccgttctccgtcgaaccgtctctctggccggagactgttttcggatcttgtttcttaagaacgaaaccttcttcgttcgtggtggattcctcgtgactgtcgacgttgttgccgtcgatctctgtgagcagaagaccggagactctttttggatcttctctgacgttagtttcaacttctggagtttttcttcagcgtctattccaccgtttcttgtcacccaagctttcttctccacattaggataatcctctgtttttgagaaaccctaattagaaccctcacgaacaaattatggaatctagtaataactacgtgacataccctttggagagcttagaagaactcagatcctttgaggacatattcattatcagagataggagtgataagatcatcgt

SEQ ID NO: 27029 - DNA, 2110 bp, Arabidopsis thaliana landsberg
  unsure (1)..(2110): unsure at all n locations
ttacaagatctgatctaactcttttagtctttcttttccaccattttggccttagcaacatgcaacttcaattgtgtcatactgtcaatccgccagtaaccaacaatatattgacactcacatgtgacatatcagagctcattaatctacacgacgaaggctttaatggttttgatccaagcatgagaccaaaacatatggtattagtgcaagcaaactgaaaatgttaagagttgtaaatggacgattagaagtttggaacgttacattactattctctcacgtaactcacgcaagtgttataaaaaacaaaattagttaaagtttgataaatcccactttttcttgatcgtaatcactattcaacttttgttaatttcatttgttttggcattgcttgtttcttctaatttacttattctacatttgttccgcaccaaattcatctagtataatctcactattcaactgtaactatatttcttctgtttgtttcatattatctgtttgttatgcatcgaattcatttgttcaacagccactatttgaattctatggatccttcggattccaagaataacggataagaacccacatggagaacgcttcaacggtcttcacatgtcatagctcttctagttctgtggacagaagcaaagccaatatatctttgggtaatcaatattcatcatgtctattgtctcgtcttattaaagaaaactaaaaagtatgaaacatatataattaaaacgcatgtggatcaatctcaccatattcgactttataataatactgtatgatttgatttatcccttaaagatcagaaagcaaaccttaactttcgtcctgagtaattcnnnnnnnnnnnnnnnnnnnnnnnnnnnnnnnnnnatgataagcgcaatgatttttaatgggatagatcaatacattaatgcgtttcagttataagttctttgattttcctatttcttcagtatgccataattaaataccaaaaatagttaaagatttgtgtaataaagctttagaaagaaacaaatatacaccacattttctataatttagataaaccacaatcctttttttaatgagagataaactacaacttttaatcttgaaagttctatatatataatcctggtggccgacagtttcatatttttggttgaagaatttaaattttgatattatctgaagggggtagcggaattctacactcgtacaagatgactgaagaaaattgcaaccaggagagctatacaaacggttgacacactctaattttgttctacataaatgatagatcggcgaaactcgtactgatacgttttcttaaaactggggtagacctttgatcgaaactcacgttatttttcgatggaaacaaaagaacccttcacagtttcaacgttgtggcagtaaaacatggttattcatttttcgttttttatgttacagatcatgggttggtgtttgcatctccgttaatgaatcacatgtttgatatgattatactaagaattctattaaaaagagagatatatactaatataatattaatcgggttcatgaaacatccatcccaatcacgtaacttctacttttgttttgctgcccacctcatcttccttttacttttcatattctattcactcatctgaatccatctactccactattatttataatcaacaaatcaatgaatacttgtcacgatcattttattcaaaaaaaaaaaaaaaactctgatcactaatcatacaatcgtcgtcacatttgtgctaatcatatccctattgttatatgacagattttactaactcgacttactccacaagccctctatcatcgctagcgactgaattaacttgatgattctactactcatcttaccaatttaaaacgcataagctaaacgactcaataaagtaaaaacgcagaatttttttaagtacttgtgttaatacaatagtcacatgaatcttgaagagtatatgcatgattcaacacgacactacaaattggaccagcataaacaaagatgatgtcctaatcaatccaaggtaagaagagacgtgcaaaaaaaaaaaaaaaagacatttgatga

SEQ ID NO: 27030 - DNA, 3106 bp, Arabidopsis thaliana landsberg
agaacaaagcattttccaccattgaatggagtgcttcactttagaactctctcaaccgttcgatcaacgggagaaaccaaagaaacctcttcgtaaacaccgacacctcgtgacccgcctccaactgttcgagtaagtcctctacaagggaattctcaaggaacaaggcagactgatataaccatgtttctactgattttatctatgttttaggataaggattttgagtctttatatcatttctcgagtctttttagtgtcttttcaggtattctatgtagtggcacaacaatggagataaggagacattttggagcaaaatctaaggagaaggaagctaaggacgattttggttcatgaatcagcgacgagtgtcgatcgacacactcttggtgtcgatcgacaccagttttggcccagcaaaaaccctagacgctttcgagtttacagaagctcaagtttgccccagaagtttccctatttacagtattagtccctggacgtttttagggtctatatatattgtttttagacctaagtttcttttatcaagttctttgcaaaaccctattgtgagagacataagctattcatccattgttcttgagagtttcattcagatctatatacagtgaagagatcccttctttccctttctctatttactgtgtttatgctttttatctcaaatatgttgtttgcttcatccaatatgtctaagtaacctgattattaggaatagggtttctcattagggattcattggtttagtagattgctccctttgctaggttatctatagaattcttcatctttaattatgcctaatgctagatctagagtaattaactagatattgaatccagacaatagatattcccgccataggtatctgtagttggatctattatttgatgaatctggtttatagatgtgtaataagaatcggcctatttactaagatgaacaattgaactcgttaagaatgcatatttaggttgatagtttctcggcttctccggtttttattttttatagatatagggagttatgcggtacgcccaccggttattcataattagagtttgagtttaagaatggttcgataacaacctagctttcattagatctactaaccaatagttacctgagaataccctgttcctagctctttattaaatcgtttacaacacaatcaatctgctgtctttttactttgttctcttttattttcactatcaccctgctagcttaatctcgacatttaactcattgtttaaacaaaagaactccgtgaattcgatcctaaaatactgcaattgatctcttatttgagagagtagttctaggtaatttgaaccttatcaaatttggcgccgttgccgaagttctttggaatcatcattgagtttagtttagagatttcgtctagtttttacttctattttgttactcacgcgtttcttgttttcttcttttctgtgtttcaagtgtatgcctaggcaaacaaggagcacaaaacagaaggagcttatcaacttgtttgttctggacttgggaaaacttgaacgcaccaaccgaaaaactcagaaattagcaatagctgacagagtcatcagagctgatgcagaaggagttttgagagattatgatgggcaagcctacaatgagtctggtcagagattggatgatcatggactcatcctacctgaggacaccaatgaggatcaggcgcgcctcaatgcgcaattagctgctagagacaccctcctgtgtcgatcgacaccatacgtgacccttttctcagagacgactcaatacgacggtgtcgaccgatacccattcagtgtcgatcaacactggatccggactgcaccttgtgatgtgcaaatacctatgcagcccgagtctgtctacactcttcctgtcccatatccgaggaggcgtcgttctaaacaggagattcatgctgctaagtgcacagccataatggagaagatcctccatactcttcctaaggatgcttgagggacatcttccgcctcactcaacaggtatgtcaagcaacttgttgacaatggaattagttcagatgaagctaagctgctcaccagagacatcagtgcaatcatgctgcctaaagccaaagaggagaaggcacagagagtagacatagctgaatatatctgcaccattactcctggtcagaccactgagaagcttccagatccaggtagctttgttcttgattgctctatctccacaagcagattcagccgctctttgtgtcatctgggatcaagcaccaacctcatgcccaagtctgttgctcagagactcggcatgaatcactatagacctactcgcattactcttctcttcgcggatcgttccaagcgaatccctgaaggaatccttgaagatgttcctgttaaggttcgtaactctgttatccctgctgattttgtagtcctggactatgagaaggaacccaaagatcctcttatccttggaaaagcgttcctagctacagctggtgctaggtttaatgtgaagagatgtcgaatctctctattggtccgagatttggagatagagtttaggatggatggttcagagcttactaaacctataactagtattccctctagcacaaacacacctccttagactgctcagaatcccacataacagccacacacaacgctcccatcagctcagctcgccaatgagagttacggagcaacggtgtcgatcgacaccaccactcctgtcgatcgacaccttcgggattcacagacagagggttctgcacaatctcttcagcccacaccacttgaagacctatgtgataagttctcttctatctcttctcctgctttaccttcgattaattctttagattcttcgaagtctgcttcactagataacaagcctagagttcttagaaagcttgtttctcctgttgttcttgcaggtgatgagaagagtgtcgattgacacaccactgagtgtccgtcacacctgcagctgctccgaccagatcagtctcacaccgcctttgaaggcgaggaggcagcagaaatctctcacattttacccacat

SEQ ID NO: 27031 - DNA, 452 bp, Arabidopsis thaliana landsberg
ttttcgaatttttatgaaaccatggcttccaagagagggggatcggggccttgagctcgaatggtcggattcacaaacacatcgatcgcgttgtagaatcccgttagcttttcttgatccaacggtccaagaacaatcacattattagtcccgaggtctttatatctgtttccccatggaccatctccagctaccaaaacgacaacgttttcacgtgcctccttgttttcttcaaacactcgcttcaaagctgagaacatcaaaggatgacctttatctctcactaacctccctgcaattcccaaaaccagaggagatttcttgttcttgccgcttctaacgccatatttctctctaaagctctcacgatttgaaacgtccggtttgaaaacgttctcgtcgacgccgtttagaatgatatggacacgttcctccggaatcatgtaaattcc

SEQ ID NO: 27032 - DNA, 1091 bp, Arabidopsis thaliana landsberg
tttaatacttggctttttgtggagttgaaggctctggtagtgaccgattgattcttgaagcttaatctttgattctcttgatttgcttttcagggttctggaagagatggttcaaaccccaaacatggctcacaaggtcagcgagaaaacaatttggtttatgcaactttcttcttcttctttattcacttagtctcaaaacactctgtttttctaatgaagatgtttttgtttacacagctcaacgtagagaatctttaaatgcgcaagaagacagagttgagccatgtcatctaagctcttctctttactacggtggtcaagacgtatactctcgatccaccaccaaccaaacttaccctccagtgagtcttcttaacttatgtaatgttttgctaatcacttccaaaaacagaggacttgactgatgagaaaatacgtctttcaggttaaaaatgaccgtataagaagcggagaatacgactctaatggacagaacccgcaagatgtttcaagaggaaactggtggcaaggttctctttattactaaagaaccacttcctttagtttctttagaaatctctccaggaacacctgaagctcaagccaagtactaatatctacttaaccaagactttgtataaataagtttatgcagaaaaaaaaagttattaggagatttctaggttaagtaataatatcgaagaattctcctagtagtagtgtctcaaatagatttctctagtacttgttataatcaactgtatcaatatttactctgtttttctctgtctcgtgccaacaaagtgatgaaatcattagccttttttaccaaacgcagaaacgtgatgaaaccaaacaatcaaatccttgattagttttaactatattagtgttatagctcaaatgttttaagcttgtaacgtacaaaacctctgatccgaaatgcaaagaaaaaacctttcatatgaatcagccattttcgtcgccgtgaaaagcctcaacgaccgttcacgcgcttccttgcctttcctctgtaattcctctgttccatcgctaacaacccgcaaaatcgcctcggtaagagactc

SEQ ID NO: 27033 - DNA, 1077 bp, Arabidopsis thaliana landsberg
tataaaaattcacaccttctagaaggcgaattccacataagttgcatacaatctctctgtctttttggattatattataattaaatataatctctttattaaagctcccaagaaatctgatttagcaacgttatctcttctcatgtatatatacatgtaaaagagagatttatttgcgttttgtgcttgtgtttttttttttatcattttccaggaaacaaaaaaacatcaaataatgaacatgacaaagaacaacgtcgttgaagtgtcaacatttttgttcttcgaagcatctgcagattccgagacgacccatcaggaacgtggacacgatggcgatgatgtgaaaggttgtgacgattgcggtgaagatgctgagtcatgcaggtgcgagatgtcaacgagtcagaggatgagtaggtcaacggattttgacacggttgaagaagtagctgacgtcgccggagaaaatgaaggtcacgttgacgaagatggagaggtgaatagttatcggaagtggccagagaggagagacggcgaaaatctgacagttgattcatcttcgacgggaaatgacgagaggttgatgagtgagattgaaaaaaatcgaatgttttgggaagcttgtttggcttcttaatagtctattttatgttcggaacaaaaatgatattattattttctatgttattctacattaagttataatcgattatgtgtttgaatgtattgattaaaattcctctgttattatatgtatgtaatttctcgacttatagagcatattgatgtttgtggtcatcagatttgaaaagttgttgataagggccatcgttcattgtataatatagtccggtagtacactagtagtactagtttccggctaaaatttaaaagacaagaaaagcaatcgaccatattagtaaaagcccattatagctaagtgggtcaccgtttactctcgcttcactaaacgtcaccgtttgggcaatcatcgtcccttcagttttttttttttggttttggtgtctaccgggacttatcgattcttccttaaacaggggaactactatgctc

SEQ ID NO: 27034 - DNA, 1500 bp, Arabidopsis thaliana landsberg
aagtagttctcaacagctctcagcctctcgtacgttcaacaactcaagtgtttcaaacttagatgagaatcgtgattgcggaatcagaaggaaacaactttatcagaaataagaatacattcaaacaaacttacatactagctaggagaccgatatcagaacaaaatgcttcggaaaactctcgacatgcttacattctaacataggtctgactactacgagatataaaacgagtcaaatctaagaaattaaacaaatcaagagattaagggtggtcggtatcttgcttcgattcttcacctttctgctctcctctaatgcttccagagtactaaaaaaaataatcaaaaagatacgtacgttaacgttaaagtactatcgttagtgtatttcacactactatttaaacttttacgatataataaagttgtaaatgttaacaaattctatcatccaaatatatatgtcgaactgtttctgatcagaagttaagactattgttgaaacgaaaagtacttggaaatgatgaagaaggtaggaggactaaatgactaatagggtggttcggtggcaagttcctttggtgcgttacacctgaaacactctgacctgcttgcgaagttatgttcgttacagcctgacctataatatacaaattaaaccaatcagtttctacgatatgcatatacattaatacaatttaaacggtcgtgtttagcttacgtaagccagcatgcatgtttcttttttggttttaagttttaaccatcaaaacatattattgcaaaaaaataacatcaatacatagaaacaatcaaacaaaaaagtaccttgggcaaatccaatctccagatttccaaggagaacggcccgtaccaccaccaccactactgctgccgccaaaaccaaaaaggccacgtctcggaccaacattcatgtccataaacccggttgttgcagcagcacttgagcatgaaaactcatcttttgcggcaccacacttgaaacaactggacctattggcaaaattatgtgtcccacaatccccaaggttgcaataccaatccccgggtcgcacatcgggcccggtgttgaaaccgaaggagctactaaccggacggccaccaaaaccgctgagtaaatcggtactgatcccgcccggtctaggctctctacaacgttggcatgaatccctcctctggaagttgaggtggctacacaatctgcagttccaatctcccggcctattcatcttcttctacaacaccatagaaaataataattaagtaacaaattacacaaaactaaagacatatgtatctacaaatgtaacttatatatatgttatgattaggttagggtaatggaaggtaaaaagaaagttgaaatgagtgtaagagcttatgaaggtgttgtcgtactctcacaatatatttatatggtcaatgaaaaagaaaaattcctttaacaaccgggaacattttttgaagtgaaattacg

SEQ ID NO: 27035 - DNA, 2496 bp, Arabidopsis thaliana landsberg
  unsure (1)..(2496): unsure at all n locations
ctaaaacattataacacaactatacttattcattttttagaaaagaaattaaaagtaaagagggtaatgataaaaaaaaatgtatatatcttattaaataaaaataggaataaaggtagagaaatttggatctataaccaaaaaaatttaataattaagaaactaacctaaaaaaaaaagctgttgtgatattttttgtattttgtatattaagaccactttacccttctcacctctcacctctcacctctcacctctcacctcttatctctggcatctcatctctttttttctatatcgccttcattaaaacagaacaaaactatagttttctattttactttcaattttgttacattctatttgctagaactaaggaaaacaaatacgaagactcaccatatctaattgaatattttctggtttgatcaatatctaaaattaaaaatccttaacacaaatttaaacccaaaatcgaatcgatttcaattcgatttaagaaaggagaaaagagattaagagtatataaacatgattttttcagacttctaaaaactgaaacttgagatgatttcatttagtttaattatttttgtttgggttcatataaagtatcatccttagggtttaatttttttaaatcaatagatgtttgtaattagaatggattgagataaaaaaagttaatttttctggaaattttttattgaattggggagaagagaagaagcaacgaagaagatgatgaaggaaaaaggtctgttaaataaggataaagtggatatttctcaattctcatgtgttagtttcttaatttctagaattatagtgctattttcttaatttagtgttggaaactggttagttttgcaattcacccaaaaaaatatcctctgtagaaaaaaaatatttaacaaaaaagggtccataaaatttctgcacttctttgattctttctaaacataactaaattcttttttttaatattagaccaaaagattgatttacgttagcctaacaattataaaactttattgatatattggagcaaaattttatgtactttctaacacaaaggcaagaatttacaccataaattattaacgatcccacaaatacttttcaccttctcacaacgtctctatgatgtgactgaatatggataaagactcaagacacaacgatgaatgatttagttttggatcttattcaattgttaattcagttcaagttccctgactctgtttctgtaagctttttaaattttgactaaatgtaaatatgtgctatttttcttgatgaactctaaaagcattgtcactaatatctttcaagtttacattgttcttttggtattcaaataatcagattcattcttcaaaatcaaggcgctattcttctttttactttgtatctagatttgcttcatgactggacaaaaacctggatgtaaggaaaaaacaaaaaacaagatgattttgagccatcaagagcgaatgactttgtttctatgaacattatcttttagggtaatatgattatctatacccagatgaattgataattgactgatagaaaaaaacattgttgtcttttactgttttaattttatgacaactatacccctaaattattaaactaaaaataaaaagctcgagaaaattaaaaaacttgagatattagtgacgatgaaacattagtacgttaaatgaaacattaatacgttcaaataaatattatccatatatcgattatcttactatgttaagacaaatattatttcgatgtttagtatgttaccatgttattattcatatatagattatcttaccgtgttgagacaaatattattttgatatttagtatgttagcatgttattattctattcaacatgttgttataatcgttattaagttaattatgtaacatgatgtattttattgtgttgatatatatatagatatataaatataaataaaaatactgattcataattttaaatcgataaatatttatttatcatataatatataaatttatgttatctcgttaaacaaatagttatatacttatttatttattttgaatcgatgacatttttgtaattaatctaaaaaggaaggataattttgggcgaggagggggaggggacctctgatggtactgtctattaccagcgtaacgagtatctcacaatgaatttttggagatattctcctttattcttctatcactagctggagaaacagatcttctagagtggccaccattagacaacactaggcctttgttgtcatggttcttgtgggaaggctccttanggtgaaaggaagggtaggggcgatgcccatcttctaattgagggggtcgagggcctctctcatcgtctttagctgcaaactctaaacgttggttttcatccaagagtgggcaagaatccacttcatgacagatccgtctacagtaagagcacaatcgaagaaacttctcataaa

SEQ ID NO: 27036 - DNA, 1307 bp, Arabidopsis thaliana landsberg
tgtggagatgaaagcctgaaaacggtgtgttattgtctttattgtctctagaaatgtagacaaaactctttatttttataacatgattaaacctactcaacaaaagttagtggccactaacatgaattctttttcttactataatccttttctatctttcggttttaggtcaaccacttttcagtggattttagctttttgagaatctctgtcttatccaagattctcttcttcttcttcatttttcaattctttctttttaaaattcttatccgctggatgactacattggttgaatgaattaatggagactcagtatcgttttttgcgtttaaattagtctaaagctttgttgtattatattaaagcactagaatgaaaagactatgtgtactaactaactaatcaagtatatatataatgcaaaagtataactacatttttctttttagaagaatgtggaattttaacattgcattacacacgtatcttatgtacattcgatatttcgatccttaccaaaattcagtaaaacgaaacaacaacaaaaatctaactttaagtttaaacgacatattaaacaggtttatatatttcaattcgtttaaatataagtaacctgctgtttaaaaaaaaaagtaacctaaaatgtgttttgatgtaaaattaaagtttttaaacaaaacacaaaaaatctgaatgacataaaaaaataatccaccaaaacagttatgagtaagttaaatgatataacaccattctttctgtcatttctattttatttgagttaccatgcaaagccttacattgagaaagagatatagaatgatcaagtacatttctcattgtcatttgattgaaaatataaaattcaaaaaaacttacatcaaaacaatagaaagtggaatgtatagctatctatgtggaaagtggaatgaaactttgaagattaaagaatgtaaaagaatcatagaaagaaataaaaaatagtttatcaaatgggatctcgatagatataatctaaacttcttctcccaactttttctctcgttgtttcccatgataaaaagctttaagacatttgcaccaaaaagatctcaaattcacgttcacatagaaaaattaacaagaggcagaaggaaaaaaaatgtggaggtcattcgcaaggtaaacacactctcaagacatacgtctaatctcttctttattatctaattatagaattagtctccatctcaatttcttctccgtggcttttctctgcagaagcttcaaactcattaattgtaccaaattgtttgatatcc

SEQ ID NO: 27037 - DNA, 3203 bp, Arabidopsis thaliana landsberg
ctatcattctcaaggtgtttatgcgatctaggtgcttcggtcagtctgatgcctctctcagtagccaacaatcttggttttgataaatatgaaacttgcggcatgtcgctaattccagcgcacagatccatcagaatacctcatggcctgttggaagacttacccgtcaagataggttctatagaagtacccgccgactttgtggtgctggatatggacaaagagcagaaagccccattgattctgggaagaccatttttaactacagcaggagccttcctcgatgtcaagaaaggaaagatcgacctcagcctcgggaaagatcttcggatgactttcgacatcaccaacatgatgaaaaagcccacaatagagggtaaagttttctggacagaagagacagaattcctaactgacgagcttttagaagaactagcagaggacgaccacttacagagcgccctgaccaaagacagtagagaaaaagacttacatgtggaaactttggataccagaagctgatggatatgagcagggaagtcgatgactcagaagactttgaggagttgagaccactcgaccgcacgaataacccactcgatcacgtcactcgatcgcaaggcgagctacatcactcgatcgcttcactcgatcacgattccatctctgatactgaatcaccacctaacgattggtctgagctcaaggcacccaaggttgacctgaaaccgcttccaaaagggctaaggtatgtttttcttggaatcaattccacctatccagtgatagtgaatgatgaaatagatactgaacaagtgaatttgcttataattgaattgaaaaagtatagaaaaaccataggttattcactagatgacatcaaggggatttcacccactttgtgcactcatagaatccatctagaaaatgaatcatattctagcattgaacctcagaggagattaaatccaaacttgaaagaagttgtaaaaaaagagatacttaaactattagatgcaggtgtaatctaccctatatctgatagcacttgggtatctccagttcattgtgttcctaaaaagggaggtgtgacagttattaaaaattcaaaagatgaactactacccactaggaccataacaggacataggatgtgtattgactataggaagcttaatgcagccactaggaaagatcacttccccttacctttcattgaccaaatgctagaaagattagccaatcacccctattactgttttctagatggctatagcggattttttcaaatccctatccacccaaacgaccaagagaaaactacattcacgtgtccctatgggacttttgcttataaacgaatgccttttgggctttgtaatgcacccgccacttttcagcgctgcatgacttctattttgtccgatttgatagaggagatggtcgaggtattcatggatgatttttctgtgtatagctcttctttctcctcctgtttgcttaatctgtgcagggtactcaagagatgcgaagagacaaacctggtactgaactgggaaacatgtcacttcatggtcagagaaggaatcgtcttggggcacaaaatatcagaaaatgggatagaagttgattgggcaaaagttgatgtcatggtgcagttgcaaccaccaaaaactgtgaaagacatcagaagttttctcggacatgctgggttctacaggagattcatcaaggatttctctaagttggctaggccactcaccaggctgctgtgcaaagaggctgagttcacgtttgatgaagaatgtctggctgctttcaaattgatcaaagaagcactgatctctactccaatagtccaagcacctaattgggatcacccttttgaaatcatgtgtgatgcttcggattacgatgtgggagcggttctaagacaaaggattgataagaatttgcacgtcatctactacgctagaagaacgatggatgatgcacaaataaggtatgccactacagagaaagaattattggtcgtggtctttgcattcgaaaagtttagaagctacctggtaggctctaaagtgacagtttacactgatcatgctgctctgaggcacatctatgcaaagaaagataccaagccgaggttgctgagatggattctgctgctccaagaattcgatatggagattgtggataaaaaggggatcaaaaaaagtgtagctgatcacttatcgcgaacgaaaattgaagatgcagtccctattaacgacaccatgcctgaggaacagcttatggccatccgagaagtgaacaaaaaattcaaaagcagccagttttgggatgagatgcttgcaatggaggagaaacttccgtggtacgctgattatgtcaactacttggcatgtggtgaagagcctctgaatttgtcagggtacaaaagaaagaagttcttcaaagacataaatcgcttcaaagaagttcttcaaaagaaagaagcctctacactctctgcaaagataaaatctataggaggtctgtcttagaagatgaaatagaaggtatcttgcagcactgtcatggtaccagctacggcggccatttcgtaacgttcaagaaagtatctaaaatcctgcaagcaggattttggtggccaaccatgttcaaagacactcaagagttcatttcaaagtgtgattcgtgtcagagaaggggaaacatcaacagaagaaatgagatgcctcagaacccgattttagaggttgagatttttgacgtatggggaattgatttcatgggtccgtttccgtcctcgtatgggaataagtatatattggttgcagtagactatgtgtaaaaatgggtggaagcaatagccagccgtacgaatgatgctagagtcgtcctaaagttattcaagagcatcatcttcccaagatttggagttcctagaatagtcattagtgatggaggcacgcactttttcaacaaagttttcaagagtctactgaggaataattgggttaaacataaggtagtgactccttaccatcgacagacaagtggctaggtggaaatctctaacagggagatacaatcgattatagagaaaactgtcgggatcaccaaaaaagattggtttgtaaacctcgacgatgtgttatgggcgtacagaacaacgttcaagaaccccattggtcaac

SEQ ID NO: 27038 - DNA, 926 bp, Arabidopsis thaliana landsberg
acaagtcttagacagcaacgtagccttagctatggtcgtgaggatcggaaatgacttacaatggccggtgattaaagacgagccagtggtgaaacttgactctcgtgactacctcttcacgttgccggttaaagatggagagccacttagttacggcatcacgtttttccctattgatgaaaatgacatcgtttttgtgaatagtatcgagttgctagacgatttcttgagagagaattcttgtttctcttcgtctccgtcttcttcttcgtcttcttcttcgtcttcttcttcgagtgttaacaatggaattgattggaaagagtttgcgcctaagattgaagattataacaatgttgtagctaaagctattgcaggaggtacagggcatatcattagagggatgtttaaatgcagtaatgcttacactaatcaggtttataatcatcaacctcattagagttcttattatttgttaatttcaaattctgaatcttgggttttgttaaataggttcataaaggaggtgaaattatgattacgaaggctgagaaaaagaatggtgcctcgtcaaaaagaaatgcaaccacaaacaagaatcaaatcaacaagaaccttcaacggtataacaattgatgatcttttaaatccgattttaactggttactaggcttagaaacatagttacctaactaataaaaccgatatggaagtgatcactttggtatggttttggtttgattttttttttttattttttccgctctgttggatttggttttaatttttggtcggtgtaagaaatattaaaactcaactttggtttatggactaaattttttttgttcgatagttggtatataatgaactcaagatacagcattcctagttctttgacatttttaatcttaaaaccatagtctttt

SEQ ID NO: 27039 - DNA, 754 bp, Arabidopsis thaliana landsberg
ctaggcgtccgggcgatggtctatcggctacggcgtatggtcgcctaggcgtcgcctacgcgtccaggcggttgtccaacgccttggaccgccttaccgctttaaaaaccatgggtgggggacacatatttatagccctaggggctgcactacacactacacagtgaacacgctgcactacacactactctgcagtattagagatgctgctgtccctgctgtcctctagatcctaaaggaggacagtcaaaaagctcctactgtcctctaggtactaaaggagatgctgctgtcctgcaacatgctgtccttcacaagaccatgcactgtcttctagtctaaagaactgcaacaaagcactattgtcctctacccaacctgttgtccttaaagcagtcaaaaactgcagtaaagaccaacaacaacagcagatgctgctgtccttcgctgtccttaaagcagtcaagaactgcagtaaagaccacgagacttattccaacaattctccccctaagtcttgtgcatcgtcttgttggacagttgggccatcccggacctggagcaaagcttaagaaacttgatcctcccaaggggcttggtgagcaggtccgcaagctgatccttggtgttgatgtaccacgccttaatgctctcttctgccaaccagtcacggataaagtggtactcacccgatgtgcttgtctgtcatggaaacgaggtcttggcaacgtagacagactggtgtcacctgagt

SEQ ID NO: 27040 - DNA, 989 bp, Arabidopsis thaliana landsberg
tgattgtgactgcaagtaagattccagtccccgacccaatggctcccatgaaatcagccaaaacagtgagcgcaccgatgcacactcctccaaatgcagccgctgttgggatgtaccggttcagctccttttgtaagttggactctctgtgtcccggcatcaccatttgttgttcctaatcatattttacaaataaattcactttccatgtcgaaatgtttaaattatttagcaatggagaaaaggtttagggattattacctttagctgcttagctacatctctagcagaagacccggagacttcaatccatgtttttgagaatagggcacaagcagtgagcatgaagacgatatagaacagagcatggaatggatgagctgccatatcggcaaaactgtaaccgtggaaaacaaatattcagagaactggaaatcaagtattgttatattgatggggacacacgttacttgtgaattaccttgccggagctgtgatcaaatatgcaagaccactaactggtatagattgtccactgtactctgattctttccactgtcccaataggttcacaaagaaatttccactgaatttcctgtaaagaagctgttaaagaggaaatccaaaatgtcaactttatgttcccacttgtgttgtcccttaatgaggaaacaaaagaaagcacaagtacatgagatattaagtagaggtttgagcagatagcagactgcagaatgattggcatgttgaaggtgtagaacagcttgatagggtatgaaccctgttggccacgagcactctttgacctcacgggcaacacaacacggaagccttggaagtatataacaatcaagaagatcaacactgttgcaagcaagttggtaacatttggaaggttctgccggtaaaaagcttgtaagagcgcagcaaccttattggacttagttatcagcatatggaacaacgcaatcacagcgccttcaaactca

SEQ ID NO: 27041 - DNA, 758 bp, Arabidopsis thaliana landsberg
ttacttatttccgataaaaatcaaaaccgaagcagaatagaccacataattctgatcttcttcatctctaggtatatggtttatgatattacaaaacataattaacagcaaaaatttagacaaatatttctttaactccaacacaaaagtacacatagcattaggttattcctaagatttctgggcttctggtcctaaaatcccattcactactgacgtagcgacaagaactccgacgaactcagccgccacgacggctccagcttgtgtcaatccattaaagctaaccgccgtcacgatttccttctctgccgtctctacacctctctccgccgcttctaatcctttctccgccgcatcaacgcctttctccgccgtctcaaagccttctttcacgatctccaccgcttcttcttctgctttcttcagtttctttcttataccaaataacggaatattctccgccattgatgcaggctgaagtcccgtcactaccgtcgctgccgtcaacgaaaataacagattcctgcgagaggcgccggtcagcgagaacgaagaaagcgcgggtttgttagaatgcgccgctcgtgggctaacatgcgcggttcttgcgcaacgcgcctgaagagctccactgccgccgctgagtaaagaaagcgaaacagtcgaaccattttttagatgatctcacaagaaacgaaaaaagctctcagatgtgaatagaaatccgaaaggtttgatatatataggtacaaaat

SEQ ID NO: 27042 - DNA, 1821 bp, Arabidopsis thaliana landsberg
gtctttgtttgtgatttagtggattgtctaaccatgatttgtctataatatttgctcttctcacaaataatgaaagtaggtagcatcaatatctagacctaatattttccatatatttaggtcaactctttcatatctggctgatcagtaatcatacaacgttggaattgtttgctttgtttctattataaactaaaacattggtaaaaatagattttcatttgtggaattttcgtcaagtcataattcacttgtttgaaaacaatgagaaatgatacgaaagcaaaaaggaaaccaagaaaagaagagatggcaaaagtaaattaacaaagaaagaagctacaagcaaatgtcattgtcattaggtagcactaaatgtcttgtggacatcattaaactccttaattactttgcaaatattagtctaattgtttttctccctgtcattcacgggcagatattagtctaaaccatccaaaattgatggttaagtgtttaaattgtaattatcaatggggagaaattgttttcatgatggatgatggtaaaaattatgaaagcaaagagttaaagcagtttcttcataaaaactttgtatattaattttagagtacagaacacattgttaacacctctagttactttaatgttttatttaagagttgaaacgtaaacaattaatatcagtgtcacatagtcacttgatgcctctctctaccttatttacttgtaaagattcatctctcttctttaattttcctcttcttgttctcttttgttggctttgttaaatacttcttttgttgcagagaaaacaagagtctcagatacttgttcaaccttaaaactatatacgactatgtaagattcttgcatcccttctctccttcattgaacgtttttgtatattgttctttgattattcatactcaaatataaagtttgatgtttgaaattatgctctatctcctttgtaaatgtgttgcagaagacatcttacagagtcaatggaaacaaaccagtggcggtcgaggaaaaagatagaatcagctgcagaaacactccaagtttcttctagaagaggcagaggacaggtaaagaaaattttgcagaaattgtcaaagtttgctttaattgttccatgttttcttgagcaagacttgatcattcattatcatcttctgttgtgtctatgtattgcttgtgaacttctatggcttagtaaatgtcttttaaatgatgatttgttactttggtattggtctttaggcacgtatggttcctcctgtaagtggagttagatccgagagagctcgaaaaagtctaagtgagaagctagagactgtagctttaaactctcctaagaaagatgctcgtgtgagtctttatggcgagaaaagtgtagtagatgagattttcctagaagatgaagaaatgggtcatgaaactggtttgaagaatggagagtggtcgcctttttgtggtgtatcggacaagcttttgcaacgaatcgagcttcttgggaaagaccatgaggcaacgagacttgataacaacaagttcaggtcaatcgaatctatgaaaaagagacaagaagaatcggcatgtgatgatgtagttgatatgaagacaaagattcaaacgttagctgcggagaacactcagcttaagaagtctcttgtggcgaaagaagagcttgcggtaagtcttcaagagcgtaaatttcaggtggaatcagaattcgaagcgtccagcccagattagattcacggagaaaaaaacgaatcttagatatgagtatactgttcttagaaagatctt

SEQ ID NO: 27043 - DNA, 1590 bp, Arabidopsis thaliana landsberg
ttctaaatgtagagtttgactcttggtcttgggtgcgactaatgtcttaacactgtcttctaaatttttttttaccattttgtctaatttcaataatttgaagaaggacctctcatactaaaattgataacatcctagtggaatctaatttccatctgacggtaaaaaatgctagataccgaatggtcatggctgcttcttggcattagtgattcattgtttgtgcaaatattttataaagccaacaatagtatgtaaaatagcctcacagcaaaatctaatttgctttggctgtggagaaagagagagagagtcttaatacgtctcatggctgattcttggagtgtctctcagtaaagttctttagcctggaaaacccttctatgagaagctcaagctcaactgcaaaggtgatacgtagccagttcttaagcccaacagcttgacctacaagaaactcatccattatctgttattttaacgacccctagctgtcaacttgttaacaaaactatataatattacctggtaggatgatcatagattcctctttagccagcttggagcagaagtccaaatcatcactgatatcttcgagtagtgaaaagtttaacttcacctgcaccaacaaatggattagcctctgagcttgagcttgaggttaaccaatgagtaatctggttcatgtcgattcattaccatcgtgaacattgagccctcgggtttgcaggggcaagtgatgcaaggaatcttcataagctcctcataacaaatctctgcacattttttcaccatttcaagttttgatgagaagaactcttcctttgtattcccaatgatatcaggcattgctccctgcctcggacaaaacaaaaccaaaatcatttttcttgaaaaactccagccgtgattcaacaccaatgcatacctgaataaacgttgcaggatccgtcgacatgttgacaacattgataagagtctgaacaaactaatagacaaaaagaaacagagattgatcacaaatacattcttgacaagatattaatcaactaaacaaaatgtaactactaaccccagaatctttcatgatgccatgagggtcaagagtcaccatccaaccaagtctccatccaggaacaaaccatcttttagatatagcacctaagacaataacaggcactagctctgcaaactctgccatggacacaaatggtttatccccaaaggcaaaatggtcatagacttcgtctgcgatcacaagtataccaagcttgcaagccgtctctgcaatcttcatccaccatataaagaagacaaatccataacaaagccatttccactatatcaaatgaatgattaataagaagcaagtgtacaccttttgaagatgttggcgagagaaaacattcccacatggattgcaagggttgataacaagtatagcaacggttttgtcatccgcaagagcttcaactccatctagatcaacatcccaaccattttccggtaggaggtcgaaataacgaacctcgagttggcaaaagccgctcgggaatcgtacatcgggtaagtaggcctaggtagcagaat

SEQ ID NO: 27044 - DNA, 3267 bp, Arabidopsis thaliana landsberg
ctggtttcggtattgcagagatttcgtgttggatgtggtttgtgttagagacaaacaacgaagatgaggattgaggatttagaagcagctttgaatcaagacattcagttctttgatacagaagttcgaacttcagatgttgtcttcgccattaacaccgacgctgttatggttcaagacgccattagtgagaaagtaagaatcttcaaattcttagtctttttgtttcttcttccttatctgatctgttttttttgggaatctcagcttggtaatttcatccattacatggcgacttttgtttctggattcatcgtgggtttcactgcgggtgtggcaactagctttagtgactctcgcggtggttccgttgattgctgtgatcggaggaattcacaccactactctctctaaactatctaataagagtcaagagtctctttcacaagctggtaatatcgtcgaacaggtagagtgcacaaatccctagaaataaataaaaaaagtttctatttttgtcaaatccagtaatcattctatcatttgtttttttctgggtctgattcaatttctgaaaaaaatggcagacagtggtacaaatcagagtagtgatggcgtttgttggagaatcaagagcttcacaagcttattcatcagctttgaagattgctcagaagcttggttacaaaacaggtttagctaaaggaatgggacttggtgctacatacttcgttgtcttttgttgaaacgctcccttgctttggaacggaggatatctaggccgccaccatttgaccaacggtggtctcgctattgccacaatgtttttcgttatgattggtggattgtaagcaactctttgctctcttctctgttcatcactcttcttatcatttggtttgatattggtttgtttatggagatgagttatttatttttgatttaaagggcattgggacacatcagcacccagcatggctgcatttgcgaaagcaaaggttgctgctgcaaagatctttagaatcattgatcacaaaccaacgatagagcgtaacagcgagtccggtgtggagtaagactcagtcacgggtcttgtcgagcttaaaaatgtggacttttcgtatccgtcaaggccagatgttaagattcttaacagcttctgcctctctgttcctgctgggaagaccattgctttggttgggagcagtggttcaggaaaaagcacagtcgtttcgcttatagagcggttttacgacccaaactcaggttacaatcttaacattctgttccatttcaagctgtttttgctcgagcattgttcgtttaacacgctttttattgtcgctgcaggacaagttttactagatgggcaagacctgaagacgctgaaactgagatggttaaggcaacagatagggctagtgagccaagaacctgcactattcgccacttctatcaaagagaatatactcttaggccgtcctgacgcagatcaagtcgagatagaggaggcagctcgagtcgcaaatgctcattcctttatcatcaaactacctgatggtttcgacacacaggtctgatggtttatgtgaatctgttatcttttgattctttaatttattcattagtttaaggtattttgaaagagtcaaaagagagaagaggtatggtcatggaaaagcatttataacagagtaacatgggtttggtcaacaacgcatgtgagacccagacaagtagttttagtcatgtgtgttgatgttgaatttttttagtgttcatgtgcttgttttttttcttgctactttaacttgaaaaccagcaaccactgttccaatggatttttaatccagatagacatatgtttgtttatactcatgtggtaaatgtgaataatgtcaggttggggagagaggattgcagctgtcaggtgggcagaagcaaagaatagcgatagcaagagcgatgttgaagaacccggcgatacttctattagatgaggcgacgagtgcattggattctgaatcagagaagcttgtacaagaggctttggatcgtttcatgattggaaggactactctcatcattgctcatcgcctttctaccattcgaaaagctgaccttgttgctgtgcttcagcaaggaagtgtctctgagattggaacgcatgatgagcttttttccaagggagaaaatggagtctatgctaagctaattaaaatgcaagaagcagctcacgaaactgccatgagcaatgcaagaaagagtagcgcaaggtatatattcttattcattttgttttgtttatggttttgatgatgatttttttttgggttactgatgttaatctatttgttggagaccgtcgagtgctagaaactcggttagctcgccaataatgactcggaattcgtcgtatggaagatcaccttattcacggagactctcggatttctcaacttctgattttagcctctccattgacgcttcgtcctacccaaactatagaaacgagaagctggccttcaaggatcaagccaattcattctggcgactagctaaaatgaactctccagagtggaaatacgctttgcttggttcagtaggctctgtcatttgtggctcccttagcgcattcttcgcgtatgtcctcagtgcagtcttaagcgtctactacaacccggaccacgaatacatgatcaaacagattgataagtactgttatctcttgatcggtctctcttccgcagcacttgtcttcaacacgctccagcattctttctgggacattgtgggtgagaatctgaccaagagagtccgtgagaagatgctgagcgctgtactcaagaatgagatggcttggtttgatcaagaggagaatgaaagtgcaagaatcgcagcacgattagctcttgatgctaataatgtgagatctgccataggagatagaatatcggttattgtgcagaacacagcactgatgcttgttgcttgcactgccggctttgttctacaatggagactcgcacttgtccttgtcgcagtcttccccgtagttgttgctgcaactgtcttacaggtttgtgttcttttaaagcatgtgcatgctctcattgttgttcttggatctgaaactttgtcttgtcttttgaacagaaaatgttcatgtctggtttctcgggagacctgaaagcggcacatgccaagggaacgaagcttgctggtgaagccatagctaatgtcaggacagttccagcatttaactcg

SEQ ID NO: 27045 - DNA, 1166 bp, Arabidopsis thaliana landsberg
gcagagaaaggtgtgctttatgtcttgcagggtgcgaatgcatgagggggggggcatagatggttgtgcggctgttgagaatcaatgaatcttatcgaaccaataactgttgtgacgtcattcctgacatataatgatattcctatatttatcacctacccacgtatatcttttgtctatagcaagaatttactacttggggaacaagttatcaaatactacttttctaagaaaagaaaaactactagttgcaattttattccaaacattgatgtgagagtgactacaccattaataaatcgtgtgaggcgctattcagatttttcatttttcgatgaagtgtggatttgttttgtcatttttattgtaagtttttgttttggtgcacataaatatttaatttctattaatttaaaatatctgctgaatgacactaattattggactcattaattcactcgatagattattgacatttttttcagtaggcgtagacctttttccgggggaagaaaaaaagtttaagcggttcgattcccactaaccttttggagaatcgtgtcacgtgtcgaatagacccaaatcctttaccctacatgtttgaaactgtataaaattcccgacgtaaataagacgatcttgacccggcccgagaacccgaatctatggattttgaatttggaaacccaacctacaaattttttatatatcccactgacaaagccgttactagcccatgggcctaattacttcaaagaatgctcaacttttgatttttaatagagaagaaaaagtttgaaactttatcatatattgacttgtcttgttgctctctagagtgcaatcataccattgcattcacaaatcaaaacaccggttattttccggttcaatctcaatcagggtttcaccttggtttaacccaacccacctatagttttttatgaatacaatagtcctgtgtctaggtatgttacattacatctaaacattttaggattcgttttcagatggtttaagatataatcactctgaacgccaatgcaaattagaatgtattttgatccaagcatttctacatgtactgctttgatctgaatcgaaaagagcaagtcatggttactccctcaataatcgccactaaaaaaaagtacagcttctttgac

SEQ ID NO: 27046 - DNA, 1754 bp, Arabidopsis thaliana landsberg
  unsure (1)..(1754): unsure at all n locations
ctatatttcagcaagaaaaattaatgcatgatctaacataatgttttgctatactttaattcagttcggaaagaactaagcaaatcttgttttccatggaataccaaattgcagcgtgttatattatattaattcttatttcttatttttggcagcattaattcttaacttcagtaattattacgaataaataagaaattaccaactattatctgaaaataaatatttaagattttagtgtaatattttgattgcaaaaaaatcaaagaaaaaccagtttttatatattttggattaaatcaactcataaaattctcaatatattgtgtaaatctttcatatattttttctatctaaaatatctctccttcttaataaaatatttttgtaaaatatatttttatttcagaattttaattactttagaagatccatcaatatctgaattaaatttagtgtcgtcgatttaaactagattgtaaaagttccatgtgaatttatcagtgaagcttttaaaaattttcaattttcaatcagtatttgttttttttcttcttgagtttgtaaaaatttgttcgtatttgtgaaattccttacaaatattttgcttggtgaaattattttagattgaacttttacttatcagtttacttcatgtttttcaaaacatttcatatgaagctgtatactagcttttatctcgtcaatatatatacatacaatggtttactacattattttcacataactatatcgtttataaaacaacttttctcatcgttctgaaaacttggtgagaaataattttggatcggatttctttgatcaagtttccgatttattatagttaacaacagtgtgaaaagtggataaataacgaaacacaaactgatggataaagaaatttacataaaaacaagaagatggatatataatatatatcctcaagggacaaaatagaaatcctatagtaatatgataagttccgacagaagtttgagtcgataaccctctttcccgctcttgtttcctctcctataaatacctcttgcaattggcacaaactctccatatcactcttcaactagttacctttcataaatatggacaacgatcgagataccgtagagttctggtcctcacttttccaatcctttgctgactcagaacctaaagataatccatatcctgtggttagaagcccgataatgaccnnnnnnnnnnnnnnnnnnnnnnnngagccggttgagccatggaaagttcttgaatatggaggtaaggaggttcgtccgatggccattgatgagccggctgagccatggaaggctcttgaatatggaggtaaggacgttcgaccgatggccattgatgtgccgactgagccatggaaggttggaggtaaggaggctcaaccggcaaatgctgcagccaaagctggatataagaacgttaatacggatcaagaaaaatctactcaaaaagcgacggagaaggtaattatgtagttgatttttttagatatatatatgagtttttttttccgtttatttattttacatatgagttaggtctaatacgaactttgttattatatagggtaaggagaaggaagatgctgcgaaggaaggaagcaagagtcttggtaagagaccacgtggttatgaagcacgcattatcaatgacaaggtgaggacacgttttgtttgtttaatgcgtgtctctcaacgaaaaagaccacgttgttcaacgttttt

SEQ ID NO: 27047 - DNA, 1418 bp, Arabidopsis thaliana landsberg
  unsure (1)..(1418): unsure at all n locations
gagcaaaagaaagcgaatgacagtaattgtacgcgatgaggaagggcagattcttctactattctaaaggttctgacaggttagcaatttgtcacattgaccacatctagaagcttatgtacaataaatctttacttttatcaactgtttcttcctgaattttacagcatcatctttgagcggttggcgaagaatggaaagacatacttgggacctaccactaggcatttaactgaatatggagaagccggactccgtacactcgcacttgcttacagaaagcttgatgaggatgaatatgcagcttggaactctgagtttcttaaggccaaaacttcaataggatctgatagagatgagctgcttgagacgggagcagatatgattgagaaagaacttatccttataggagctactgctgtggaggacaaactccagaaaggggtatgcattgttgcacagacacactaacgccatatttgtcttgcttatgtaaactgaattccttttctttttcatctgacttaggtgccccaatgcatagataaacttgctcaagctgggctcaagttatgggttttaactggggacaaaatggaaactgcaatcaacattgggttagaatctctgatttaccttgaacataaactagaaagtatatctgtaatctgcttttatccagtgatttttatgcacaaattcccttttatgaactgcagattcgcgtgtagtttactacgacaaggcatgagacagatctgcataacatcaatgaattcagaaggaggatcccaagattcaaaaagggtatgtctaatggagttgcatgatgcatattgctaaagtatgaatttaaagttccttcaactaaaatttcgaacctcactcctatatttctactgatgtgttaggttgtgaaagagaacattttgaatcaactcacaaaagctgtacaaatggtgaagcttgagaaggatccgcatgctgcatttgctttgattattgacgggaaaactctaacttatgccttggaggatgatatgaagtatcaattcttggctttggcagtggattgtgcatcagtcatttgctgtcgagtgtcnnnnnnnnnnnnnnnnnnnnnnnnnnnnnntatatatatatccttcccttattcgtttcatcgcattcctccttgactatgcaactcccgaaacttcatacaaaaaaaagaaaatctaaatttatctgttttgctctttcccaaattcaaggttgttaggttggctaaagaggnnnnnnnnnnnnnnnnnnnggcaataggtgatggtgcaaatgatgttgggatgattcaagaagctgacattggtgtaagaattagtggggttgaaggaatgcangttcagttttttctctcagcaccatgccttttctgtttt

SEQ ID NO: 27048 - DNA, 2043 bp, Arabidopsis thaliana landsberg
cgagagtgttcggacggagacataaacagatcccaacgcgtactcacagatcggatcggcatgtgttgataggactagcaccgagacctcttatatgaacttactgtcgagagtgtgattagcccgaggataccaaaccgttgcttcacagaaggaaaagccgtcctacaaccattggctaggctggaggttcacagctggcatgatgcgcccgagcctcacgttcttctcacggtgaaaatcgcagagctctactttgcaccagaagaaacagagaagcttctgcaagctgcacatgtgctggaaatagcgcgggctcaaaagacaaaacaaaccaaaaaggcgaagaaacccgaacctcatggttcaaccctttataccaagacatccctcggggacttgagggctcgtattggtttcagcgtgatagtcacccatcgacttcccacccgagagaaagagcaaacgatatccccgagggtttcttcacattgtgctaggggttctattttttcatttggtttctgatcccgaggcaaatacttgagtacgtgaccacgtacaagatcattctttcccaattgaccactcgcgccctgaggcacctcgttgggattttggtacgtagttacgagacagatacgggtgactggcgagtaagtttgcaaaacaagaccgagctaaacaatgaagtagcttgagagagtaaggctgcgaaactagtcaatcattcgttttgtccccgaggtgaccatcgatcttcattgtttggctcggtctcgttctcggggtggaaacaaatctttcacaaaacctaataaaagagatgtatgtttttttttcctttccatcgaccttaacccgaaaaaaacgccaagctaaagagtaaaccccaaactctatttttctttccgttgacctaaatctctcgcggtctcgccggtgattcctctaacgtatctaaatcgtcgccatcggcgattcctccaccgtctctatgttccgtcgtcgttcttcctcctagaagcttcatattggttcctttcactacttttagctatgatttatgtatagtttttagagttcttttgttttttgtagagtcttttctagtctttttcaggtctttacatgtttgggatgcatttggagattatggagcattgtggagcaaaacagacaacctaagctgcagaagcaatccggagacgaaatttgacgtaggtgtcgatcgacacaacccctggtgtcgagcgacaccaatacctaatgccaattcaattgcgcaacttattgatgttttgaagatttccaaattcggtccagaactttcttttatttctaaagaagtccctgcacgttttaggttatatacatatagttttaaaggtcattgtttagacctaactcttattatctattatgtacttgggagaaaaagcttgtggagactccctttagagaagatctttctaaactctattctctaattgtttcttacattgatttcttatccaatcatgttttgttcttctatgatcatgcttgagtagttcttttgttgggtttagggattctcattagggatttggatgaattagtagatcgaaaaccctgttagaataatatatttagaattcttcaactctgattgttcttaatgctagttttagagtaactaactagaacttgattttaggataataggtatacggaccataggtatctattactggaactatcgtagatgagcctagtatttagatgcgtgctagcgtcgattacttaggtaaacttatcaaacctgattataatgcttgcttaattctagggatttacaagagagttgggatcaatacttttaagcatagtgagtttcgcggaacaccaccagttactgtatattagtgatttgagttcttaaattgtttgttaataatcctagtttactgctagatctactattctcatatttcctgagaatttccctaaacccgacaaattaaacatctgaatctacaaccaatctcatttattgatttc

SEQ ID NO: 27049 - DNA, 2744 bp, Arabidopsis thaliana landsberg
aaatccaaacataaacgtacacgacaagactcaaacacattgtagatgaattatacatacttcaactgttggttttctgagccgaatccggtacatgtattatgtatctattagattccatagatctatatcttttggttggcctgacacaaaaaaaaaacatattctcttgattttttttatttgttgacaggcccgtgtgaagatgatatatatacgtgagaagacaaaataaacattagtttgcgaataagaggttttttattccgcatctgagctatgtaacatcataaaagagtaagctttaaatatgatcatcaatagggtttggggtttgtcggtgggtcaggtgcccgccttgaaatgctgcctggtgtttcaattttgctccctcttatcaccttttcttcccattgtccctcttctgttttttttttcagcatccaaacaacaatgtaataatgatcaattaggttattcaaatttattttgctgagaaatatattcgcgtcaatttgatctctatgatagatgtattatcccaccaaagtatggccatgtaagaaacataactatataatttctcagattgtaatctcacttgtgttgggtgtttcatatgccattcgggctaatgctgtgtttgatgatccagaaaacaagagaaaaatcaaagtaattaaccaaaacactgctttatacattttaaggtccctctttcagttttaaaattgtgagtttcagaatgtaaactctgtgtatatatagagaagagagaacatttgcacacacataaaacaaataagaggagagaaaactagacttatccaaaaaattttttgtggtaaatctaaatttattatttctccttttagacaataaaatataaatatccataattgtttatctactataattatgattggtactgataatattttgacacacacatagaaaactattgattttgatatattgctttaaagtatgtttttcattatttctttttttttttgttatttgattttacttttccaaataaaagaaacctgatggtattaactttgtagagtttctttttttggtgggatctattccattctatttacaattttactttttaaaaacaaaaataataggataactgttttaaacttttaattacttcgggacgttaataaaagttttttttttttaatttcttcggatgtttcatcataatatcatataaaccgtttacctcttttttttttttttggagatcaatgtgaaagagcttttgtctaaaccatcttcggaacagcattgctcattacttcaaatagtcccattttaaaacgtatcatctcatgtcatgtggctatatgatcaatgaatcacattaattacaagtaagtgttttggcctatcttagtgatttctgctctagatgttcgtcacttttactggtttactactgttcttggtatgcagggcaggcatgttccgggaatctgaacacaatcagtttggtattttagttttttgttgtgtgtgtgaaagaaataggagaaagatgggtttgaaaattgattaaaaggcgatgcaaaagactatttttcaaattacgtaattcaagaagcaattatgatatctagtttcacatgaattgacatagttttgttttgaagctccttatccgaattgatcaaataattcaggttttggcctatatatcatcttgttgatttccagctctagatgtttggggctctgaaaaaaaatgaaattactacatctaggcccactaggcccaattattggttggtttagtctcacgcgccaccacgtttccgttattaaatccctaatattccgttgagctggtagcaaatttagccaatgtcgtcgtccacagcttccgctaccaccggcatgaaagggaaaaagccgtcgatagaaatagcgacctcgaatccttcacttccagaagatttggtagtgagctgcttagctcgtgtgtcgagattgtattacccgactctctccttagtctccaagagcttccgctccttgattgcttcaccagatctctacaagactcgatctctgttaggtcgcaccgagagttgtctctatctgtgcttacgatactctcctgaagataaccctcgctggttcactctctgccgaaaacctaatcgaagaaccctaagcaaggagaagaatgagtcaagtggcaatcttctggttccgatcccaatcatcaactctcctcctctggaatggtctagcatcgtcgctgttggttcacatctctacgccattaacggacctatcgaagatgctccatgctctaacgtctccttccttgactgtcgatctcacacttggctcgaagctccaagcatgcgagtggctcacaccaatagccaacttgatgggaagatgtatttagcaggaagctccgagaatgtagattctttgaactgtattcaagtgttcagcacaaagacacaaacttggaagcctgtgccgttccaaaagcggatattcggagtcggagatctggaaggaaagatttatacgatctgtaggacagagtgtggacagggtgtgactataaagccaaaggatttaacatgtgacgtggtaggattttgtggggagaaggattggtcttctgtttgtatgataggaaacatagtctattattatagacccagtggggagtttctatggatatactctggaaaaggggctct

SEQ ID NO: 27050 - DNA, 666 bp, Arabidopsis thaliana landsberg
acatatctgaagaattttagccagaaagagcactggcactgaagggacaatctcagaagtcagcaaggagtttaaggatcagctcctcctagctttgcttcaggcagagcctgcagttcttaaagtcttacttgaactggtaggtgtattcaacaagcttaacttcatctggactagttgttgcaaatcttattataacccctccgtcctgtagattttagtttgaatttgttcacatcttcattttacttcacttgtgggcagctgcacattgttgttgtgtcagaatttgttaggaaaaatgcatggcctaaacttgtaccggagctgcgctctgctatcgagaagagcagtttaattagcagttcaaactctagctggagtactgtgaacgctctgatggtattgcttacagttgtaaagccttttcaggtatttgttacatcattctctttcgtaagaaaaaagaatatagtaaggaagtgatgagctttaaacttagatttttatatctctctcttccatcagctctcctctactgcaccctgtttgccatcatattatggttgatcatccctaatataggttgcgaactgatgttgcttacggctgaagctctaagaacatcacctactttataacaaattgtaaacatctgtacaatgg

SEQ ID NO: 27051 - DNA, 2291 bp, Arabidopsis thaliana landsberg
tctaagtctggattttttcacatcactgatagctgggaatgtatatctttgctttgctgttgtaacctttaattgatgtttgactttagtctcctctgtactggctttttgagggtaataaactaataataatcctccagttgacaaaaataaaataaaatagctttgaatgtaaaacaacaatgtttgtcataatgttaaaaaaagttatgtcataatgttagtatcaaggcatcataaattacaaatacattttatcaagaagagtttgtcctcttgggatcaattcacctctaaacacccgaagagaccaacaaaggtggaaatgggtggactcatccctcggattttactcagctaggaactaacatacaaatgtactaagcgcatctattgaaatcaattaacagctactgactatcgaaagtagtattacaagcaggaattagaaagccaaatattacgcgtacgcatcagtgaagagtctccatttaccgtattttcttcgaaaaagggcaactagaatacatggcaggtgaagcaaccactaagggaaggaatcttcgtcttcccacttcttttgaatgatgaagccttaccatgagatgcggatgagactctattgtctaacaccgacctcctcatctcctccgctctcttctctgctgattttacttttctcataatcttttccatcgacgatgatcttttcttttacagcttcatctgtgggaaatatttctgacattagttaccgtaggagtgatacacacaagctacctatggacacatcattacttaagctattattggtaccaattgcaattgtttatatgcttaaagcctcattttttgtgcttcagaaagaagaaaaagacaggataagaggaaagaacctctagctttcttattgctgcctcggccttagctttctgcaaattttcccaagatataattctggcttcctctgtcgcactacataaatattaaactttcaatcagaattccaagtctaatccattcatatgaaaatctgtgatggtgggcaattggattaactgtgacgttgagccatatcaaatatgtcatgcctattcagattcatgagtttgtaataatgccgtgggagtaaaacagattagaacataccatgtcaaatcttcatggttagtagcttttccatgtacgtgatctcgcatttttgagccatttccatggtatagacctctgtgcttctttgaccagcgagttacggttaccttctcatcaacctgtaagtccttgacttctgctcggttggaatgagcattcagtagttccgaaataggtagtgctgatggagaggagggagagaacgaacactgtctctcaggggaaaaccggatgcttccctcgggactcatctgggttgccatatcccttcttgagacagcttgagcatcggtagcagcatccttcatactttcatggatgtcatctgtacatattgttaacaaatacgtaagcacttaccagaccagaatgtcaaagtgttcagattatgatattgaaacgatcactagagtaagataataatgtgttgatgcatgagtccttttgtccactctaagtttagcacaaaaccgataaaagttaccgagagttggattatattcaaaacttaaaagtaggtgtcactgagggttgatccgtctataccttgggatgaagatgcaagtgtttcagagcagccatgaatgctaactgatctcgccatgcatggatcgattcgctgaggaaaggcagctgtagtggaacccctagaagaaacagtttctggcaacacaccagctgaaaacggagagcttgctgttaagcctcccatgtttccaccatgaaccataggaactgcaggggaatacaacgaataatatgcaaatcctggaggacctaatggaccactctttgctttaggtcgcctttcatgcgatgctccaaatgaagtacgggcagctccttccttagcaagaggactaactatccatctctccgcatcttcccacttagaaggaaccgttctaccactatacaaaggtaaaaacccagcatttggcggacttcttcctccgtttgaacgtaaaggtactctctctgaactccaacccttttgcatactatgtagataagtcggagtaccaggactaggaaacacactcgatttattagttgaaactgaagctctcttcacatttaccactcttggagacgtagaggttacattactaagatccaacgaaacagtgccttggtaa

SEQ ID NO: 27052 - DNA, 2971 bp, Arabidopsis thaliana landsberg
ccataatatgttttgtattttgaagcaacatttttacaattttgtactcactaaaaaacattgttggctatatcttgatatatagatttcaatatacaacctgaaaaacaaaaataaaaacaacatttacagtaactttaaattattgtttttgttaaattacaatactaatgaaaaaaggaagacaaaatctatatatagattaattaatatacaaagacataatttataaactgtatacttacttagtttctaaatttatatagatacaaaaaaataatcaaattttctttatataaacatactaaataatatacctaaatatacaaaatataaaaaataacaaataattataagactgtgaattatatattacaaaagtaattaatctcaaccctaaaataaaaaatagacccgcggtataccgcgggttaaaatctagtttataacattacactttaacctctaataagtgaaacgagatccacacttatatgtgtaataacaagggaaagagaataactttcttctctcgctctctttctcaatctgtgtctataaataagaaatcatcctcatcttccagttgaaaagttgtgccttgtgtggatagtgccttagtcagaatatattgtttctgatcacactattccacccaaaaagcaacttcaaaatattcctgtatattctaaaaatttatagattgttcataagaagaaaaaaaacacaattcatcttcttagtcatttttttttgtttttttttagaacatcttcttcatcttgttgttacttgttcgaacctttcccatagctttttctcatcgtcgtcgccagagatgggagttgttgagaatcagaaaattttgctagagaaaaaacttggaggctggatagccattacgttcatcctaggtatgcactttcttttcttttcttttcgtttcttccaaatttttttttttctttgaagagagttattaatcttccatttgcctcaatattcatatggtccattcaaaaaaaatatatctaaacatggtaaactattaaatgaatagccattttcgccatgcatttaacaaattatggtggaccgaccacattgatgcctttcagtttctatcgatttatgattagatatttgttgtcttgtaattcacatctttgtttgttttagataagagtacttacacaatatgacactttcttgaaatatcaccacacaaaaaaaacacatttttcttactaatatatcatttttcttgatatctaaagataacaaacagtcaatcacagtttaaaaatgtatagttttcataactagtatgattctctaaatttcaatttcattgacaatacctgtaatgatctgccatcactttttttctttcctaatcggtagttgtgtccaacaccatgctaatatcatgactcatgagcacactaaacttcttttgcgagtcatgcaattcaataatctaagaaaatatatagtagtaagagaaatggaatcagaaatcaaattatatttacaagtttatatattcgaccgtttcaagtttttgtttaggcataaacctttgcatataacagttaaaagtttcagacagatcttgagtttatacattaattgtatatttgtatttaacggtccaacttaagttataccagaaccatccattcataataaaagatgcttcatattttggacaccatatatgttattatctgctgagaccaaaacttactaaatgatgagaataaaggtaatgagacgttggagaagttaggatcgattggagtatcagcaaattttatgttgtatttgaggaatgtgtttcacatggagccagtagaagcttccaacgtatactacttgtggatgggtctcactaactttgctccactcctcggcgcattgatctccgacgcctacattggccgtttcaagaccatcgcttacgcatccctcttctcaattctagtacgtgctctctatatctatttttaatttcacattgattataagctttaaatggagtgctgaataactttatcaacccaaaaaaaattggtcgtgataagacctaatgttgacaaatgaacaaggtaaatatttggttttcaatttctatacataatgcagaaaaaaacaagacggtcaatatatcactaagctatagagtgtagactaaaacagcaaaaatgccatttgttttaatctttctcaaagtttagctagttaactttttccattagcaaataccatttcttattaatgaacttacgtaacacattggagttgtgagacttgtgacaaataattggaacgttttaccccaaaaaaaaaaactatgctataaagtgaacttttgctcgatgtgtattccataaataagtaatcaaccaaatctgtaataaatccaaacagggactaatgacggtgacactcaccgcctgcctgcctcaactccacccaccaccgtgcaacaaccctcatccagacgaatgcgacgatccgaacaagctccagctcgggattctattcctcggtctcggctttctctccatcggaagcggcggaaatccggccttgcagcattccattcggagttgatcagtttgaccaacgaacagagcaaggccttaaaggagtggccagtttctttaattggtactacttgaccttaactatggttctcatcttttcgcataccgttgtggtctacttacagactgtcagttgggtcatcgggtttagcatcccgactagtttaatggcttgtgcagtggttctgttctttgtcggtatgcggttttacgtatatgtcaaaccggaaggtagtgtattctctggtattgctcgggtcatcgtggcagctcgtaagaaacgggacctcaaaatttcgcttgtggacgatgggactcaggagtattatgagccgccggtgaaacctggcgtgttatcc

SEQ ID NO: 27053 - DNA, 615 bp, Arabidopsis thaliana landsberg
tgcaacatgagcagcaccagctggcgttgtccgcatggctccagacgtcggcggttgtgggcatacaagctgctgcttgcggatgctcaaggcagccttgtgacggttgacctcggcacacgggggcgcgacctcgccctgtcggacggccatcagcagcggcaccgggcccgtatatccaagtgtgcgagcatggtacgtgtcctgcgggcgacgaacttcaactctacggtagggaaggcactcccctcgtcatcgacaagggcgcactatttagcgccaccacattccactaccggccgccacgagggcgcctccgctggttattgttgcgacctattccaggtgcccgtccatgtcctcccctttcgtccagatggcgtccatgggattcaggtggctgcacacatacaagtagggatggatccgaatatttattcagatgtcatttttttggtatttttctttgattgtgacaactaacatatagaatttactatgtaaatttatattcttgtttttagcattgagcttgtaaagttttatgaaagataaacctcaaatttatcatatattttctcaaatgatagatataagatttgaatacagaagtag

SEQ ID NO: 27054 - DNA, 1180 bp, Arabidopsis thaliana landsberg
gtcaaatccaagtagactagattctgggggttatgtatgtcatctgggggttgctccaggttatagcaatccctgaggtctaagataatcagcttgttgagcttggaagcagaacggctaatgcttttaatggttgagataccttgaaaactcaaaaaccttaaccttgtcagagaactcaaatctttcataactcgacggctatccatttcaatctcttggtcggttctctcccacctatccatttcaacctcagggtccatcctctcccacctacctagataaagaactttgagcttcttcatacgtgtgaaccacttgcttgtgaattctggaaacatctcggaaacattgaacactgtttcgatgttttctgcattcatttttcttctactttttgcttcgtcttggagtgatgaccctttcacaaggcagaccttgtgcagtccagattggttcatgggtggcttctccttttcatcatacatatcaaaaagccctaccttcttggagataagaaccactgaagcattcacaaaaggggtcatcttatagccacttggctccactttgcgtttgttttcaacaggttcaatcaagtttttctccgtgaaatcatcaagaatctccttcacaacatcttcgggtttgcgaatgccctttccggatggtatgtgttgagaactcagaatgccttcacccatccaccaatacataagcatcgttcgattcacctctttattctccgggaacacagcaaagctcagcaggcagatcctctgttcatcatctctaagaccctcaaattttcgttttacatctctgaaaacctcgagtcgtttgaggtcgtcttcatttgcgtggatgccaggcaagcaaacaatgcgttttttagtcttgtcgccgtcctgatcatcaggtgaggctttcttctgtttctgcctctcagacgacaaagggacctttcttatcaaattcaaaaccttcacagtgatatctgtcaagtctttactggctaaactactattagaggtatccactttttgaacctcatcatcaagcaagtcaagctgtttatccacatctaactgaagtctcttcatatattttacttttcgctttaagcgacgaagagcaatctgtagcttgcgagtcggattcacgagatcagtgggaatct

SEQ ID NO: 27055 - DNA, 1393 bp, Arabidopsis thaliana landsberg
aatccatttataccatttcatcaaaaattctaatacacaaagacttacaaattcataattttcatcaattttttaaaaaatttcgaaaatttcatatttgtttagttgacatatcaaacatgatttgttacatgagacgtaatgattgttataggtaaataatagcggtaagatatgctagtatcaataaatacaattataattttgattgttaagagatcaaggtaggtgaaaagagagtggtgcaagaagtaatatttaaatcaaaaaatttagaagaaaagttcagaatatttgattatatatattattttcacaaaataatttactttttaatctctacatatatataattatatatatatataattatttatttatctcgtaatttagtcaaatttcatatgcaatcaccaaaatttcacctaatgtgtattcaaattttgaatacaatatctactttaaatggcatatttaccgcagttaaaaacttaaaaacaatcattcaatgcatatggtagtataatatctgatgatcttatcttgcagtttagtcaaataatagcggtaagagatgatagtatgtgaaaagataatggtgcaagaaataatattattttttaacaaaaacaattttatgcgtaatctctacatatgcataattatacaattatagttgatgtagtttaaaaactacaaaacaacaacgtccattaagcagttatgagtttcgatgttaggtataaatatctttatcttataacaatatatgatagagtgtaacgtttacaaagcagacaagatagaaggaaaagcttgtgtcatttattctacgactgcttgaatatcttgtatttgtagaattgatttgtaggttctaatggatgatgtgaaacacgaatggtaaaacaaggtttttgctttagatctttggataactgggtggtattttcactacatataagacaataattcaatgcttacaatgatttattgtctaattatcttataacttagtcaaaagtttctcgctcatctacaaggaaattaaacaaatgtaattcaaaatttcaaacgattaataccatatttactcttaatgacagatttactccaattcaaaaaataataagggaaccacttaaatgcatgcttaagaaaacataaacatgtaaagaaaatgattagatcatgaaataaaaaggaaagaaagaaagaaaaaaaaaaaaaaaggagaagaagaccgagtgttgacaaaatatcatgtcactgttattagaagcctattaaattttttatttttattaaatagaaaaacaccaaatccgagaaaaattaatataaaaaaaaacaatataaaagggcttattcttttatttacttcattcgttaa

SEQ ID NO: 27056 - DNA, 1254 bp, Arabidopsis thaliana landsberg
cttcttttttttctctgtcacatctggcttcttacagaatatacctcatgtgcacttatcttctaaggatatgtattatataagatagtaacattctttcatggtcatgttgtccagaacaccaaaggaggtgaaggagagaatcctgaagggaaggatggattgatctgatatcacatatctgcttttgtccaagttcggtatactccttaacccggttatgtagaagctctcgtcccatagtaactatgttccttctctgaaactggatattgtggttcgttctctcggatgttttatttgctattgatagagttcaatgaaaatgaagaaatagcagttgttatcttgttccagtactcgatcattctatgtaccttgttgtttctgttttaatttcgtaccaagtgttccagatttctggtttgtcgcagtctttagttttcaaggttggtactgatcagtgacacgttttgttgtttgtcttcttagtgttcatgttcgattcactatgggtgactttcgaaagacgttaacatgtcaacgaaatattttggtcaactatcaataaacatggtttggctaacgaaatcatacaataactatgaaatcaatgtaatttggaaggtgatcactagtaactgcaaatagaaacgaatcaaactattatgatgatgatcctgatgctgccatctgacattgtgaatgattttgcatgtcctgttctgtttgtggcgttagatcgagccagagaggcaaaatccatacgcataagcgttttgatgatttcatataaaacgtggcatgtgcaatagatgtggtcgttacacgaatataaacccaatcctgccgacctaactaatctcggtgggtattcatatactacctgtgtgggcaaagcatataaaggttctacttgggcaatcattatcgatgctcgtaaattcatgcgtctaatcattttgattatgaaccatccacatcatgtcacgtgtctaaactcttcggtcacttttgagctttttatcaaattcaacccgccacaataaaaagcggcagaactaacattccggctccacgtggcatacatcgaagcgtttatctattaggtggcacaggcggctcgagatgacgttcttgtggactccattagagaaaatgacagaattaagtgggcattagcataagttgataactatgaggtgctttttaaaaagaaaactaacagctgcgattctgttcttttttgccgta

SEQ ID NO: 27057 - DNA, 813 bp, Arabidopsis thaliana landsberg
aaacgaactcctgcaaacgacacaaatatttcctgattaaaaactcaaatcttgaaacagaaggaacctaaaggataatatcaaatggtaaaaaaaaaagtgaaaagtgagctcaccgttgcaacctcccctcttctgagaatgcataacagaaaaagcatgaactggtgccagtgttgccatgtcctgattcaaaaacggtacctgttagcaattgcaacaacttttatgagaaacagagagatcagcacaaatctaagaaaaccctaaaaacgatttgatataagctaagtagctaaccagacaaagaagaaccctaaagagattaagaaatttccacacgaaaagttaacatctttgaataccaaatcgatgaaaaccatcttaaaacaagaaattcagatcgttcgaaacagaaaattactccgcaagaaatataacgcaaaccctaattttccgtgtgatcatataaacagacccaaaaccaaaagttccatagaaaaaatagcagaaaaataaagggagaattatatcaaagaacatataaaaattctgaactaatcatatgattaccttatcgaagattcagagaaaatcgtttatcagatcttgagaaatttgatcgtcgacgaattatcaaaactcagtaagagaagaacaagagatcagcggtggcgaaaactagagattagcgatgaacagtaatcttattagcgatataaatagggcttatttactttttattttgtttcctttttctaaaccttttccaattaatttatgttggctgacgtgtcgctgattaaaccaatc

SEQ ID NO: 27058 - DNA, 4828 bp, Arabidopsis thaliana landsberg
ggtattaataaaataagttcttttatggtgattgagtcttctcgctgaaaatttggtattttattgttgttatgggacaggaagcttctatagatattaagctaccgagaagaagtttgcaagtgaaatttacttgcaattcatgtggagaaagaactaagcggcttatcaataggcatgcctatgaaaagggccttgtctttgttcaagtaagtctttgattctgtttcccttgcgcataccacatgtttgcttgattgtccaagagagatgatttggttgattgattgctcttttttttttcctttggcagtgtgcagggtgtctaaagcatcataaactggttgacaatcttggtctcattgttgagtatgatttccgggaaacctccaaggatttgggtaccgatcacgtttgattagctacgttgaatcaagttttgttcttttttctcagatgtgttcttttatgaaatgagaagaagtaagctatattccgcaaagaatacaaaagaatgtattatttttgaatcaatgtgttggtatacatgggaaaaaatgcagctgttcgagtcgatacatctgtgatattatgagagggagagaagttttaggctgtcatagcaagtagaaagaggattactagtccagtattgagccacattgctgctcttcctttaagctgatttaaggcatttcctccattctgtaaaccagaaaaataaaagaaggttagaatcatataagcatggcagtgattggggagattgttgtttagtattgaattgttaccgtgtttggtgatggtgctggagccgtgtcctgtggatctgttagaactggaggagatggagggcttgagggaattggtgctggagctggggcatggtgatgccttttgtgtttgtgctttctcttgtgcttggtaggagccggtgctggagctggtggtaaacttattggtgatggcgcttgttctgggggtggggaaactggtgcaggtggcggtgaagctggtgcaggaggtggagaagctggtgcaggtggtggtgaagctggtgcgggtgggggagacgtcggtgctggtggtggtgatacaggtggtggtgagacggttggagctgaagcgggcgggctttgtggtggttgtggaggcggagttgcggggctgattactggtgcaacttttggagctggtggtgaagttggagtaactgctggtggaggtgtaaccggagatgctggtgtctgcgcagctgaaacgggtggagtagtggtagttggaggcggagcagcagtggttggaggaggagcagcagttgttggaggcggagcagtggttgtggaggttactggtgaagcagcaggtccttgtgcatttacactaaaggaagagatgagagcagaagccaaaagaagagaccaaatgattgaatttgaatccattgtgttgtggaggaagctacaagaaacaattggtaaagtattgtgcatataaaaagctgtgagatattgagatctcttcaagtatgaatgaaaaagtttggtgcaacgatgagttaggtggtttaagagatccagtcttcatcagaatgctacgttgcttctaattccaggccattagtacgtacttatcaaataactgacccaaataataatcagcgcttttaataaaacgtgttaatcatcaactaaatggggccaatacttccttcggacctaaaactggtaaagagtctagatcactatcaagagaggtttggttataaacaaaaatttaaagcaaaacatgtgttcatatgaaattatgcgtacgctacaatcaatggcattacaatgaaccaacctgttattcattttttaacaaatgacaatggacagaaaaaaatatacaattttgaacagatcagatgcaaaagttgttctacagacagaaaaagggtaagacttgatgcatcttgttgaggagtttgggaagatgatgatgatgatgatcggtaggagtaggtggatctgagttcttgtctttcttttttctcctaagctggaaaaactgctggattgtctgagcgcattctgattaagaactccgcgccggattgtcatcttaggatggaatggatgaactggaggtggtggcttttctgaagcctctgatccatttccttcgcctccagggaacagcctgaaaaaacatcatttgtttcaggattttgactctacaatgttccagaacatttttcagtttctgaagttatcggtacctgatccagcttccatctgctccgagaagcttattgggagcaccccatacaagagtgttgacccttgcttgaagtattgctcccgcacacattgggcacggttctagtgttacatagagcgttgtatcctgttgggagaataagcaagttattgcaaatagtttccctgactaatgatcatttcatttaactttcccaaacaattaatcatcagcaccccaaaacgtaatttttttttgttgtactcatatattgttcctgctattgcaatgtaacaaaaaaatgtatatttgacccaacagaggtgttttagagagagaaagagagaagattaccgcgagcctccatgaacgaagtgctttagaaccctctcgaatgcaaatcatttctgcatgggcagttgaatcacgaagctcctctactctgaaacacaaaactatggttagatgaatccagcgggggaaggggtcaaagtaaattaaacttacaggttataaccacgggcaataatctttccatcatgaacaagcacagcaccgacaggtacctcccatgtatcagcagccttcttagcttcaactaacgcttccctcatgaatatttcatcaactgttcgtctttcagcttctaccttgtatgcttcttcccactcctcaaaactatccctcacaacctgtttattcctctgaagtttcctttgtatcaacgcagagtctgcggatacagaacctgtttcttcctgggacttcgcacttagaggttgttgttgttcaacctgctctcttaagctgctactgccggataccattctgggacggggtactggaggttccattacagcaggagaccgtaggtttctacctggaaataataacggattttgacctgcatccattctagggtagcgtcttccttcccccacagtaaaattttgatcactggatgcctcagtaagactagattctgaagattccttaataggaggagatcttatcaggttccgactaggcagtttcattggaacctctgtcaaagctgtttcaggaagacggaactcaaagtttccaccttcttcttcatccacaccaacaatttgattaccagatgtggaagacatgcgattcgatactgagccaccctctaatattgtggaagatggcgatgataccacaccttcatgccgttcagatcgctgcttcagttttgtagtgccgggatattcagattggcttctaggagaagtttgaccaacctccacctgatgtagggaaggagcttcttgtggcaaaactttatccccttttgtgttatcatcactgcttccgtcatgctcacgtccagaaaaccatgttgcactgctaactgattcgttgggtgaactccttccagcgggctttgcacttgagtcagggcttccagctcgggagccccacctaagccgagcaatatcagctataacattccacaacgacctaccatttcttttaaaaatagcattccccactgctgcattgccttctgtggctcctggatgaggagttccctgagcagaatccgttacccacatttcatctgaaggtccctttgctcctgaaccaccagatgatcgccttgagtcccgcctcttcaattgattgctttcagctctttgctcctcagtctcgggatttattactccatgtttggcctttttcacaaactccccaacatatttctctgatgcctgttccaaccgatgagcagaacccatagcatcttcatgtgacgtaaatcccatcagttctccagcagactgactattaacagaagctcctgctcttggatgttcaaaggctgtgggataaccactttctgaagttccatgggaaatttcttgaatggaaactccaccagttctgtagctttgtcctgatcttctgcttaccagctgagaagaaggaggaatcagtgtcgtttcagatccttgcatttcctctgaaaccagatctaccagttgtaatttagttcgtgaggccatcaaagatgattgtgaacttgaggcctcttcagatagctttgactgataactttgcaaccctaaggtcgtttgaccatcttttttcgagttagcatgatctaacctagagtcttctttccgagcaccacttttttctactttgctgtccgattgcacagtcgtagtacttccttgaccaatcagcctcttctcagattttctctgaatttctgtataccttactgcatcactagtatgagatacagacacagaagttctgtcagattgcgtcgtttgcaagggattatgttcaatatgataatcttgctgcttcctttcagattgcaaaccagaaaccaagccagcatgtacttcttggtttctaatctggtcttctctttgagagacatatgtatttctgatgtctatgtcatgaatttctgaactttcagaaatatgttcagtagtccttctcgtaccagcttgcttagatatcctttcttccactagaggttgctgattatttgtcacctccggaaaattttgagcacatttatccttcctccggc

SEQ ID NO: 27059 - DNA, 437 bp, Arabidopsis thaliana landsberg
tgctggagcttttgctttccctgcagcatcaagctgatgtatgaatttataagcttcgtcaagaaatcctttccttccaagcatatctaccatacaaacatgatgttccactcctgggatcaatctatagctcttggtcattctcttgtaaactgaacgttctttcttaacgaagtcagcatgagcgcaagccgataaaacagctacaaatgttacgttatttgggattggaccgcaatcatcctccattttattaaacagctctacagcttgttggccatatccatgagtaccataagcagagatcattgccgtccaagcagccacattagcattccttcatcttgtcaaagacttctcgggcttttccaacgtcaccgcacctagaatacaagttaatcaacgcagtaccaagtttaacattcacgtcaagaccc

SEQ ID NO: 27060 - DNA, 1309 bp, Arabidopsis thaliana landsberg
tcattccgttgaaacattcagaaatctgcagcaaggaattgcacatctcaagcaaagcgtggctcacttgactgtgtacggatacaggtccctgtctctggaagttccttccggaacctcgacttttgaaacatttgcaaagttgctggctacattatcttcactcaaggaggttcagtctggtctttcccttgggctgtcaaggtaaagcggcagattacattgtttcatatgactatacagcttgagactgacatatacagagaaaaaaaagttagattacctgtccactatagctttgtatccgaatttagacacttcatactttcacctctgacgtttacagttccaacaagcaaagacacgagccgaacaaatccgtgtggaatttgaactcctcaagttccagcaccttgcttaacagttctcatactcagccaacaacggtatgacttttagttagttctcactagagttatggagtatatactccaaatgaagtcctgatcttaaccctactggcttgcagtggaacagtagctattataatgttccgaatcgagatccaagctacatggtggagtttcctgatgttaaaaaggataaaaactctatcggtgaatggaatttggttgagtatactcattcttcacgtcaacctaatcatcccaacaagtattgatcctttcaaggtaaacaagttctacttttctttaattcctatcgacacgtttattttaatacccgtgattcacgaaaacaggacaatacattttggcaggaacccagattgtcgatatgtcatttgttcatacccaaggcatcctcaattctagtgataccttagaaaaaccacatatggagctttattatttaaatctttgataccttcttctgtaattatgaaacacagataattatgtaaattagcaggcaatggagtaaatatggtgacattatgagtcactgatctgcctaatggagtttgatgatacaacaatgaaggaaggtcatgtgcacttgtgtgacgtgagaatatcctccggcttgtttggtctttaaaaggaaaggacaccacaataacaattatcaattagaaaacaaaaaatactccttttattcttagtcaccaaacaaataaaatcagctccttttttcataccacacaatgggaacaaaagcaatgataaaagaagcccatcaccttcctttgcttttaaattattcataatttatgaaagaaacaaaaaaaattattatttttatttttgcttctcttccggtaagtcaaaggagataatattaagag

SEQ ID NO: 27061 - DNA, 1803 bp, Arabidopsis thaliana landsberg
attgaattgatgtgtttattattctctctatctcatatcaattgatgtttaaggttgttacacataaactattttttttttttgtttttaaaattaaaacatcatttataatttattttaaaacattttaactagtagaaaaacaatctaccaaatgcaaatgatcaattttttggaaatgcaaatgatcaattttttggaaatgcaaatgatcaatctaccaaatgcaaatgatcaatgtaagttccttcttcttcttttcatctaatatcatcaaatacttaaaaacctattaaaactcaagtaatataaaaatatacaattaaacacatctccctgaagtccaattagtgtcagtaaaaaactttcaaagttagttgttttgcttatagacccattaaacaactttctgtttctatttgggggtataaaacaagtttaagtgtaagccctagtaaaaaggaagatccaccaaaaatggaggaaccaaagaacaagcccttgcctttggggttgaatattatctatcttacttcccaaaatctgaaatttatttggtcacatttcttgatcttttgatgagataactacatctactacaaagaagtttccttttgtgtgtttctcaaagttagacataagaaaacgtgtagatcaagcaagtgactatgagtcacaaagtctccaaaaagttagacgaggagcaaatcaatgagctccgggagattttccggtcatttgatcggaacaaagacggaagcttaactcagctcgagctcggtcacttctccgagcactagggataaaccaagtccagaccaattcgaaacgctaatagacaaagccgacactaaaagcaacggactcgtagagttcccggagttcgtagctttggtctctccggagcttctttcgccggcgaagaggacaactccttacacggaggagcagcttctccgattgtttaggatattcgacacggatggcaacgggtttatcactgcggcggaattggctcactctatggctaagcttggccacgccttgacggtggcggaattgacggggatgataaaggaggcggatagcgatggcgatggccggattaacttccaggagttcgcaaaggctattaactctgctgcatttgatgatatatggggttgagtctttttcactggactcttccttaattttcccttaacttttttttagttactatgtttagttttcactattctacaagaaattatgtactcaaattcaaaataattacttctcaagttgaaattcgggttctttttgttcattttagattcttgataacagttttggttattgatctcttacttgtggcgatttcatatgttatactagtaatgataatgatgtatagtaatgatctctcaaagtatatgaaactttattcaagcgttagaaagaaaaagacattgtcatgtttactacatagttgcttcaggatctatcaacaatcacattaatttctgcaattaaaagttaaaaaaagaaaagagagaggctcaattatgtcagagaaagatgggacttagctgcatcatctttcatctttgtgccatccactgcaaaatgtctttcctgactacaccattgaacccgccacctgtaacatagctcggttgaatcagacttgcggctagaccgccactgtagtaatgtctgtactgagtcgtagttccattgggtctcggcggttggatcatcatagagacagacgggaatggcttgtgccggaagtgtttcaacgaggtaaacaaatgggga

SEQ ID NO: 27062 - DNA, 1356 bp, Arabidopsis thaliana landsberg
gcttcgctcacccggcttggacagtgagttggcctcccattaactcaacctgtaaacaaacagagatagattaggataacgagcttcattagtttcttctgtagtgttgtaaaatcctaataatagcttaccagctgtttacaaatagcaagtccgagaccagtcccaccgtattttcgggcatgatcagcgcttgcttgcatgtacttcttgaacaaacatggaagagcgttttctgcacaagaacaccaaaacatgaaccaggttaatatataggttagttggagttttttagtcttttcatgttcatttgtcagaattgcttgcttgcctgggattccaattccagtgtcccatacgtcacagcaaatccaaactgaagtctcggtcaaaccgttttgttcgtgttcctcggtgtctgcgttcaatgcgttatcccgcacaaaggatggttctgatatcacttggagtttgattcctacatttccttcatgtgtaaacttgatagcattgctgcaaaacgtttgaacaaatcaggaaccaaaacttgtcattatgcaaataatacaggaatcaggtaaagaaccttatcaaattggtgaggatctgcctaatccttagaacatctccaactacctaaacatttaaaggaaaaaaagttaagatcacaaagacttttgccacatttaactctttctgaaatgtgtagtaacctcaataggaacatcatctgcaatgtttccttctaatgtcaaagatttcttcagcgatgctgcagctgtctgtagcacatgcttcactacttctcttggtcgaaactttgtagcttctaatctcatcacacctaaaaagaacacacaaataccaaaaaataacatatgtaatcgaggatttgaacaatgaccacaccacaagatcaaaaactttgaaaacagtatattgtacctgattcaaccttggagagatcaagaatgtcgttgattagctgaagcaccaaatcaccagaagagatcatgacattcaacaactgtctttgctctttatccagttttgtagttgaaagtatctcagccattcccactactcctgacaatggtgaccttatctcatgagacatcgtcgctagcatctgctttgctctcattgtctcctctgcaaaagaaaaaacacaacacctaagtctagttttctcattaatctttctaaaactttcagtgcttaacttgaacaaacctgtaatgtgaatagtcttgttcagttctgattccatcgcctttctcacagagttatcttctctaagtttcgccattttctcccttttcactacctgtaacacaggaagatccagtgaagatg

SEQ ID NO: 27063 - DNA, 1079 bp, Arabidopsis thaliana landsberg
tatcttcaatcatatggttttaacttctattacaaggaatttcggtttagtttggttaagaggattgatcttgcctatgagagcgaccatgtcttcaaccgagagaccttgagaatagaacttagcaatgatgctgattaaaccctcttctggagttggaaggtttgttgtggcaagctcgtagcttgcggtttttgaatcttttcttcccacaggaacatcccagtaaggcccacccaccttcaaacacaaacacaaatcaaaattttatttcatttcataattcatacgatacttacaatatacagtatttatattgagatttgagagagtatatgtttcgtttgtgtatatcttaccaggattgtagcatctctagcaccaattgtgagaagatcagcgcatgaaacaactccaggacattcggattcgattatgttcttgattctgtcgacaattttgtatcctttcaatgaatttatgttgggagaagctttcttctctccctgtagagtttctgtctcgtctagcaacaccgatccatcacatccctgtaagtatttgatagcagtaaaagtttgacatatcagttatgaattttctctggcggatgatgtcttgtgtttcaagaaaggtgtggatgtgtacttacttggacaaagcagtcgtggaagtgaagacgaataattatggctgcatttctaggatcttccttcactatgcattccatttctttcttgatgacgtcaaatacggttggacaagtagacttgtaatagtctagggttaaaggaagatccttccccggtatatcaaaggaaaagcatgggataaagatggtgtgaaccatgaagaatacaaagaggagtctcatcatatttaatttcttctatcggaaaactttttgatccaaattttgggaaaatatgtgtgttgagataggagttagagaagatggttgagacttcccagagatatataattttttgagaagagggcattgtagagtttttagttttcttgtgaaacaaaggtcttgagaagtaggtcaagtgagatgcaactaattttgtagatgg

SEQ ID NO: 27064 - DNA, 1840 bp, Arabidopsis thaliana landsberg
  unsure (1)..(1840): unsure at all n locations
tatcctcccatgctagctcgagaatcagcagctacctcaacttcttccttaaagataaacgcaagtgtagggggagggtttgcaagcttcaccatctccacagcttttttctgaaacccatcaaactaaaaaaccaacaacaaacaaaagcaacatatcacaatcaaataaaagcaaaatcaaagtatattggaatccgaaagaactctaatttcgtaactaaaactcacatcggtggtacgaggaacatcaaacgaaggtgcagacgaaaacccatcaagcatctcactgttcgatccaaagccaatcacaggcatagttgtctccaatccactagtgtcaagcttcattgtcaaatttctacagaatcatcgaatacccacaattattcaataaaattatgcaaaatcatgaagcttgagaggtacccaaatcagggtattaacaaaaagagcttcctttcacaattcaaatcggatctagcacgagattacttttgtacgtgtgtgtataaaccataaaccctaatacttcattgtaaagtcaaagtaacgacaattaggggcctgagacatacctgaagagcgaaatcgagtaganaattaacgaagcagaagaatgtgtgagaattggagaaaaaagaagcaaattatggagggatgtttcttgagctctgggcaaaccgaatgcgaacggggcaagatatgggcgatcgggtcgggttgaatcatttcgggtcataccgcttaagtttaaagacagaacagtgttcattatgttgggcttcatgggccattattggccttttcttctttttttttttttttttaatttccttggttatatgaatattaggtatataactttttattaatcatttgttattcaaataaatttagtaagacaagtcaaaatatttggatcaaatttatcaggtattattcgtttattattttattttattagttggaataaagtgttattttaatcaaatttttatggattttacattggactttaacagattttaaaatgtttatggttaaacatacaagagaaattgcctcatatagcaccatatcaagatttttggttcatatctaaaagttaaaaaaattaatgttaatgtttggttttaaaatcaacaaggcattccaaatcctatgtgcattcaaaattaataaacacctccttaaccttaaatattagatagttatcactctttccgtgtgaaatttataaagttaaaagtcttaaaacatttctcttaagtttggaacattctagtttacagggactggcgacgcaattaaaaaatgattaaacaattaacgattcttgtagacttgtaataccaataaatacagaagattaattatttctaacagtggcaaaaaaaggtaaaagaaaaaaaatgagcaaacgcaattgcaaaatcgctagcgtttggtattgcatcttctagctcgcatagctcctaaaggaggaccattcaatgaaacgctgcaatgagtatgcaacttataagagtacctaaacaatggtcctatatgcgaacgtgcatgaaacgttcctctcaggttcaacaaaaccggacctgtttcaatctgacgctgcagctcccggctctgctgttgcctgaagctggacctgactgctcacaagatgaacattcgcaaacattgacgttttcttaggaaccttgaaaggttcaatgtattgagttgctatgagtgtgttgtaatagtaagctcgaatgtcacatagctaaactccacactacttttcttgcttggatttgtgacgtttgctaaaatgagttagatcgccgtttagaaga

SEQ ID NO: 27065 - DNA, 1020 bp, Arabidopsis thaliana landsberg
ggggagaagaagaagaaggtgattatgaagagtactctactgagttaggcataatgtcttcactaatttgtatgttaatttccaaaggacaatatgagttcttatacattttctgagtctctctcattcataacttcaaatatgttctaggagttgttataatgagaaaactcttttgtttcaaaatgcattaaaaaaaaagtcctggtctttagacgcttttggtgagcgttactgccttgacaccggcgtctgagaattggcaaaactgatccacgcaacaacgtaactggctaagatgacccatccgaacacatcatacttgaactcactggtctttttctgcttcatcgtctgtgagaaagaacaaacgtgttaaattttcatcaaaccaaattgtagtttcgaataaaagaaacaaccttggcactgttagatgacggtccagcggtgccgcctgtatgtagttctggagcctgcagtttcacacagagagaaggagaataggtctcacgaacaaaaatcaaagattcataaccattgcttcactgaacaatgagtttattctacactaaaaaagcttcatatctaggcataaaggtatgattcagatacatttttctccgtctatgagtgattatatatatatccatcaaaccaaaccacctcgcagttcctattgctaagacaactagataagcctctacaacacgtagatctcagtttcttaaaccagaaccaaaagatgaaacatgacaaatttgaggaaactttaacaataaagatgtaccttggaagccaattccagtgatctcgcatagtgatcgttctccggttgctgcgtaaatatacatctcaaattacaaaacaccacgcacaaaaaacaaataacaatcactttgattaggtgaggattacaaaagaaagaaactaattacctcctccaaagcttgttgaaaaagccaagtaactttctaaagtgatctctagcctagtttgatcggagtaaaaccccatatg

SEQ ID NO: 27066 - DNA, 1692 bp, Arabidopsis thaliana landsberg
  unsure (1)..(1692): unsure at all n locations
ttttctacataaatattatatttcctgatattttatattatttgattttccaattgaaatgatgtcaaaaaaggaaaggaaaagtaggggaattaaataaatacatacagtgataatcgaagtaccaaatctaactgttttaaaacaaagtagattcattttaaaaaattaaatatttgatttttcaaagagataaatgaataaatctagtacaaattttgttgcaaaaaaagaagatgaagaatatgagaaagagcgacacgtgacaaaggtggacattgaacgtgagccacaagattttccatctgtttctcgagcgttccatggaaaaccaataagaattattattactattattttaaaaaattgggaaaaagcgcacatagcagaagctgacgtggcatcaccctcctttttgtcttccctattttctcacccccctaattcccttcttcctccttcacagaccccaaactcttctcttctctttctctctgttttcttcttcttccgccgaatcagaaagcttgtctttttctttactccggctatcaaaagttctcggagtttctctgagattctcatttccgaccttcttcgtatctttctctgcggcaagatttgcagctagagttttttttctgttttccttctaacgaatccaaaaatctccggtttgctggaattgtttttccctaaaggtggaagctttatgctggttctgatttcagaagcaaaccgtttgttgttgtctaactaaagcagagataaatcgaatcactttatgggatctatagaaacagaaggagaacagaggaaattaagctgatttttcaagtctagattcgcgaatttatcttggtgtttccttttctgtgttccacacctttcgagtttttttttgttttcctccgccgagatcttaatccgggaagttatggcgtcgtctccgttgactgcaaatgttcaagtctggtctcaaaatttgatttttatccactttttttgttttgtttctgctttattcagatgtgctaatgaatctatgagttaaaatactgtatacggacatttaagtaataaagcttagagttaaagcaagttcgttgcaattcattttcagactcttgtttcttttgagctataagttctctctagatttgtgtgttgcaactacattcatttgaatccttgagatggagtcgactgtgttgaaattttgtgattaggatatgtaaatcgagtttaattagttggattttgtgaatgaatgttcattgagaaactgaagaagaaagtaaataatccaatgccactttgtgtcatagtccttaaaatgatgtttcctaaagtcgttttgcttgatgatggctttagggtaccaacgcttctttgaggaatagagatgaagaaactgcagacaagcagatacaattcaatgaccaaagttttgggggaaatgactatgcacccaaggtttgtttcttttaacatcaaatgtcaaatattgttatgtaaagtgaagatctgtggctcagttcatcttttcttacttaggtacggaagccatacacgataacaaaagagagagagagatggacagatgaagagccangaagtttgttgaagccttgaaattatacgggcgagcttggagacgaatagaaggtaattaatgatttagtaatatct

SEQ ID NO: 27067 - DNA, 1671 bp, Arabidopsis thaliana landsberg
ttcatcctgggaccaaacattggacaccaatatgcatcgccaccaccaccgatgttcccaggctactgaaccatacatttttaatattttacattttggtccaacatttttccggttaacgcaatttgtaacaaacaaaaaaaaagatacatttataatttgaccatttgtaatctgtaagtagatgatttttagaagtgaatattttcaaaattaaccattaacttatctgtaattctaagttttatacggttatggggtaaattcatcacattctttgtgtctacttctctcaaaaattgtcttttacaaaaataaaaaaaaaattgttcaatgttcaaagtataaatatccattcatattttcgcactgtttttaatatcaacagaaattttcaactttattttgacatcttataaaaatccttaattgagaattgaaatattttagtttatttagtggtcaacgtcaacgtgacttagatcgttgatttatttttcgttttccttaagcaaaaacctatacttttatttctggtctttattggcaactatcacattttcaactttcaatatttcgactcatcaatcaccatcttcgaatagatattttctttgcccgatgggctgatcggaacaatcctctgaaaaaggtaccaaaatgctactatgtagactaacatcaatacttagatgttggactactttaacctaagcttaaaatattttccgactagttaaccaaatcgtttgttcatatcatggtcaagtaaccaaatcgtttgttaatacttaatatcatggtcaaataggttaatatccaaaacgattccttagtttggaatagaagtacagtaataggtaatagctaaactccatctatgttcaagattaaaataagaatagtgttcagctaataaacaaatattgatgatttagttcaactttcaatattgatttagtttctatggtcttattcctaatacaaacttcgactgtaattttactatattttcaataggtgtttttttttttaataagagtgttaattacttcatgacccgaccccgacagatcctctgaccggcttaattattattactcgttttaaaaatcattcaacgaggaaaagtctcggtactttgagcggtcgtcgaagaaaacgttgtagttttagtatcttatatcattaacaaaaacatatgcatataaaaacaaaacaaaatcgatttatgtatcctaataatatattacttaaaaaaagtagtggtgtatataattagcacattttcgttgtagatatccatccaaagtccaaacacagcataaaagtagctctattgactttttttcttcctccaaactctttttacgtcaagcaatggaggatcttgatccaacctacatccaagcaccagagcatagatcagattcgaatttcatccctaaccaaccagaagaaatacccgtgattgatctctcgcgcctcgatgaccccgaagatgtccaaaacgttatctcagagatcggtgatgcttgtgaaaaatggggattttttcaggtgcttaatcatggtgtgccttctgacgcaaggcaacgtgtggagaagactgtgaagatgtttttcgatttgcctatggaagagaagataaaggtgaagagagacgatgtg

SEQ ID NO: 27068 - DNA, 804 bp, Arabidopsis thaliana landsberg
attttttgcttatttctttttgtcgatggtatttacttcagtgtgggaaaaaaaatttcaatttaagctatgaatgatttgttagttgatatgccaccaattcttcccatttcgtttgcaagttctctataaatttggtatcttatattggaatatatattctaccataagactacatgattgatatgaatcgtcaattgttacttatctatcggtctcaatccactctaagttttagggaattcggaactcaaatttggttagaatacatatacagagaatgacgactggtagagtatatagcatatacatgtacgcgatcgcaaatttctattataatctttaattagataagtagaatatatgtactattattttcttttcttaggataatttttataacttttacaaacttaaattaaaatgatttcttagagtaattgacaataacaaaccaagaaagtcaaaagagaaaaagaagaacctcaaagtcttttgtgcatgtgtgtgttagtgtcatgcatgcactctatatatttatgacttgcaaaaagaaacatatatgtttctaatgaataattctttcctttcttgataaaataatcaataattccttatataaataataccccaactgtagaaaggaaaatacctataaattagttgaatacatataacctaatattaaaattacgtgaccatactaattcttgtccaaaatatatgattcctaccaaccctaattgtcatttctatatatattatataccaaaaaaacatatttaacaaagggataatataacc

SEQ ID NO: 27069 - DNA, 1143 bp, Arabidopsis thaliana landsberg
  unsure (1)..(1143): unsure at all n locations
ccttcatcatctttatacgtttgatcttggtagagagtttatagggacaaacaagtatgattctgagttagtatagttagtgttagtgaaacctcttaaactgaatagtacacaaaaagttgcttttatgaagatcaaatcacaacccttgttctgttttggatctctggtttatacagttgtagagaccataaagctcataaagctgcatattgatagcctaaacatgattgagttatagtagttgcctcttaatttaggtgcatattgatggcctaataagagaagtattgtgtttgtttcacagaccttgtacaatgtcaaagtgaggaggatggtggtgatgggactgccacctattggctgtgcaccatactacatgtggaaatacagaagccagtacttagaatgtgcagatgaagtgaacagcatgatcatggaatccaactttgtcatgagatacactgtagataaactcaaccgtgagcttccaggcgcatccattatctactgcgacgtgttccaaagcgccatggatattctcaggaaccaccaacactacggtaagcaccacttccatgtcaattctccattcacaaaaaggcctgtgactggtaacaacatagcattatagcagtatcttggaacacgaacagagacttctaagagtgatatatagagttttctgatcatcttcaagtgtgaaagtaacttgtcaagagtcttgttgaatcttagttgtgtgtgttttgtggtgtggacaggttttaatgagacgacagatgcgtgttgtgggctagggaggtacaaaggatggcttccatgcatctcgccggagatggcttgctctgacgcctccggtcatctatggtgggaccagtttcatcctacagacgccgttaacgccattctagccgacaatgtatggaatggtcgccacgtggacatgtgttaccctactaacctagaaactatgcttcattcttaaatcagctgagaggataaaaatgtacataaaaaacatagtaagtgtaaatgaactttgcaattttgatgtttggcctatggtacataaaggagaactatgggtcttcttagctanagaaagaaagtacagggttagagaagaaaaaggataatgtt

SEQ ID NO: 27070 - DNA, 984 bp, Arabidopsis thaliana landsberg
acttataagggatatgaccaagattggtactctctggtcaatcctactgacatattgtgtaaggacaaagttgtgtaatgacatcagaagcaggtaaatgaatattagatgtaaccgtttgtcgaggtggagatttgttgattatttcaaccaaagactcaagaagcttagagagtgaagctttggttatggaggttttagctaagttagtgtaaacgtcattaagttatgttttctttatagtaaaacaggctaaaacaatataaaatacaaattacagtactctgttatgtttttttttttttttttatcaatttccaagatacttcctacacggggaaacaacttttagaatctttctcccataaataaagttccttgcgaaacacgtcgttggactaccgaggtccaatggccgaataggttacttctgccacagtccaagattcttcgtttcgcttctttcgtgacgaggaggaaccagtctcaagttgacttttacggactaaataaccaggcggtccaggcggagcgatctctattgtgtcgcttgcgaacatgacagagattgatagcatcgtgggcctatcctcagcacattcttgaacacacaagagaccaatctgtatgtatcttttaacttggtgttgttgaaatgttgatgaatcaaggataatttgatctatgatttcgagccctttaccttccttccaattcctccatatctattcatcataaacaaagctttaagcgtttatatcaatcacagtaaaaaatattaaaaaaagacgaaaatgctttggatgattattacacttacatatgtaataagactttcgtcgttctccgagtatctataaaagtctctgtttttaaccccaaatataatctctagaagcaagaccccaaagctgaaaacatccgacttcatcgagaatatcccgtccattgcatattctggagacatgtagccgctgcataaca

SEQ ID NO: 27071 - DNA, 1471 bp, Arabidopsis thaliana landsberg
  unsure (1)..(1471): unsure at all n locations
tcagaacgctgcgaattggaaagcccgtcgatatttgatcttgccacttctgctcccactgcaataattgccacaggacctgctactttacttgctgtctgagagaagttaaagaatgtttgttttaaaccgtccaaaacattagaagatagccccataaactcccttcccacaaatctaaacgtttccggaatgttcctcggtctcaccttagtgattctaacatttggagacaactgaacaccgatcttccccgtcccatcaaagttcttatccggtgtaacccgaatatcgaaatcttcaccccctctttcgattctaaacaccacattactcttcgggtttcttttaacaatgtcaacaatcttcgaaacagcgtcaggcccggttttagacagctcagtaccgtccacagcgagaattacatcaccagaaagcaacccatcacgagaagcagcagaaaaggtcttaactccaggaacaagaacaccaggaaacgcttcttgtacaggtaaaccaacagataacacttgaacaaagattatagcataagccaagatcacattggcgataatttcagctgaaacaacaattgatctatctagagtgggtctgctcttaagaagattctcatcgtcaacagnnnnnnnnnnnnnnnnnnnnnnnnnnnnnnnnnnnacaaacccacctaaaggaaaagccctaagcgaatactcaacattgctgcaatcgaacttagctagaatcggaccaaacccaattgcgaatttactcacatggatcccttggagagaagccgaaggaaatgacctgattcatggacgacgatgatcgttgtgagaacagcaatagcttcaagaacagattcaaagcttcccaaatcaatcccagagatagctcttgatctaaaatcaaacctttctccatctgggtacctcttgtttccgaacaagactctgtttttgagactttggttggataaaggagtgaacttggggaaaaaatgagattttgagagatgggttttggatcgtcgagggaaataagagatggggttgttgaaattggagaggaagtgagggtttcgatgagagattggagaagaagaaatgtttaatagcattgtttcgtgagaagtggagattttggagtactacggtgaagtggtacgattggagccattgatgatagagaggaagataataatgagtaaacagagtcgtgatttggcttgttttgggtgtatgtggatgtgattcaattcaacacaacactaatctctttgcgagtatttttgaattattgtctatgggccttgttacatacaataatgtcagcatcgattttgttattgaactttagggcccaaatatatttttttgggtcaaacgagtagatttttttttgttttgtgttggtttaccagtagtgttgttatacggagatgtaagagtagaacaagtgtttgcaa

SEQ ID NO: 27072 - DNA, 1758 bp, Arabidopsis thaliana landsberg
acctttaagaaacatgttactaggttttccaatcctaggaagtagcttagtcttaagagcatcttctaatttctcagtgacaacccattcgttcactctttgtctttcgagtatgccgatgaaagttccttttgtccggtgcatagacattacgttttcaaacaagatccaaaaatattaccgaggtagaatgatctaggaaatgagataaaccattgtaaataacgatatataatatataattaggtgatatatttgtcgatcaaaatgaataaggaagtagtaactaaccttggtgtcgcaatgacaatgcagagagtgatcatagagggaatgtaaaaagttgaccaagctggaatgttgacttcgggaaagaagacacttgtaggaagaatgacacagtagaaaataaaagtgaagcagtggactatgatcttccgtaagaaaaagaagctgtagaccagatacaacttcttccaaatcgtcactctctgctcaaattaccaaatcaaattcgttagtaccaacattatattattacttaagatcatacaaaaaaaaacttaaattaaattggcatgcatcacaatggatgtttgtttctcataatggacaaaaaaaaaaagttggtgtgtcttagaatgaaataaattaagatagagaataaaagtgtctttcgttttgattggtcagatatatagaatgaataatagtagtagtgtaccttattgcgaataatttccatagtcatttttctgaagagattagctggaccgcatgaccatcgatgttgctggaatctgaatgccttaaattggcttggtagctcacttttcacctacaatcgcaatcatatatttttagaattaagaaaaatacgattaaaagtttgtttatttgatatccactcgtaaaaatacaaatcatattatatattgtcaaatgaaatcatgtgcaactgtgcataaagtgtgtgcaaagcaacaacaacacatgtgacgaatattaattaagatttggactggttttatacgatgtaaagatttggacacacatttattagttatagtccaaaagaattggaagtaccgaaacatcgttgacaaagacaaatttccagccgtgtagacctacacgaacggccaagtccatgtcctctacggtggtccggtctttccaaccaccagcttcttccatcgccgccagtctccatacacccgcagtccctgcgaacgtccaattatattgtttaaagtctaaactatattttagagtaacgtaccaaaatatatttgaaaggagagattttgaagattacaagatagatttgaatgtatatattttattgttattggaaaaacttactggataatcattatcaattggtttggatatttttattcaagaataaaagttagaaattgaagctacacataatataaaattagaggatctaagaaataaaatatgaagttttcgaccataggataaagtattttaataaatgttgataagggtgcatctaccattaaagccaaagaaggcatgtctagtggatccggattcttgctctgccgtgaaatggtaattgagggacatctcctgcatcctagtcatcaagcacttctttgcgttcactataccaagcaataggttttcttaaatcatatgactatgagtaaacaaataatttatctcaaaaccaattgacaataaattgaaagtgtattgtttgtatcaaccggaaaataggtatac

SEQ ID NO: 27073 - DNA, 2317 bp, Arabidopsis thaliana landsberg
tgcttttagaaggcccttggatgctggagaagggttttcatcatctgcgaaatcctgcgctcagtcatgcatatctaagtttgataaaggatgtgaaggtatcatgtattgttactattactgcctaaaatattctgatatagatagcatgttgaaagcgatatctgaactcaatgggaatctcaaaggaaatgttatgttgcagaggctgttattgaacaagcaaaatgggatacatctaaaactcgggaaaagcttgagcgtgatattgaagctcatatctcttctgtccgtactgcaaagttggctgaactgactactctgtatgaggtaaaatagaattctcaagcagctgaaagccatacatattggtctgaattatctaccatcaaacaggtgtaaactcatatctggacatttctaatagataattttcattgcagtcaaaactaaatgtagccttatctggaccggtggaagctcttctggatggggctaatgatgaaacatggccagcaataagaaagctacttagacgggaaggagaattggctgtctatggtctctccaacgcattatctggtttcgaaatggacgaagaaacacggagtaaaatgcttgctgatctcgagaactatgcacgaggtattgttgaaaccaaggcaaaggaagaggctggaagagcgatgatgcgcatgaaggataggtgtcaccattttacttgtctttcatcatttccttgtccgataacttccatctcttacagagctttctgattaaacaaacttctatccagatttgctacaatcttcagccatgattctgattcaatgccacgtgtttggactggaaaggaggacatcagagcaattacaaaaatggctcgttctgcggtatgagacctacctgatatagcaatatctcagcacctattctttgaatcaatcgcaaatttctcgagattttgatatgacccttgttctctttttcagtccttgaagctgctgtctgttatggctgttatacgcttggatgatgaactcgacaatattgagaagacattgacgctagctctgtttaattctacgggcaacaatgctactagcaagagcatcagcacaattgattcacttgcctcaagcacttgggagaaggtgactaaaaccttactcactgtatataatgaaaacacaaaaggtctcatatttagtactcacacctttgagatataaaagatccttactgttaccttgttattatcaggttgcaccagaaaagacgttgatcacacctgtgcagtgtaaatcactgtggaggcaatttaagaacgagacagaatataccgttacacaggccatttctgcacaggtaatctttgcaatccacactttcaagcatatcttccgtttgctcattcacatgagctgatgttaaaatttggcaatgctacaaaacgtttttgaatatctttttttggtcatgtcgtttctagcttcttgtctcctttctcatctgttctttaatcagctaacacccggaaaaataattgaggtttcaatctgaataaagtctccttggatttcaggaagctaaccgacggaataacaactggctgccacctccatgggcaatccttgccctggttgttcttggatttaatgaatttatgactctcttaaggtaccctccttgtccattcttttgaattgactcggcggctttttcatacaatcaagattccgtactcactttggctcttcgtgcctgcatctctcatggcagaaatcctctatggctcttagttctatttgtcggataccttgtatccaaagccttgtgggtgcaattaaatatttcaggagaattccaaaacggcgcggtatgagcacgatatccaacatccatatttttacttttgcccctgttcttcatttgatctcaattataatctcaccgaaatgccaatgtttcatctatgatcaacaacagctacctggacttctctctttgtcaaccaaattcattccaacggtcatgaacctcctcaaaaagctcgcggaagaaggacaagcaccacccacaaatagcaaccaatcaatgaactctacagctcaatccgaggttacaaccaatggagaaagcagcagcagcagtagctctggttcatctccagcaaaaaacgtacccattgatacaagtgcatagaacaaagaagtatacaagcttaagctgttgtgctagcccacgaagctagaaacttaaaattcgttaccctttcaaaaaggtagctctcagttttggtgttgatcagagagat

SEQ ID NO: 27074 - DNA, 1791 bp, Arabidopsis thaliana landsberg
tttatagactctcttcttctcttccttcaaaccactctctcacaaacactctcttcttcatactctcttatctctctctctttcctcaaccaccgtcatagataccggagaagacgaagaaacatgtatcttctctttctcttcttacttttccccaccgtcttctctctcaaccaagacggtttcattcttcaacaagtcaagctctcgttagacgacccagactcatatctctcttcctggaactccagcgatgcttctccttgtcggtggcccggcgtttcctgcgccggtgatttctcctccgtcactttcgtacacctctccagcgctaatctcgccggaccttttccttcagtcatttcgcctgttctctctaatgtggctcatctctctttgtacaataactccatcaactctactcttcctctcaacatcgctgcttgtaagagtcttcaaactctcgatctctctcagaatctactcaccggtgagcttccacaaactcttgccgatattccgactttggttcacttagatttgaccggtaacaacttttccggtgacattccggcgagtttcggcaaattcgaaaacctagaggttctttctcttgtttacaatctcttagacggtacgattcctccgtttctcggcaacatcagcacgttgaagatgctgaatctttcgtataacccctttagtccgagtcggatcccgccggagttcgggaacttgacgaatctcgaggttatgtggctcactgagtgtcatttagtcggacagatccctgactcgctgggtcaactcagtaaactcgttgatttagaccttgcgctcaacgaccttgtaggtcatattcctccttcgctcggtggtttgactaacgtcgttcagattgagctgtacaacaactcgttgaccggagagattccaccggagctcgggaatttgaaatcgttgagacttctcgacgcgtcgatgaatcagttaaccgggaaaataccggacgagctttgccgtgtgccgttggagagtttgaatctctacgagaacaatctagaaggtgagcttccggcgagtatagcgttatctccgaacttgtacgagattagaatattcggaaaccggttaaccggtggattaccaaaagacctcggtctaaactcgccgttgagatggttggatgtttcggaaaacgaattttccggcgacttaccggcggatctgtgtgcgaaaggagagctagaggagttgttgattatacacaattccttctccggcgttataccggagagtctcgccgattgcaggagcttgacacgtatccggttagcttataaccggttttccggttcagttcctacaggtttctggggattgcctcatgttaacttgcttgagctcgtcaacaactcgttctccggtgaaatttcgaagtccatctggaggtgcttcaaatctctcgctggtgattctctccaacaatgaattcaccggatctttgccggagtgaaagtgcgcccttcggacaatcttaatcagttgccggcaagtgggcacaagctcagtggctagtcgcctgatagcttgatgcgttttggagacttaggtcctctagagctcaatgctaatcagttttcaggagagttgacttctggaatcaagtcttggaagaagctcaacgagttaaacttagccgataacgaattcaccggtaaaattccagatgaaatcgggactttgtcagtattgaactatcttgatctgtctggtaacatgttctctggc

SEQ ID NO: 27075 - DNA, 1667 bp, Arabidopsis thaliana landsberg
  unsure (1)..(1667): unsure at all n locations
ttctcatcttttgcatatatgtagaggatgctgaaggttcagaaaaagagtgattaccgctaaagggcagattaaagatgaatgaaacaggttgatgatgtacaaaactagtactgccaatgcatatgttgagatcaatccagtgttagcaccaagaattcgactctcgtaatagcaccaagctttgacaaggatgatgctacgcttgaaaagatgatctctcccaaagagttggtcaacctgagaatacataaaaccagagtttaaccaacaactaagaatcaaagctaggcaataatctgtttagtaaacctctggagcctgattttgaatagctgatagtacctgctccagaaaacataaagcacagagacctgccgtttgattaaaagagatatcaacagcaatgttcctgatattgcattttatgaccttgacctatcatatatcagcaaactttcttaaggaaaatttgggcaaccaagaaaatacaaaaacgaaaccaaaaagtaaataaacaaagagacctgtgcagggataaactgaacatctgttgcatggaattcagattctctttcttcattctgaagcctactgcacaattgtccataaaaatcgtcatccatattttgcttagttaggacagtcagatcgatatccccgtccgggagataggtttttagtggcactgaaccaaatgaaaagacctgtagataaacaagttcccatagaaagttaacaaaacagcataaatctttaacatgtcagcaaagagaagcggagtttctaacctcaattccctcatgactcatgataagagttcgtacataatcaatgatctcattcctacttctgtnnnnnnnnnnnnnnnnnnggatagtgcaaagtatctcatgagctctctcctctgcaatcatccaagaatctgcatctatcggcaatgaatctcctttaggtagtgccgttgatagtgacaatgaggatgatgaagaagacgaagatgatgaaactgacaatctttcttgaatttcacccatgtgcgcataacttcaaactaacatcagagtgataacacaggaatcctcaacaactcaatgagccccttatataattatgatatctacaaacaacagaacaaacagaattacaaaatatttcaaattggcctttttgtcatcacattagacagagaaaaagaaaaaaatgaagtcaaggtaaaagttgattgtctaataactagagctcccaaatttgattaagaacaatcgaggctaatccagagagtgagtgagattacatcctaagcaagagacataaaaaaatgaaacagagcatgccaatagtgaattcagtgttaggtaggtaccctaatgtttagcttctcagagcaaaatcgaatatttataaaggaaaacaaaacaaaacagctaaactatcctgcgtgagtgatgattataccttaggaaaaaatgactattagctcagaagtctcagctctgtctcttccaaaatcatttttttttgttgacaaaattgaggtttaagtagtgaaaggcgtacctgcggttttagaccagtngttcagaagatctttgggctaatctatgaatattcaagaagcttaattcctgctaacaaacaaacaaaaaaaatcaaaacttggaaca

SEQ ID NO: 27076 - DNA, 1092 bp, Arabidopsis thaliana landsberg
gcataaaataaacatacttaaatttgtgtcttttcaagcagaccaattttgagaatccagtttatcggttacataaaagaaagtatgaaatacaaatttaactccaaatccaatcaagttaatattaccttgatcattacagggaaaccaatctcattggcgaccctgacagcttcttctgtactctgcaataagacaaaataaaacattcaaatcccaagacttctcttgacatgcaaaaacttgaaatactaaactgataatccaaaaaaatacctgcaatagcccatcactccctggtacagtgggaacccctgcatttttcattgtctctcttgcagtcgctttgtctcccataacacggatgctatcaggctacagatagaaaagacgaaataccgataaatcagatactgaaatcttccttctctccaacaaaagaaagctagggctgaactgagactaatgaagttctgcaaagtctataaagtctttgaagagatataagacacttacattaggtccaataaaattgatcccatggtctctacacatttcaacaaagagagcattctccgaaaggaaaccatatccaggatgaagcattgtacatccacggctaatagccgcagacagaacattcggaatcaccaaatacctacacacaaaaggaaaagaattcaacactagttcattctctacacaacaagatcaatcattttgttccacacttacgactggttactaggagcttcaccaatacaaacagcttcatcagctaatttaacatgaagagcatctttatctatagtagaatacacagcaacacaaggaatccccatttcatgagcagttctgataacacgaactgcaatttcacctcgattcgctacgagaatcttatcaccaccactgcatgtaacaccaagaccaccactagtagctctcttgagtttcttctggctaacctttagagtttgagttctttgtctagggaagttaactttgcttggcatcattaagttacatagtgaacttctgataacttctcctacttcctgacttccctaaggctaaagactttcttataac

SEQ ID NO: 27077 - DNA, 1728 bp, Arabidopsis thaliana landsberg
  unsure (1)..(1728): unsure at all n locations
ggttgccaagcgtaccctttttataaacattccaaataactatctccattctttggagttacccaatttcgacgttgaacacaaacccttgcttctctcttctctgtttctctctcgcagcgaaaaatcatggcgattagctccttcaagcatgaacatcctcttggttcgttttcgatttaaacctaatcgatcaatcttgttgatctttgtgtatctctctctcatcgtagggatttttttagcgactaggtttaaaaattctcaaaatctggttacgtctatttcaattgcttctgagtttgcatgaattgatccttgattctgatttccaacgatttcaattttgattgcgttaacagttataagaatccgcaaaattatatgttgaatgattttatcgccgattctgtattgtttcgtgaagtagtatgcataatctttgattgaaacaagttttgtgtttattgatgcaaatacattatgatctttattcaagtggagatgaatattgatgttgaagttactaagtttcacttgtctctcttgtgttccgtggtcgagtctctgttgttcacggggcgtagaatcgctatttcagtccctgtacataatctttgattgaaacatgttctgatttggtgctgcttttgctgaggaagcaaaatacattatagtctctgttcaagtggaatcctaagatattatcactgagtatgtgttgttcacgaggcttagaatcactattttagtccctggagcctggagtagtagtgtacataatctttgattgaaacatgttttgattttgttctacttttgctgaggaagcaaagtacattatagtctctgttcaagtggaatcctaagatattatcgctgagtctgtgttgttttacgtgggttagaggatgttgatgtgttgaaaattgatggatctgtgttttttttgctcttgaatgttacagaaaagagacaagctgaagcagcacgtatcagggagaagtatccagacagaataccagtatgaattttggctattttcatttaagaaaattgcatagctnnnnnnnnnnnnnnnnnnnnnnnnnnnnnnnnnnntgtcgaaagagccgagaagagtgatgtcccggatattgataggaaaaagtaagtccttacttctcttgaggagttggatataatctctttcttctcactgaaagtggcttcaagcccttttctgagaaccctacactccctcacatttagtaatgaattggttaattggatagaaataatttttttttattgaaagatctggaggaatttctggttttcatggtttgttgcttagggataatgaattggctgacttactattcaaaactttaggtacttggtcccagctgatttgactgttggccagtttgtttatgttgtacggaagcggatcaagctcagtcccgagaaagccatcttcatttttgtcaagaacattctaccaccaactggttagtttcaaacacgttccttaatcatatacttttccagttcaaggaatcatatctttttctcagttgagctaatagtagtagtgttatccttttattgcagcggcaataatgtctgcaatttatgaagagcacaaagacgaagacgggtttctatacatgagttacagtggtgagaacacgttcgggatcttcttctaatgcgcttggaatatgtggatgcatcagattatca

SEQ ID NO: 27078 - DNA, 956 bp, Arabidopsis thaliana landsberg
agaaaatttcagacatgatcatcaatcaatccccttgtttcatgaaagctccgttttttttttatgtttggtctgaatctcgtaagaaagtaaattttttcatttaatttttaaaagttttgatctttctaagccatagattgaatcttagctgttaaaatttaagaatatgtgtttggcacagaaatcataatgatatcaatcaatcaatcaatcattcccctgttttacggctgctctgtttcttcctttgaaataaagattcaatttttatgaagttaatcatatgacactgattcactaaaccttataaatttggtaattattattaacacaggtactacaacaatgcgtattacgcgaaagtgggaggaataagcacgaaggagatgaattttctagagctggatttcttattcgggttaggatttgaattaaacgtgacgccaaacacattcaacgcctacttctcttatcttcaaaaggaaatgactcttcttcaacctctctctctcgttgttgtcccatcatcaagatctctcattaccttcaacgacgatgaagcttctcatcagaaacaacaacaacaacaactcgctgtttgaatcacaacaaaatccaaaaaacaaatctaaatctttttctgtctctttatctttctttaaaaatgaattgtgtagttgtagatgatgtagagattagtcggcagggactcttatcttgtcttaatcaaatcctgattaagaataaataagaaaattcaaaatcaaccagtaagttcttgtctatctctttctctagatgtggacagatgggaaattaatctttacaggctggctggctaaagaatttaaatgtcattagttaaatggaaccaaatatatttttggttacttgttaaataaccaaatttgttatgattgcttatgttttgctctgtctgatattcaaatgtt

SEQ ID NO: 27079 - DNA, 1608 bp, Arabidopsis thaliana landsberg
aacgaggacatcattagtgtatggaatcgcaatgcttctgaccatcaggtgagaaaactgttcacaagaagaactgtctctctccctctccttttgattggtacttacacagtgcaatgttttccttaaacaggcagtgatgggtttgagagactcaatcaagcggcatttgaagttgcctcatgcatatgtcatggaatacaagccacacgatgcttctctccgcgacaactcttcctacagaaacacatggctgagaggataggcccaaagtcgatgattgtatcatgtaatgtggagaagatttgggaagctcatctgcaacctgggaagatatctggattgaaccctgtatccaataccatactgtaccggaggcttacaatatcagaaaaacaaaatccgggctacttctgtgtcagtatgtgttcatttcgtttttcttttacagtacatcttgttaacttcaatggtttgactcttgatcaaaactataagggttaatttttaatgaaaactggaaattacgttctggtttacattataactcatgtcttaaaaagtaacaggatgtcaatattcaatgtcacttcgtacgatgatctctaatgtacatctactgatgaaaaactgagtgtggctctgtccgttgatctcaaaagctatagtttagcatccgcagatgattgaagtccgatgatacctggttcaacatcaaagcctcgagtgaattacttcacacaatggaaactagaaaataagagaaaacggtgttctgttttttagaaatcttagccttgtaagcattaccacatccaactctcgagcctgcgtttccagttgatttgctaagcttgtgccctcctgcacagtaacatcgcaaagagatcatcgctctttaacatcgataaagcacatcacgaatctaagaactaatgcttggtacctgatgacaactacatgaaactacagtgattgcttttgtgatattactcttaaacttcgacaactcaatttgcatattgtgacattggaccatatggatatccaaaggctaaaagaagtttctacctttcccaaggtcatcaggatccgcatgcacaacaaccgccctcccgagtatggaatactgcccactaagcggtatctgtgaattcaaagagaagatgagataaatggtgaaacgtccgagagatatatgaacaatctaagaaccgaaaaatgtaatgtttattttgccaaacattaaatgattgaagaagtgaaaaaagaagatcatatacatgtttgtctttgattaagatttcagcaacacctgaaaacaaggcacatccaaaaattactagcatcattcttcaaaggacacaaaaccatatatagaggtgagaaaaacattatataccgtttgatcctgcaagaatgttacccaaatcgccagcatgacgctcttcctcgttcggtggcccgtgaactcgatttaatggattgaagtgaggtcctgaaagttaccattttcatgaaaactcaggtatatatcacaaaggagaacaaaaccagtaaaagcaaacattcattagctgagatttttaagctttgtttctgattcca

SEQ ID NO: 27080 - DNA, 1442 bp, Arabidopsis thaliana landsberg
  unsure (1)..(1442): unsure at all n locations
taaaaccatttctttaaactgtttaatgtttaggtaggacttggcttcagtgttgactatatttgttgtattcagatgtgatttggcaatgtatatttgtccatataagttgtgaaaccgaaaatgaaatatcatcatacttttgagaatttccatttcttgatagttttctttcagatttcttcggtttcgttgtaattctgacttctgcataatgtctgatctttcttttgttctattggatttacagtgaaaaatcttgcaacagcgggtgccaaaattgtgatcattagtaattcttctagacgtgcttcaactacaatggaaaannnnnnnnnnnnnnnnnnnnnnnnnnctttcttcaccggagctataactagtggtgaactaactcatcaatctttgcagaggttattattaccaacaacttcttcttcgtgattaagatgctatttacttactgagttactagaacttactgatagatgtctcttacaggagagatgatccttggtttgctgcactgggaaggaggtgcattcacattacttggaatgaccggggggggatctttttggaggttacttatcaccttatttcttgttgctggttgatttatcgttgaaggttattggtaggtatatgatatagtttatgtttcagggtctagatctaaatgttgtggagaatgtggaagaagctgactttgttttagcgcacggcactgaagccctaggacttccttcaggcagtgtatctccaaggactattgatgagctagagaagattttggagaaatctgcagctcgaggacttcccatgatcgtagctaatccagattacgtgactgttgaagcaaatgtttttcatatcatgccaggtacatatatttacatctcaaaatgtctaattgtgtcttccacatatgatgccatataaaagactgatatactcaatcacaaatttgttaggtacactagcttccaagtatgaagaactgggaggagaagtgaagtcgatgggaaaacctcataaggtgtaaaatccgtttgaacattaaaatttgctacttctctctgtaccacctgaatttgactgtgtgtatatttggtagatgatctatgagtctgctatagcaattgcgggagtcaatccgtctgagtccatcgcagtaggagattcgctacatcatgatataaggggagcaaatgtttcaggaattgaatcaatattcatcactggagggattcatggtaatgagcttggtctcacttcttttgatgaaactgcaagtctagactcagtcaagacccttactgctaaacacaatgcattcccaacttatgtattatcagcctttaaatggtagttttcgttttgttgtacaaatcatattattgcttttttgactacattttgccttcatttaacactcagagaga

SEQ ID NO: 27081 - DNA, 254 bp, Arabidopsis thaliana landsberg
gcaatccgccccaatttccgcggtgtcggtgccagcgccggcagctttgatcaaggcatgggcgaaaccgaagacatcctcgccgtggcgcgttacgccaaaacgcgtttcggcgaactgccgctgctgctcgccggattttccttcggcgcctttgtgcagacacgggttgcacagaccctgtcctgcgaaaaaatggtactggtcggtcctgcggtaaatcgtttcccggcagccgccgtgccgcccgacac

SEQ ID NO: 27082 - DNA, 865 bp, Arabidopsis thaliana landsberg
  unsure (1)..(865): unsure at all n locations
taaatcctacttttctattctgccatattttctaagaaaaatacaagcgtctctatgcttaaatattcatgaaatagaactgcatgattttattgaatatataataattgtaattagtaaaaaagatttggattttttatgaaacatctataagtgaaagatatcaaaacccaaattgcaggtatcactgaaattgttggactagttaggcccatctaaaagcctcaaaaactaaagatagcactgaaatggttggactaatgatcagcttagtcaagtcttgtttgaatctatctcatnnnnnnnnnnnnnnnnnnnnnnnnnnnctagattggatcgagtaattcattaaacaaaaacttttcataatgcaatctttgttatgatgattaggaaaaaaacataatgattattgggtgatcagtgagtcatcgttataataatgagattagtttaggcaacatggacagcctttttataatattgtgagttggtttggtttggtttagcaaatctctaaacaccagttttgctttttaacccaacggctaatcatcattttccaggctggttagtggttacctcttttttttttgtcttacttaaacactttttaatcttacttattgcaatattgaaagtactactttattcgttgttcttaactataatattcagctaataaaaacttataaaccattatgatgaagttagttattagatgataaatttctatagaattcaatcaacttataatctagaattattcgatatttgatcgtaaatggctaaatgcagggtgttattgtttaatcatttcatctttttttttttttttgtcaagataatagggtgtgtacttaat

SEQ ID NO: 27083 - DNA, 1331 bp, Arabidopsis thaliana landsberg
ggataaaggtttggtataatcgtatacgtcttgataaaaaggaacccaccaaacataaattggaatgttgtactttaatttaatgatgtataaatgagcttattgacgtagatacgttgagattacgagaatccgcactcatattaactactgtactagtgtcattcattctttgtcaactaatagattatgacagtgattctctagctaatcagacgattggcttgaatctgtttcatgtcacagcttcttcactatataatatacatagtaaatatttgttgtcagaagtatataatgatgaataatttggttcttattaaattataaaaaataaaaataaataaaaattggttcttatttttttttctttccttgggctaaaagcctaaaacccaaagatttttaactcaaattgaggaactgctatagtaggacccacatgtgcccatattgatttcggcatcgaagaaaaacaaaaaattgggctttaaaagtggatcttcatcatccatgaaggtggtatatcaattcatctaccgacatttgtattacaaaatattattgagatagtagtaaccaatatgttaaaattcaaccatagcactgttttccatctagttaacaattagctaaagcccttggaaggaagaggagggtgagcgagcgagcgcgtggacctcgtgatcctgaatagctcacgtattgtttgtggcctgaattctggttatgtacataaataatgttgtatgaagataagtacaggcctgacgcaagcccgacaatacaagaaaaatgataaaagagaaagatgataaaaatgctaatgtaccatatatatgatccattgcaccaaacccacaaagataaaaaggtgctttcggctttttggcttatgttttgagactctagaaataaatatattctactaataagtgtggtaatgtattgttcaacatatatctttcaacgctgccgaatttgaattcgaattatgtttatttatagtcttatagaaactatttgattcaatcaattagaatacaaataattggtttttaaaaagaagttacataaagtatgtgaagaaagggatggagggaataataatatagaaatatggaaagcagtgtaacttggtaaacgtacgaggaacgtaaagagatcagttccacttctccgtgtctcacgcttgtctcttccctctccaccttttctctatttcgtttcacacattttatttcatcttaaaacttgctcactagtaaaagaaattctgacgattttcagcaaaccattactgatgattagtgtttgatctttaaattcgc

SEQ ID NO: 27084 - DNA, 1552 bp, Arabidopsis thaliana landsberg
ggttccgtttaataaaataaattcctaatcatgtaaagataatgtttagtatgttttttattttaatgaaattctattagatctcaccgataaattttcttatataagtaaaagttatgttgtgatttttaaactaggttattgttttatcgtctataatagtttcataaaaatagtcaaaaatgtttgtaagtttttaaattttaaatatgcatattttcatttcaatagtcatacatgctgttcaaatacaataattgatgtcattattcacacaattttaaatttattgatatcgattgtatttgtgagttcatatattatctttgctatttattgcaaaaaaaaaaaatctcctaaatattaatggttcaattctaaaacaacaaaatttataacatccaaaacacttaacaatgaaaacaaattctctataaattaacaaatattacaataaattagcagcccataagtctttttgggcttgtgtgcctcttgatctgtgcgccggctctgtttatatgtataaagtgttcagagagtagattctcctacaaataagttaaacctccaactaatcaatttataattaccaatgaaaaaaaatatcagaaaactcccattaccaataattaagacaccaacaaaaaggtttctatatttagaaggagaaatatgattagaagattacccgctatcattccttccaacttttttacgaaaatggcgagtcgcaacacaatccagatgtacctcacgactgttgtcgcaatcgtgatcctcctggcggcaagccaagccacggaagctcgtttcaccagcctatgtgctcaaaccgcatacccaaccttgtgtcgaccgctggtgaaaggcccaaacccgagacgagccacacacagcacgatccgagccttggaggctaagacgaaattggcaattacagactctgcgagattcaagagcggaaatccaactgttgcaatttgctatgcgactcttgtggatgcatccttcaatcttaggagggcaaggactagcattaggaaaagaaatgttatgatgctaaaaatgtttttgaccgcggctgtgtcagattatggtgtttgtgtcaacgggttcatagattcacatcaagtcaacactcttcagaacgatgtagatgagctcaggaagatgggaactaactgcttgttgcttgctacattgataagatgatcgagcctatagaagaagaaaacactaaaactaattcctgtaaaactgaccagaagaagcttattcttaattatgtttatgtaaatgttcctttttagttttcagagggtgttcttggtcaacttcaatcgggtaaatgtaactataatagaaagttttagccatttccaaaattttccgatcccatgtgttttttgtggtatctttttcccagaatttcttgacaaatcacttttaactgatttaagagaaaaacgtctcttcacagatgtaattagtgcattttggaacacaatccgcaaacatttgttccaaattaaattaacaatgatgagca

SEQ ID NO: 27085 - DNA, 2728 bp, Arabidopsis thaliana landsberg
aaccccccccgagttaagtgattactgatatttcatcccctgttgtggttgacaatgccggaaaacttctctctgccctatttaatgaagcggctgttcgaggtgacttgctcgacatactaatcacttccagcgaccaatttcctgaggtttgtatcttgtttggaaattgatactatctacggcctctctctttatgttctgtttttgtgcatcacacagcttcttaaacttgatttgcttatcataaattaacggtttagtggcgattttgttccataactcagttgtgtttttcgcaatgtacagcttgctgaagctcgccaagcagttttagtcatcagggaaaagctggattcctcgatagcttcatttcgcaagaagctcgctattcgaaatttggaatttcttcaagtgtcggggatcacacatttgatagaggtattctctcgagaaactcgtaatttttagatgatgctgtcttccgcaagagtgcagctttcttgatttttttataaattgcacctaaatggatacccaataagtattgttgcgtatggggatgagaataagtttcaagaaggtactttgtgttggtttacttttggggctttactgttctcactttctttctcgtgcacatatccattaaaagttattcactgctctagaacctaatatcttctttggtaccaagtataacatatgtgcatatgatactctcatctttgaaagttgtggacctttatttctgatctgaaactaaggctttgtacagctgcccgttgattccaaggtccctatgaattgggtgaaagtaaatagcaccaagaagactattcgatatcatcccccagaaatagtagctggcttggatgagctagctctagcaactgaacatcttgccattgtgaaccgagcttcgtgggatagtttcctcaagagtttcagtagatactacacagattttaaggctgccgttcaagctcttgctgcactggactgtttgcactccctttcaactctatctagaaacaaggtgtaacgaaggaacaaaccacaataaatgttcttgtactcactgcttttcaatttgtaactctggcttccaattttttccctctgcagaactatgtccgtcccgagtttgtggatgactgtgaaccaattgagataaacatacagtctggtcgtcatcctgtatgcatcttgctctcgcttctatttctttttctttctatttttaaataagttggaatgattttgttcatttcgttttaaaaatttgccaggtactggagactatattacaagataacttcgtcccaaatgacacaattttgcatgcagaaggggaatattgccaaattatcaccggacctaacatgggaggaaagagctgctacatccgtcaagttgctttaatttccataatggctcaggtaacataaacattaacagtagaaaaaatctcttgcatatgttgaaatgctaaatgattcaagatattcccattggttttccaggttggttcctttgtaccagcgtcattcgccaagctgcacgtgcttgatggtgttttcactcggatgggtgcttcagacagtatccagcatggcagaagtacctttctagaagaattaagtgaagcgtcacacataatcagaacctgctcttctcgttcgcttgttatattagatgagcttggaagaggcactagcacacacgacggtgtagccattgcctatgcaacattacagcatctcctagcagaaaagagatgtttggttctttttgtcacgcattaccctgaaatagctgagatcagtaacggattcccaggttctgttgggacataccatgtctcgtatctgacattgcagaaggataaaggcagttatgatcatgatgatgtgacctacctatataagcttgtgcgtggtctttgcagcaggagctttggttttaaggttgctcagcttgcccaggtatactccctccctcttttctcatacgcaagtttataccaacatacagaatgattagaggtaggccaccctagaggccttaaagaacgcattaatcactgaaatatggctgtttttggtccaatcatttatgaagctgactcacatatatacttgactgtagatacctccatcatgtatacgtcgagccatttcaatggctgcaaaattggaagctgaggtacgtgcaagagagagaaatacacgcatgggagaaccagaaggacatgaagaaccgagaggcgcagaagaatctatttcggctctaggtgacttgtttgcagacctgaaatttgctctctctgaagaggacccttggaaagcattcgagtttttaaagcatgcttggaagattgctggcaaaatcagactaaaaccaacttgttcattttgatttaatcttaacattatagcaactgcaaggtcttgatcatctgttagttgcgtactaacttatgtgtattagtataacaagaaaagagaattagagagatggattctaatccggtgttgcagtacatcttttctccacccgcaaccctgtttcttttcagcttgatttctagtagttattagaattctggaatgcatttttcacctgatatagtgaagcatgatctccatcaatgttgaatacgaaatatattggtctaactctctattaattctggtttgtaacaatttgagagtttcagaaaagg

SEQ ID NO: 27086 - DNA, 3726 bp, Arabidopsis thaliana landsberg
ctcaataacgtgttatatgtcactgtcccgttttaacattttgtacatatcaacagaaaaaagtttttatgatatatccattccactgatgtcaaaaaagcaatagctttaataaaaccaaattcaaaatttcgtttttattctattcttctgttttgatatcacaaagatattaaaaacatagtacgaagattagttttatatgtgtactaatgaatcttctttgtggttgcttcattatcacgttttaacatttgtcacgcgtgccctgatttcattacagccttttctacaaaacacatgcattgttcttcttcttacattactacattacactacacaaagaatttcatattaattataacaacattttttttttttgctatactatatagttttttgttattcaattggtattttaccggcaatgcttcactggtttccgactcaacgcatgtggtggtcagtgggcttggcccacttatctctttcacctttttttttctttatacgaaaaattaaagcaaagctatagtaatagtacttattattattaccacgtcatcacccaactctcttatactacgcatatcacgctaagctacgcgtcgacggcgcaatatagaagaatatgtaatcatcgcgcctttaatcagactccactgagacgtgtcgctatttcgagttgtccacgtcactgtttcttttgtctcttatcttcttcttcgtctctttacttttttcccatttctagggtttcttcaatttcactctctctcttgagtttattcttctctgctgtatcaatcaaatcaacggagtttgagtttcttttccgattccggcgatggggtcagtccccgatccaggcgagttaactgagttagctcagccgagtttggaggagtttcagaaacagacgtcgatgatgactagctgtactcttctatggcaagagctctccgatcacttcacttctgtagagcagaatctgatgaagaaatctgaagcgttgaagcagatgattgaaactctagataaccagactcagacctcgctcgagtctctgaagcgtagagaggtaacaatcgaccatagcgttgagatcgtagctgggaaagtaggtgaacgagctagagctgctcttgaatcgttagagaaagctagagatggttgtggtgatggttctaatgatgattccggtgatgttgacgatgaagaaggtcttctctctgctttgaaatctctttgtcttaaaatggatgcgagaggtttttggaactttgtgacggcgaggaagaaggagttggagaatctccggtcaaagattccggcggcgttggttgattgtgtagatccggcgatgttagtgcttgaagcgatatctgaggtttttccggtggatacaagaggagataaagttagcaatgattatggatgggcttgtgttgtgattcttgagagtttaacacctgtaattgttgatccagtgattgggaaatcgaggttgcttgttactccgagtgttaaggagaaagctaaggagattgctgagacgtggaagaagagtttggaagagagaggaaggatagagaatgtgaagactcctgatgttcatacgtttttgcagcatcttgttacatttggaattgttaaaagtgaagatcttgctttgtatagaaagcttgttgttggatctgcgtggcgtaaacagatgcctaagcttgcggtttctgttggtttgggtgatcaaatgcctggtaatcctcttaagctcttatcttctacctattagttttttatcctggcatgctcattgtaacttgtgagatcatatatggttttgaaattggctagtttactaatagtttaacccatctagatgtatagttttggtaggttacaaatagtttacgagttgattagtcgaatattaagtttgtgtggcaaacattgtatggcatagattgtggtgaagtctgagacattagtggtacaaggtgttattgaccacagactgtgtgaagttgaagcctttttctctgtatctcgttttataatatctgaacttacaagttgttgcgctgtccacagacatgattgaagaattaatcagcaggggacaacagcttgatgctgttcattttacttatgaagttgggcttgtggataagttccctcctgttcctttgctcaaagcttatctaagggacgcaaagaagtcagcagcttctatcatggaggactctagcaatactggccgagctacggtatctactcattgcatctactcatttctatcgcagctaaatatttttatctgtgcgtccctgaaagttaatatcttccttgttatgttttcttcctaagcatctcgcggcgcgcaaggagcaatcagcacttaaggcggttttaaaatgcatagaagagtacaaactcgaggaagagttccctccagagaacctcaagaaacggttggatcagctagagaagaccaaaaccgagaagagaaagccagcagctgttcctgccaacaaaagaacccgagccagctacaacggtccaatgccaccagccaaagcggggcgtatcacaaacgcatacgtttcttccttcccgttcatcagatcaccctgtcactcttctcaatacgcttgaccagcagcttacccatccccagctacaacagtttacatgaacataagcccaccttatccatactctacggagatcataccaggctcataccaaggctctcctatcggttacccatcgtacaacggttattgtaatggtccagttcctgctccagctcctccagtttaccacccacaccatcatcaacaccaccaattccaccatcagcaacattactactgaattagaagacagtgtgacaacaaaacaaggaagaagattggtaataaccaacaaatcactgatactgtgacaactgctactactctggtgttctctctctctgggtctattggcttcctacgtcgtcgtttttgtctgtaatatctctttctcagcctaactctcttagtaacttagcttatatcctctggtgtgtttattattaatcgcatataaaacaaaactcaagcttttgtaatgtctaatattcagtcaacaaacttatatttctgtactctgttaatcgaatgacaaacttctcttcgtcaccaactatctccgatcaaatctaacatcggaggtcgttgctttgaagacatacccaccagttctctgttgaattgcatttcttcttcattgagcaaagtggtgattcaatttcggtacaagacacaaagccagtggtgagaaatttctctttaccaaccttgcacaccagatgttcgacgatatgtctctttgaaatcttaccgtttagttttcacgtgcgttttcagaattggtctcttttccttcaatggctttgatggttttgagaagaaagtgtctccgtttgccagattttatctccgtttttcgacctgcaccgcgttgcttctcctcgagattttccaacagtgaaagtggtaaagttacagtgactggtttgagtggttgtggtatagaaactgtggatgatgatgcttggcatgtttcatcatctttatcccaagcttggagacagttccaagcagacactgcaaaaaactctcccgttacaatacaaggagtaagagaaacaatactcgatgatgaagatcccgatca

SEQ ID NO: 27087 - DNA, 1650 bp, Arabidopsis thaliana landsberg
gagtaatttaaacctttaagtatcgattagtgcgttaatcagatttcatttggattaatatataatttgaatttggggacatgtggggcttcgatttctcacataaagccgctgctcaagccgctcatgcttcttacccatacaaattcatcttttcattgtaaaaagattgatttttcaataaatgttatacatgtgattctaccactagaaaacgaatcaaactattagatcatttttgatacaactaatcagaaaactaattatatttaagtatggctactttgcaaatttaactttgtagaaatcccactatggaaggcaaaaattaagtgttagggtatgtcggtcaagctgagcaaaggcaagccgttagctgaacagtggattctactagtagtataaaattttctcctttgttaaatgtgaacctaaatcttaaacaaataaaaatgttttttttttaaataaaagtagaatagaaaagagaagaagagaagagtcgcgaaagattgaagaaaaagaggaaaagacacatgtccagctctgagttgatcaaacggaccaataaaagttaggcttttaatttacttgtctccttgaatgaatacaaatgtgtcacgtttcttttctagctctttccggatctgtcaggctcgtacatttctctcctagtttattgatacctataatatttattccataatctatatacagatttcgctggttattctttgaaggaccacacggatcatagctctcataggtcacattttggctcgtccagtttttgttttctttcttttgattaaataataaatttcttcgagatttttaagaattattaaagtttaagaggttctagaacaatagatttgataatacaattgttttattaaagcagtgtagttgggtcgaactaattgacgtaaaatgtgtaccaaaacgtgaacctgaaaactcaattcaataagttatagatgttttatatatataaatccatgtttatgttaataatcaaaaaattcaggtttataaaaatagttagagatgtttttgcaatgcatgtccttacacttgcataaaattcatatcttcttctttttttcttttcttttttttttataaagaagaagtggttttggtttcaaaatgacaatttaatttgaccatcatctagtttctgtattttggtttatgtattgtagaaatgtcctcgtgtatcgttttgtgaacataagcgaaaatcatagcaaattaaaaccattcggccaaatgaattaaaaaataaaaaattcagtcgaaatacattacaaatttgtttccagttctcatgctttctatatatagttctatacttctacttaaccaaatccattgcatgtgacactactactaggccacaaaatatataagcaacttgtcatatcaatctgtaaagaaacttagtaatttatgaaatataccattgttaatacataatttttttcaaaagcaatatagaaacttttattaaaaaaacagaatcattgaaagatgtgttgtaacttgcactattttaagtaatgaaaatgttcaaactacttctaattttccaatttctttcgtccgcccctttttgggaaaccaaaaatttttttattttttttt

SEQ ID NO: 27088 - DNA, 4100 bp, Arabidopsis thaliana landsberg
aaaacccgatctgctgctggcgcgtggcgaatgtgggaccaccgtcataatcacacgcgccaaagccgccgtcacgaaccctcgccgccgctcttgccgccagagaacggttgagattagaaatcgaggtttttttggaaggaggaggcagtggaggcagaattttacagattccatatctagaagcttcttcttcaatcttcaaaatgtaagcgatcggatcttgaaactctgctagagtaggtctgaactctggagcaaccggtaacgatttaagccatggaaacacatcttgactctgctctgaaaccgccatatctctctctctctcacacacacagggaagaacaaaaaaaagagactttctctcaaaatttgttcactttaacttctaggtatcaaattaaaacgccattacagagtataaacagaacaaaaattttgaagagaggaaaaaaaaacaaactttaagagaatcgacgagtctccaccatttctccggccaatagagttattttcttaaagggtcattcacttttcctcgaaaaaaacgacgggctttgttgatctcgtttcttaggtctctctgtttttattggattaaagaaacagaggaaaaaattgtattttttttagggggttgggatgggtttgggcagagcaagagattgtgatatctctgtattaaaacaagtaaagaacacttagttagagagagaaatggtttttaaaagggtatgattttcttattatttacgattctgccatttctaacacacatttgttgttgtcctctctgtaaatccgtttgcacattcaaaaactcctttttaaaaccaaacataaatcccaattttaagagtaaaatttttgatggttttaaaaaagatatttctcattaaacatttttagtctttggtagttcatgaaattagtagaaattaatgtatgatataaatgtctacatttattattgtgtttgttatgctgaatccaaatttgatttttatgaatatgaatgagcccaaaaaaaagaatttgaatgagccattggtttaacgaatgttgcctctacctactgactaagacaataaagcaaagggtataatatgcttaaaatacaccaacaaaagctctaaatctttagaaatgactcaaaagttaataaataaaaataattaaatgaagaagattcacaattaaaaatatcaacatttcttaggaaaataaaacatattaagataagcacaacaataattataagtacatttgagagttcatcagagtaacaaggctaaataagtgtctcaataacctcaatcaaatcttcaatgcatctctcggcaaagtaaaaattaaattctctgataaaataagctttggcttgttcctaagaaggccttatgttctaatacagaagaagatgattttagtttgacacctggttctgttccatttctgaagatggcttcgaaagctcgagtgtaaccggacaatgatcactcccatggaaacctgaaacaaatcaagaaccaaattgttgcaaaaagagctaataataatcttctatgaatctgtgtgatgaacaggtttatctatggcaccttcaagttctatcccacgaccgtgcatcttacaagaaactatacggtctttgagttgttcagagaccagaaaatagtcgatcctcatcctctttccccggtacctatggcaaccaaaacaaaaaatcaatatatagctttagaaacatgcggaggttctggactccaagccataaaactaaaatgtgtagtatccactcactttccaatgggattccccgaccatgagaagccactttccatttcttgctccttgtgtagataccggtatgcatcaacaagccttcctctgtaacagttcccataaatataatttataatcacatgtttagtaactctaatctgtattctagaaagtactactactaagacttcgcagtgcaaagacatattacgcatactcttttatagttgccccgaagcgtcctctctcagatggtgtaaatccaggctgtccgcagtcctgcataatcaaaaaactcaaaaccactgtagtcattgtatgatttaaaggtccatctcacggagaacctttcggttcaggcgtagtaaagtcatcaacaatagcagggtcacaatgcagatgaagagacaagataggaagagaaatacaggcgtagtaaagtcatcaacaatagcagggtcacaatgcagatgaagagacaagataggaagagttataaaaggccgacggaaaataacattattgagagccagctctgtttttagataaaagctataatgataatgaataaatcgtacaaaatatggtattccttacctctttgtttggaggaacataaccattaagctttgctgtagcaaaaaattctgggtggctaacatctatctcctcatgactgcgtattacaaaaatcgaatcgaggaaataacatcaacttttattctgtaagggcttaaggaaaagagtatagcaagagaagatatagaaaaaacttcctcattacctgacatttaagtcgccacaccatattagcggtttatcagatgttttgttgaggaattcaacaatcctcttgtcccattttcttctcctctgaaacgcattctcttcatctttccaaccattgttaggcgaatacgtattcaaaagacgaaatgtctcaaattcagctaagataacacgaccatcaggttcatgtttagatgctgcatgagagcgacaagtatataagttagtcatcaatgatctagctatgatatatttctcccaagtacatcaactttgagatcaaggaaatggcagagccataacaagtcagataaaagaaacatggcttcaaattgctagtgtgcaagagatttatgtgatgataaggaacaagcaacaaggctataaaaatacctaatttgtccaagttaaagtaaacttttcgaggcttgaaacattttttcactaacaaagctgtccctgcatacttcgagtccgcgagagaccaccaaaccccataatttccaaatggtggacttgagagagcccgtgtcaaaatctgcaagttaagtttcccagaactaatatcaagcttgaatgttatccaaacaacaagagagtttgttactccataagtggctcccgcattcttttaaaatctgtctataaccatgccactgcaatgttgattctaactcatacaccaaaatctcctactaattgcaaatgcatcaagatacagagctttgaaaattcttgttccgttggtactataatacaactattttaacagatagaacaagcaagtcaatacagaaccatggtacctgtttttcctcacgcaaaactttcgtgtcatcactcaactcttcatggtttttaggttttccctttccaccagcagcaggcatccttacttcctaacattaagaacacagtcaaccgctaagctcagaacacgctgacactaaaagaatcaacagccccctcccccatcgtagtcacaaacaaattggattaaagtctgatcttttgcaccattaaccatttaaatgtcataagtgactgaatttgcatcaacaagttgaactcaaaccacttcaatacaaccctagaagacttggagggttttaaagttccacacataaacacctaagcacatttacccacattgctcgaaattaacccagggattccaaagacgaagcaaaagaaatcacctgtatggcgatgacatcggggtcaaaatcggagacgaacttagagaactgagaccagtcatttttcacccgaaggaggaagctattagcgttccacgtcataaacttggacggctcgttctggttcttctcttcttcaactccatctccgtctccgtcacgcttttccggcgaaaggcagggtttcttagccgccggagaattctccttctctatgggcttgaagaatcgcttcataactatagccatttcgtagctttatggagataaaactcaattcacccaaattcaaatacccacctggaaaaggtaccaactttacct

SEQ ID NO: 27089 - DNA, 807 bp, Arabidopsis thaliana landsberg
cccctacgcctgaaggtattcttcgtgatcctgaatacactggaagagggcttgagctgtaaccggcttcgtttgaaatccttgaaagctggtcagtaacatatccttcagcttctgccatgaagtgattgttcctggccgaagggaggaataccaggtctgagcaacattcctgacggccatgacgaaagacttcgccatgattgcagcgttgcccccgtacgaagacactgttgcttcgtagctcatcaaaaattgcttcgggtcagagtggccgtcaaacatggggagctggggtggcttataggatggaggccaaggtgtagcctgcagctcagcagacagaggagaagcatcatcaaaaccaaaattgccatgatgaaagtcaccataccattcatcatcattgaatgagttttcttggcaaagctccctgtgttggggccttcagacttggtcatcctgagtgaggtgacgcatttcttcagcagcttcgtcgatcttcttctgaaggtcggtgagccgaagcatcttttccctcttcctttgcacctgttggtggatagcctcccaatccctaatctcttgatctagctcctcctcctgaggtattgggctagtggccttcctcttctggctcctagcttgtcgcagcgtctcctgattagtgtccagtggctgtaggacagcccctggcaccattgtcttcttcggcggcattgcgaaagtcgatgcttgccgaaggtggtcgattgaattcaccagaggtgggcaccaatgttggtccttgttctcgaatgctataca

SEQ ID NO: 27090 - DNA, 4501 bp, Arabidopsis thaliana landsberg
atatacttagatttttaatatactttgtgaattaatgaggatatatcctacaaattcatttttatcattttccaattttatcataaattctcctatctattttagatatcataaaagcttttatattaaactataaatttgtaattttctagttttgtaagaaataagatatatgggccgtagtaaggtgggtcagttgatacggcgtcgtgttagctgctgacttatatgggccgtagtctcaaatcttttagcaatgcaattattgaaaatttgagtccaatacacataattcatgctaataaacgtcgtcgtttatatggcagatttaggcgcattcgtagcacgtgcgaaaggtggggattgtgaatgaatgggatcaagcaactccacgcgcactgtctgagaacaggcgtagacgaaaccaaagatctcttacaacgattgcttctgataccaaaccttgtttatgcccgaaaactcttcgatcatcatcaaaattcttgtactttcctctacaacaagctcattcaagcttactatgttcatccccagccccatgaatctatcgtcctctataatctcctctccttcgatggtctccgtccaagtcgccacactttcaatttcattttcgcagcttctgcttcgttttcttccgctcgacctttacggttgcttcattctcagttttttagatctgggtttgagtccgattcgttctgctgcactaccctaatcactgcctatgcgaagctaggagctttgtgttgtgcgcgcagagtgttcgacgaaatgtctaagagagatgtacccgtgtggaatgcaatgatcacgggctaccaacgacgaggtgatatgaaggcggcgatggagttgtttgattcaatgcctcgtaagaacgtaacctcgtggaccaccgtcatttctgggttttctcagaacgggaattactctgaagctttaaagatgtttttgtgtatggagaaagacaagtccgtgaaaccaaaccatattactgtagttagtgtactccccgcttgtgcgaatctgggggaattggagattggccgaagattagaaggctatgctagagagaacgggttctttgataacatttacgtgtgtaatgccacaatagagatgtactcaaaatgtggaatgattgatgtagcgaaacgcttattcgaggaacttggaaaccagagaaatttgtgctcatggaactccatgattggtagtctagctactcacgggaaacatgacgaagctcttacgctttttgcccaaatgttggtgagctgcatttttgtttgttccttcaattcaagcatgttgattccttggattgtaagagttttccaccccccatggtttttctgttgttcttcaacgagaaggtgagaaacccgatgcagtgacatttgttggaatgttgctagcttgtgttcatggtgggatggtggtgaagggccaagaattgttcaagtccatggaggaagttcacaagatttccccaaagctagagcattatggatgcatgatcgatctcttggggcgtgttggaaagctgcaagaagcctatgatctcatcaaaacaatgccaatgaaaccagatgctgtcgtatggggaacccttctgggtgcttgtagtttccacggaaatgttgagatagcagagatagcaagtgaggcactgttcaagcttgaacctacaaatccaggtaactgtgtgatcatgtcaaatatctacgccgccaatgagaagtgggatggagttttgaggatgcggaagttgatgaagaaggaaacgatgacaaaggctgctggatatagctattttgtggaagttggagttgatgttcataaatttactgtggaagataaatcacacccaagatcttatgagatctatcaggttcttgaggagattttcaggagaatgaaactggaaaagagtcgctttgattctttgcttcagcctgaacaactatgcatatgaaagtagatgttttgttcactttgccaataacaatgactgaatcttttgaaactgtatgtgattttggtgtctttacattcctatgttcaatcaaatgaacgttggtacacattgagtaagaagactagttggatatcgaggtagatcgaacacgaagagatgagacggaatagttgaagaaagctgacatggattgagacgatattatcactggttttcactattccttttgaaattccatgtcaggtgcagatcatatgtgtcctaaatgtgattaatagagggtgtgcttgctataaaatatctgcgtatttcttatgttattctttgtaatctgcttctgtttttcttcaactacgaattttctgtcacagtatatatcattatacaagatccaaaatgagttacaacttcaaaataaggaattgcacgttgcagttgataattcaaagagattgttgaatgtgagaacaagatatacaatgttgctttgttgtaagtctcataacagaggctttattgtgttcacatacaaacaggagtatttttgcttctcgagtctggaaactaatcatgtcatcttaatatcttattcggacctcatacaaaatccccacaaattaagtaataaaaaaaactcactcaaggaacaagcttgaatattcactaaatcctttacacatcttctttcttacacctaaaaacaaagtgcactatgacagcaaaagtgctttcgagttacctatgagccgttggtgtacgcggcatggtgtacggcatttgaccaatgttcattgctgcaccaggaaccactgagccagggactggagccgcatgaactccataagccatgtgaggtggagctgggaggttcactggtgttccaactgctggctgacctatggcgggtgttccatacataggaggtccaggtggtgcttgagagacggcttgcttggctgatttgtttcctcctccagcaacagcaggagaactgttgttgttgttgttgttgttgttattgctgttgttctgaccagtgattggtccttgtggcgttgagacatctgcgttgccaacactagtgatgtcgtgaatgcttgatcgccttctgtctttgttcattgaatttagacgaatgaaatacttttgagcatggctcgcgacttgggtcggtgttcttgttactacaaagttgcgagaaatctacgccaatcacctttcccgtacttatccaaaccaagaagaaataacctgtaacatagaaaagacagacaacagctcattagaatcgctgcataaccaaaagggcagaaacttccaggccatagtctcaaagatgaaaacacacaaaccactgctaaacggaaacagtctaaaaccaattgcaggtaacacagtaaggtcttgtcttgcatctacctcaacagctaatctgcagatagaatgccacacaagtatacagaaccctacttctaaattgcttctccactggattttaatctcctaactaagcaggaaagacatttctaaacacccgtacaacgtatttgaaaatgaacctcgtgatttcttgtccaggaggttcttctatcaccgccaaaatccaatttctcgaaaaagcacatgtaaaccaccaaattatcaagatgacacgggagtagatcaagataatggcgaaaacacaagtttataaaaatggtgtaagaatctcttttaaaggtttcaatcagacagataagcattttttttaactctcccagcaaatcattcaatcaacaaagatagattttactgttacatcagtttcccatatctttggcaagtgagaaaacagtccagtaactaattatatgccactaatataaccattatatacttaactctagtttttacgccttatctaccctaataaggtcccaaaaccgcttgcatcttcaagagagaaaaatgaagactaaacttcaaagtaagatttttttgtctctttctaaaaggaaggtggggttcctccaataacagaggttggatggactgtttcaccatgtaaaacagcatctagcttcaacaagtggtggaaaaagatggtcaaaatggtcccgggggttagatagcatctctccatcatctctaacatggtggatgtaatgatatagcaactaggacagggaggtaaagcgaatttatgagaacagctttctctgtcccatgccaagttataattccaataacatctgagacttttaaaacaatcacgaaactaaaaccacttcaagaaatctctacttttctttcaagcatcctctagagttacctcgggtcagtgccccctaaaaaaaactcaattcatccttttttaatttaaagtatcagataggagaccaaggacctaaaagttccagtgaaggtattgcttctaactacagtatgactttgaaaactcttgatgtcttaaaggttcacagaattagacacccaacagtaccaagattgtccctt

SEQ ID NO: 27091 - DNA, 1004 bp, Arabidopsis thaliana landsberg
ataataacattatcataaacaattaatattacacttttccatctaatttctcttacatgccctatttttcaaacgatgtcgtttaagaatatcacatagaccttctatttcatgaaaaaactaactcaccaatgcaaataaataaatcaaatgtttgtttgtggataaagtaaaacgttttctttcaatggcccagcatttactaaaatttatttcaagttcttccacgtaaagtctacactacatacactcatacaggcagtgtaacgctgattcgtagagctggagagtatcacaacaataaatttctcttccgaaagaaaacagcctaatattagggagatatttacatactctataagatgttctttaatctcttatatatattacatatgaaagaattaattgtttaattattatccaaagcgacgtgaaaccactctcatttattagccctagctatatctcacaacctccatcttccttactttaaaaacacagaccagatcctatttatagcatccatgtgcgccattgaaaggtaaatttatttaataaagtttacctataatatcaaattatgcaaaacacaggctggttcagttttttccacgaatcaaaaatggttggagaaatattgaataagagagagagagagagagagatagagtttcagagttgacacaacattgaagtaaactaaactcctaacctctttatctatgcgtatatataaaactcaaaagtacatataatcttcaccattcacacatagtcacataccaaagcaaaaacatggatcgttgcacgtcgtcgtttttgcttctcacattggtctctaccttgtccattctccaaatctcctttgctcaacttgttccagcaatcatgacattcggtgactctgtagttgatgtcggcaacaacaactatcttccgacccttttcagagctgattatcctccttatgggccgtgatttcgctaaccacaaagccaccggtc

SEQ ID NO: 27092 - DNA, 3043 bp, Arabidopsis thaliana landsberg
aaatcccatgttgaccaatttcaaacaaataaattatgaatttaggattatcttaccagtattaagtaaatggggaatatgtctcaatattgattgaaatctattttttgaattgggatcttttccaaatttaagagtcttaccataaaattattttctctggtttactataaattaaaacacagagtgacaataattttcatcaatcaattctaacttacttcttctcaaagtaaaaacaaaaaaatgaagttcttggtttcattggtgatcttctctcttttcttgaacggtttcgcaaccgctcaaactctcattcaagattcttgcaagaaagcttttgcgaaagacccgcaatcgtcatacgatttctgcgtcgaatctcttacgcaagatccacaaagcaaagccgcaactactctcgaagatttggccctagcatcgacaaagaacgttgcggcaaaaatcacgaacctgaaaggaatcgttgcacaggatctcaaggaccagagatatcaggatattgtggaagacttaaaactttgcctcgcatttataaagatgctaatgattctttaaaactgctttagcgaacattaaatcgcgtgattatgacggcgctaacagtaatctgagtgctgctttgaatgctccaggcgattgcgaggatgattttaaggaagcagaaaagaagtctccgattactaacgagaccaatattttgtataagacgattgtaattcctttggcttttactactatgttgtaataaatttatcaaagtggttcatataacattgtttaatttgtttactatagaaagttgagagcaaagaatctaattgatggaaataaaaatttcgctttacatatatgatctcttttaatttttgggtactatatacatataatattgacaatttagaaaccttacaagaaaacaaactatctttattaaagtagcaaatacgcgatttttgttaactaaagtgtatataaaaattggttgaaattcagtgattaaaagtttgttcaaaattttcaaccaattgaacaaaaataagtcggaacatatagttttgaatggttgcaaatattggcatggactaaaaccactctaacttattcattatcataaaattttgatatgcaataacgcggaaaagatattgctacgaatcattgtgatgattttttttctattaaaccattatatgccccaaaaacaaaacgttctaatccacgacaaaatgattcctggtctaacccaaaaacaaaacgtttagaactctatatcttttgacacttttgtttgaaaaagaaaagtaaaaaatagccaaaaaaaaacgtcagcgtataagaaagagtgttaaaacgaacaattaggccactcgacgtgagcggagtggtaaagcgtgacatcagcctcctataaagagccattctttcattttactataaatttgatcacaaagtttcaaattattcatcagccgattctcaataatctttgtttctgcttccacacagaaaagaaaaaatgaaattctcgctttaccttgttatgtcctttctcctcttaaactgtttcgcaaccgcacaatctctgattcgggattcttgcaaaaaagctacaactaaagacccgaaactcaaatatgatttctgcgtcaagtctctcgaagagaatccgcagagcaaaaccgcaaagagtcttgaaggtttggtcttcgtatcgaccaagaacgttgtttcgaaaacgactagcttgaaaggaatggttgacaagattctcaaggaggataaatatgaagtggagaggccgttacttgattgcctcgaactttataccgaagctattgattccttaaaccaatctttagacactgttaagtcgcgtgattacaaaacagctaccatgcttatgagtgctgcaatggatgcaccgggaagttgcgaaactaaattcacaaaaagaaaaaaggctgtgaaatctccatttacgaaagagaacgatgtcttgtttcacatggttctgattcctatagctcttacaagtatgttagatatgaaataaccaaaagtgttaggtaacacaatagtgataatgtactttaagagtaatcgggcttattcactgtaagaagcaatggtcgttcaaagtcttgaatagagagttacaataaaacctctgtaaattaataatattggcaccaagaaaatttattaatttagagagagattaatttatcgataaattaataaaaattatacaaattttgtaaatttttacaaaaatttgatataaaatgaagtttgttctttataatcaatagtccttatgaaaccaattacaagtagaaagcaatacaaaatttttttgttgtaaaaactagaattgaaaactacaaagaattattaaaaattgaagaaaaacattagtagagtcatattttacatatgatatttataatatatattggtaaatttatactattattaatttatactattaatgagatcgtatatttatataagtttaaaaaaaaaaaaaattatcttattaatttatcgatttgtgtcactttttacactgctcccaagtcggaaccggaaatttttttattaatttatagaggttattaatttatagagtattaatttatagaggttatactgtatatacattttttgaggggtaaaatgtcgtttaatacgtgaactttcaaaaaagtggttattaaatacgtgaatttcgaatatgactatttaatacatgtaaaaatcgttgaccgagcattttacacaaatttaatcgttttttttttgtcatccgttgttaattagagctcaaaagagtcatttatgtggaacgttgttgacttaatcgttgactagaccaaaatccatttgacgttatctggcgtaacagactcgataacagccgttaactagtctctgttagttcccaatacgacatcgttttacaataaccaaaacgggaaatatgtcattcaatactctaattttcaagttataccgt

SEQ ID NO: 27093 - DNA, 1763 bp, Arabidopsis thaliana landsberg
caaaacataaagagtcttttttcatacacttactatcattatggtccaaaattcaagtgggttttgaccaaactgaatcatcaaactccaataaaacccataaaacaaagcacgttaccttttggtgcacgccaatattctttttttatcaagtttgtatcttcgatatgttgatttactattttaattacatcctgaattgatatgtttgcagtagcgaaggtcgataatatgactttcgaatattatccctatttgtagtcgagagtgtgtacatctagttacagaatgtaaccatccgttcttgcagttttaaatatgattccgaaatcagaacagatgtcagatcaagcaagatattaattcaccctttttatttcagctcccacctttagtttctagtgatgcgaagcatgcatagctaatgtggccaactccgcattttctatacatatatatttcagtaataaattatgatgaaagactcaaagagatatgtagggacctccattcgacctagaaactagtatttttcgggcttaattctgcttttttcagcttatttcgatctacatagttacgtagtaagatttaagaataatgcaaatgaaatctttttccgttttaatagattactacatgatatattgtctcaaacgtaatgtggaaatatcggaaattttcgtatgaatgacacaaatatatcgtttgtcctcttatataagggaaaactacctccttttaggacaaactccttcattggcacatctctggcaaattggcaattccaaaagaatcataaagtttagatcttccgagtttgacttctcagcttctcgctttttcttttcttttctttggtgcgacttatcttcttcatttgcttataaaagtcgaatcttcttattcatcattacgttgttacacgctatgaatattttatggttttatggttttatgctatgaatatttaaatgtatcacgcgatatatgagagtatagtttagtaatagttaatatcatcgatgtattattatccaaattgtatactacatgttgatatatatatcaataagctaatggttggcatgcctagatttaatttatgtttaagtcttctatttatgtagtccatacatattattaatttgtaatgtgaatccttcaccatttcacattcgaaaaaataaatatcatcacataagacaacgactttcactgctttattattaaaaaagaccgaaaataaaattagaagaaacgggtcacagaaaatcataattttaccgatcgattttattagacaaatgtattaaaaaggacagctaattaatacaacattgaacatgtcatccgccatcggtggacttccaacaataaccgatcacgtcacatggtattgtcgtcgtgttttccacgtgattattaaagccaacactctcttcttttggtaaacctgttggagaaaatcaagtcaaacaaaaaatatgtcgtagagaaccttttaaattaaagatacacacacatacacacatacacacccataagagcatcttcatttgataaaaattgataaatgtttttagtattaataagtaataaaaagtaaaaacacttcttttattatgtatctaaaatgtccccagaaagacacaaatttcagtttaaaaacacttatccccttgttctcatcatttttattactattatattaaaagacactaacaaacaaataatcccaaatgtagatggtctcccgggtt

SEQ ID NO: 27094 - DNA, 1548 bp, Arabidopsis thaliana landsberg
cggctctttgatagctacaactgccaactatttaatccatacaatcaaaatgtaattttcataattgtagatttgtaatgggtcaatatattcttacactctaatcatatccaaacaagctcctcaattccttaatcttgttgtatccagtatccatattttgttttcttactgcggaagttacttggtagtgtagtctggatttcggattgcagactttgcagtccacgatttttcatatgttggtgacaacgaacaagtgttaagttgacggaagtgttcgtaacaaacgacgtcgtgacggtgatcttcatcaactttgattggaaatcaagttttgagggacaattaataatcataatcataatgataagaaagagatttggcgtgttgctaataatgtaggacaagtgagcatgtgagagtctgtgaccgatgaacctgctcagaccaacctgcacatgattgtatcacaaacaaaaaactctcatttgtctttctttcgtcttactttattcattttaagcaaaaattaaatatccaccgcgttgcacaacaaatcatttacccatatgattattctcttagttttgaatttttgatgaccatgctgatttaaaatttgcaatcttacaataactttaacttatgtataaaaaaaatgctgcatcaaccaataaaacaaaactttaggattacaaatgtttggctatgagtaaatcaagatattatctgcttcaagtctctttttcttatataatttcagaggaaaatgtttatatatagttcaaagcaatattactgtaaccaaaggtaaattttgtatgaactttttggaggaatagaaatccatctgcagcattattacaaacagagtttgcagatctactgtctttttttggacttatactgttactaacaaaaatacacatgtaagagatttgcccaaataaataaattaaagatacacacaggctagataaagataagaccacatgtaaggtttttgttgctatactacattagtttacactcgcttcccacctttatttaaacaactctcacctccttcactcgatcatcatcatcatcatctctttcttcttccaaaagtcataatcatgtcaaagtctctagctggattggcggttttggccgctctttttattgcggttgatgcgtttaggccttctggtttaactaatggtcacgctacattctatggaggaagtgacgcttctggaacaatgggtaatttcacactttagtttcattatgatctgactctaatggatttgttcaaataacgaaattatttttgttgtttttttccaggtggagcttgtggttacggagatctttactcggcggggtacgggacaatgacggcggcgttaagcacggctctgttcaacgacggagcttcttgcggagaatgctataggataacgtgtgatcacgcggcggactcacggtggtgcttgaaaggagcttctgtggttattacagccactaacttttgcccaccaaactttgctttgcctaaca

SEQ ID NO: 27095 - DNA, 1274 bp, Arabidopsis thaliana landsberg
  unsure (1)..(1274): unsure at all n locations
agtatatgatcaggattgatttgagatctttttggttcttgagacagacgttctcaagatgaaacttctagatagtgcttgtcttggcaagaaattggaaaaagtatcatgaatcttgtggcttttggattcatttcttttggttcctcattttctaagctcgattctttgttacaggcggatactagtagacgaggagattcagacagttcttcgatgatgagatctgcagaagaagatggagaagataacaataactgcttgggaggtgagacatcatgggcggttccacagattcagtctccacctacagcgtctggtctaaactggcctaagcattttcaccaccactctgtgtttgttccggacataacttcttcaactccttataccggttcatccccgaatcaaagggttgggaaacggcggcgacggttctagcatttgtaattatcttttagccgcttgagaaaagagattggcagctttctcagtagatgtaagatcacataaatgatttggaaacttgtaatgtagtgatctgtgagagtcggtgttctttgttagctgaaaaaacaaaaagatgtttatttggttgaagattataaggggttaaattactaagttatcaatttggcttaacatgatttttcaaaaggtgtctgttatattttgcgtcatgcttaatcatcttgtttactatccctgggggaagagttacatcaattgaccaattcagttaaaccgggaaaaagaaaagagaaataccgttaagtttggactaaccgaaattagaagcagtattcataaaccaaaaatccaaaaggcaaaaacactatgagaccactatgcagattgagagagccaaaatttatacatcacattaaagtagagtaatcatcaagtatccaatcctaattctaaatttgtagagctcataaaagaaaaatgagaaaacagaacctcttgatccaaactatataaaaagttttatctatagttnnnnnnnnnnnnnnnnnnnnnnnnnnnnnnnnntttggtggaagacggtcggaaacaggcaaagccgtagaagtgggcaagtttcggacattgatatcaagaggatacaatctatactcaatgtcaagctctctgcaaattttggcaatctcttcaacaagttgagaccttcgagcccatttctctcccatatcttgatgattcattcgatgtgttggccaaaccgcaattctcacgctgtttaatgactccatgtctttgaatactatcat

SEQ ID NO: 27096 - DNA, 471 bp, Arabidopsis thaliana landsberg
acctacccggaccaaaatcaaaacatttttttttactcattaagagggcatcatcatcattaggggaaccgggagttcaataacgattaggaaataagagcgttcgaattctgtgatgtactgaacccctccgttcatcagcttgaaaatgctttctgcaaacgcttagtcctaatacctagtggacttgcccatcggctactatggaacatgtctcgcactttctgtggcgggacaccttcccctgcacacgccattctaacaaacattgacaaaatgagtcagaaagctcgctctgtttgtagctatcattcataagtttcgcaatgcagatagccaacaaaatataatatttatcctgagcagtcagatttctgaatatgaagtatagcgatgtatttgctgcctaagtcaactagcttagtagagaattggaaagacagaactagaatgatggaatgtacctgaact

SEQ ID NO: 27097 - DNA, 902 bp, Arabidopsis thaliana landsberg
taccagtgcgagtcttcttttccattgcactgaagaagaaccattctttgggcctggtctttaacttcgaatgcactgaaacaaagcaagaaaaccactaagtgtcaaagactatataacactaactcaaactacatttcttaaattacaagcaaccaattcgtgagaaatgctttaaaggttaattttggatggaatgattcacagttatacaacctaagaatagcaaaagcaccggccaagaaatccagaagccattgagttaaaacccttctcgaagagttatcacttacacaaacttgaagaacacgaaatctaccacataacggaaatctaaagccaagaaacagaggaagattataactgctaagtcccagggctcgagcttgcaaatatctacttctccaatctcatcgtatcgcatgggttttccctgaaccttcttcttcaagtaatagctaatgagttcttcatcggatggatgaaatcggaagccaggagggagcgatgtctccgccgcagcattacccatagcagtcgccggcgccggtaaagctccaccagctttcttggagtcgcgagccattaacgaaaagacgtacttattcttgtatcacctttccaaatctctctctcgatttgacggaggagaaagaataaaatgaaaagcccaagaaaagagtaccttagaacgcaagcaaaatttgatctatttcacagactttaaaacgactacatttcgaatttggattttacgtttcttgtcgttttgtgcagttaattttttttgtttttgggtgcaacgtttgttttgtagtaaataaaacactattaacggttaaaaaaattagactagtctgtagtttaggagggtaaatcaatattaatttgggccatatcct

SEQ ID NO: 27098 - DNA, 1431 bp, Arabidopsis thaliana landsberg
tgatagcttcttgttttaaaaaacacagcatctttttgccgagtgaatcgaacatctatctctctctttttcccagttgcccaaatcatgtaatggctgcgtgaggattttttgattggctattcaatcttttatataacctatcttttcctctttgctgctacataatcttattgaaatttatgattaatggttggaattcgtaggaagcatgacattaagtccatatcgatattagtagcttggtgaagatattaatgatccttttatgctctcaccatcttaaacaatttgaagtttattcttcatcagagtgatgatgtcagcgcaaattcgtcacttagaacttataagactacccattgaattgcataaccttgtttcgtagaagttcgtcaattctgtctgattactgaagcacacaaactaaaatcaataactctgtttttataatgttgtaatttgtaaatgatcgtcactgaatctgataaattttttgaaattggttgggcttctggcccctaaccttcttagagatgtcaaatgggcttaatgtccttgggcttgacctgtcctaatataaatggtctgttttcaggcctaaaactgaactaattaatatgggctaaaatcatttaggcccgtctgttaatagtccgaattcatttggacataggctgtccaataatcatgaaacgttagggttatgaatttttgtggaaaaattggatttgagaacaaaatttccttctgtctgagaatggtcttagttacgatttggaaactagccctcgtttaacgacaaaacgttctagtagtagtcatatgacttaaattaaatgatatactttttgggaaaagtagttgtatgaaattgatcaatcaagactatcaagtagatgaatgttgggaatatattaccggcgactctgttggtttgagatataaacaatgattcgaagagatagttttctaggtaatcactaaacacgttagaatgtctgacaaaaaaaaaatttacacgttgaaatatacattgttgtttaacaacatgttattaattttttatttttggttttaatgttaagaaaacataacaacttgttctcacgcgttaacatgtgctcccacgttaacacattaataatcgatttaaatattaatgaaatagcaatgttccatcaccatggagactttttgttgttcatgtgatactttataatgagcgtcgtaagacatagataagagtgtaatttatgagaacaagaacaatttgttcccaaatcccaagtaacagaattagtttgaatcgtttaactataaaagaagcaaggaacaaaaagactcgcaatgttgttaaatacgtgcacatacacatgtgaagtattacgctatgttcgcgatgcataaaaaactttaaacgaagattgt

SEQ ID NO: 27099 - DNA, 2310 bp, Arabidopsis thaliana landsberg
tcataatttgcccttctccgaaatggctaatcactctcggcctcacatctgccagtgtttgactcggctagcctccgtcaaacggaacgccgtcgtcacagtctacggaaaccggaagcgcaccggcagggagttcgttgacggcgtactgagccttgccgccggactgattcgtctcggcctccgaaacggtgatgtcgtctctattgctgcttttaacaggtacatttttctacgaaagttctgaatttttcaaatttgaatgaatggagtgagtgaggacttaaaatttgggttttttgaatctgaaccgttgaaagtttggtttgttgttatttgtggtttcagtgatttgttcttggagtggttattagctgttgcattggttggaggagtagttgctcctttgaattacagatgggtcagtctctcttttttcaagtccagtgtctgcttattacatcctttttagtatatagtgttatgtgtaaaataaagttcctgacacattatttggtgttcttaatgatttatttgtgtgaaagggcagagcttgaaagaagcaaaaatggcaatgctgctagtagaacctgtgcttttggttactgatgagacatgtgtctcgtggtgcattgatgttcaaaatggagatataccttccttgaaatggcgtgtgttgatggagtctacttcaacagattttgcaaatgaacgtaaccagtgtatgatttgttttataaaccttaaaactcaagattaaggagatggaattgtgactcaattttttttttgttactggccagttttgacaaccgagatgcttaaacagcgtacactggtgccttccttagcaacgtatgcttgggcttctgatgatgctgttgttatatgtttcacttctggtacaacatgtttgattctgcttcctccataatgatcttcaggctacttgatctctttttgtttcgattttatcgccttcttgggataggtacaacgggaagacccaagggtgtgacgataagccacttggctttcataacacagtctctagctaagattgctattgctggctacggtgaggatgatgtacgctttttacctccacttatctgtttgtcctcaatgaaatctatagagctgaatacttccgtaagtaaatagtctcttaaatttctctgcaggtgtatttgcacacgtctccattagttcatatcggcggtctgtcatcagctatggccatgctaatggttggagcttgccatgttctgctgcccaagtttgatgccaaaacagctcttcaagttatggaacaaaaccatataacttgcttcatcaccgtcccagctatgatggctgatcttattcgtgtcaacaggtaaaagtccttgcttgaagtaaatttcggtctttaaaccgttggttggctgaaatacttttactcaaaggacaacgaaaaatggagctgaaaaccgcggtgtgagaaagatactaaacggaggtggatctttatcaagcgaactccttaaagaagctgtgaacatcttcccatgtgcgaggatactttcagcatatggtgagtcactctcatctagcttctaaatcaaccgtttttgttaatgttttgactttgagatgttggttttaaagggatgacagaggcgtgctcttcgctgaccttcatgactctccatgatccaacacaagagtcttttaaggtgacttatcctttgcttaaccaaccgaagcaaggcacatgtgttggcaagcctgcccctcatatcgaactgatggttaaactcgacgaagattcatcgagggtcgggaaaattctaacgcgcggaccacacactatgcttagatattggggtcatcaagtagctcaagaaaatgttgaaacatcagaatccagaagcaatgaagcttggcttgacacaggtgatatcggggcctttgatgagtttggtaacttatggcttataggccggtccaatggccgaatcaagactggaggcgagaatgtttaccccgaagaggttaccttccaacacaagaaactgctcgatattaccctcaagtttttttatggattgaatttacgcaggtggaagctgttctagtagagcatccagggattgtttctgctgtggtgataggcgtcattgatactcgtcttggagagatggtcgatgcttgtgttcgtctacaggagaaatggatatggtctgatgttgaaaaccgtaaaggaagtttccaactgccaagtgagacactcaaacatcattggcgaacacagaaacctaaccgggt

SEQ ID NO: 27100 - DNA, 831 bp, Arabidopsis thaliana landsberg
  unsure (1)..(831): unsure at all n locations
aacattgcctccgacgagatctgcttcttcatttctgtggcagttttttttatttcatccaacagtactactattttatctagggctggggtggaagtttttggttttgacttcaatattaattaaaatatatttttgtttttctgaaaaagggctatttaaaatgttttgttttattttttgaaagtttgttatagttaactctcttctcctccaaataattatcaactcttctcttctcttttgcaatttttttttgaacttctattttttcgtttttttgaacaaaagatgttggtatattttttttggtaagccaaaaataataataatctggtattatatatgaattcaaatagcattttggaaaggtggaaaaaaaaatcttccgtaggatcttaataaacgtcggacaggcagtgtgtggatatgcccgatattagggttaatggtttacaataaagatcgagtgatcgtatagtacgatgtagaacatcataagattgattagaatatatattctntaattatcttatgatcttctagatccttctatgctcgcttagattaaataataatttcaaaggcgggtatcatcatattcatagggaatcagtattattgggtccgaatcacccacattgcattggtatatcgaaactgtccatatgttggtttatggcataatctacgtgtacaccacgttcggtgcgctagcttcttataagttataacacgtcattaacatatttgtgtgtgactctagtttggttaacgatgttatcatactcattccttaggatgtacgcttctcatcaccaactatgggcc

SEQ ID NO: 27101 - DNA, 1461 bp, Arabidopsis thaliana landsberg
ggaactaatcaaaaaatcatttctatactctcgcatgtttaatttattgatccagtcatagagtttcaaatgacaagtttcatatctcctgtttccagttttgaattattatatttggaattgacgatgtcgtgtgaatgtaaattacgttatggttgaataaaatgaatgaatgttaggtttgtagttaattagtgtagtttaatctaatagtcaaactcaacgtacgggataaagactgatccgttaggtttttggtttgactttaggaattggaactatggactaatggttgaagtatttgacgctagtcatgcgttgatagtgaaacccagcgaatttcctaacaaatattttctactttcttatatcgattttataatgagtttaaatttcgaatgttttgttttgttttgttggaatcgtataaaaacttataacttgaaacaatataagaatttgcgttaaaagaatatgtagtttaaatgagaaccacatgttttattcaaattaattcgagagagacccaactgtccaacccccacaacaccagttcctcggtaagccagagaatcaagtggttaaaaaaaaaaggataaacggttttgatgtatgtatataggacccaaatgacacacacgaaaccaataggagtaaaattttaaattaaaatcgaaagaactatggtgaacaaagatgtgatcctgtcatgtgaatgaagaacatggtgagataacgttataaggtaaaacatgggggtgtcaatattttatggaccatcaaacacagttcacagacgcggcagatatgacaggttcaatgttcttggcgaatgaatgtaacctcaaggacccattacattataaaaatctctcgaaattttatcatatttaatttcattttctttgtagtccccacaattgagtggtcgaaattacaaagcaaatcatatactttatttttacggtatgtgtataccattgtgtccatctgccaccaatctctcccccattccttttgatccattgaatataatcatataacataagtcataaacttacgaatcgaaattaatttacttacgtagattaacaaaaaaaaaaatcaacataataatgatattgatatgaaaaataaaaagttaagatttgattttgtacgacattcaaagaaagaaagaaactacctcatctctaaaacaaagtattgtcagaaaactgaacggtggtgatttacttaaacaagaaataaaaaggaatcaacggctgagatctcttcttgttttggagatcgcacagatcggagaagacgatgtatcaccaccgctcattctgactatactgaatactgtgagacaaacaacaaccgttgatacaaacaccaatcgctttaaccgccgacaatagttagtcccttgagctcacgagatctcaagcttatgctgcattacccaaaacaacg

SEQ ID NO: 27102 - DNA, 2071 bp, Arabidopsis thaliana landsberg
  unsure (1)..(2071): unsure at all n locations
tggtgtacaccaacaactacatgtctataaggaaagaaacagaacaccaactgttctgctctgggctcttcttctctgttctgggattggattttcaatttttggtttctcagctcatgggatgttgaacaagcttatccaagactttccaatatctccgacaagaaggatcagtgtgaatagccctaatcacccatttctcaggactttggtagttttcaatccctgaagtggtttcaggtctgtcttctgattgtcttgcgagaatatgcatctggaagtaaacttctgcaggtctcatttctgtccaacaattaaaaacagtttcagttatgcaattctggtgaaatatgaaagaacaatgattagaacagttttttcgtcaaacctggaggccagcagaaccattccagacgaagattcttctcccatttctctttagagccaagacttccatgtgcttgagctaataatgtataaacgataggcaaaggaaacaatgaactcgcttgaactttgctaagactttttacagctagtgagagaaactgcgagtcattagactgtctagccagctccatgcagacagcaccatggcagagaagtagacagctctctgaatttaacaacgaacaagcttgtgcaaggaattcctctgctgagaaaaagtcttttttccctgtagaatctaagccacgagctaaactgtatacagccatccattctttccatgaattcttcttctggctcgagcattcttgtaggctcatctctaagggttagcatcaggttccagattatactgagattctatgagcttcaggcaaatccaaccaatatttgagtcagtcttgagttccaaacacgctctgtattcctcttgcatgtttttggtactcccatttgctgcataggcacggcaaagttgtaaatgtcctagaaatagatagctacttggaagagaaagggaagaagcctttcgagcatggttaatggactctgctatatttcccatctgtaaactaatctcagaagcacaaagcagaagctggaattttttatattcgccttctttcgaacatgtctcatcagagagtgccacagatattagacgctcaatagccctacaaagctggcgaggaaatctctgctcacgtgccttctgcacgagattcagaataagcaagtatcttacactgctgttcgaaggttcttgatgcaagaatctgcgtattgaaaaacaatttaaaaaatgtttaagtgtagatattttctgtagtattatgctcttagctctctgtcatatacgaaagattctgagcacagtggatcaaaaattgagttgtcaatgataacaggacgactagacaccactttgagagtaaatcaattcagattctgaaaatgctaaaatgatgtagaaagattctcaaatacctttgcaattctacaacaacaacaggagcattcagatactgacaatggcatgtcggaaatgagaacctaggagctgtattgccaattacattgcaagcaactgatcctccaccaaggacctccaatgcggacttcagaccttccttatttgcacactcagagacatttatgatacaacatctactagcagtacatgcatctttcattccttcaccagctaacaaaatatatccaagcaggttcctaattccaacaaaaaattatttccgagttacgattacgataccaacatatcattacacaattaaaacctagagcgctttatcaaaacccaccttatcaaattactatgaggatacatatgaatagctttgctgaggtgggcaatccccttctcatatccaaggaaatctcctgctccagttttcagctgcaatatccagagtgttgtcatttcaatcaagtttatgaacaacaaagaattccaagacgaaggggccgacatgataaccgagatcaaaaggctcaccaatttgctgagtgctatcaaatagtgcattgcaactatntcttcttggggatgtatatagctacgagtgcttgcaacaatcgactgaagtctatcactctgatc

SEQ ID NO: 27103 - DNA, 1035 bp, Arabidopsis thaliana landsberg
ctaaagtatcattaagtccataaactacgaccacatataaagataaggttaactctttttcttacaccatataaggttaactttttaaagtgaattaattaatgtatatcaaagatttacttccaactagggtactctttaaaaggtgagtttttccttccacttaaccatttcttagaatgcttatatccccaaactctttggcagttttccttaaaatgctcacctttactctaacgaaggtcaaagtaattaccaagatttcaatacttctttacgataaaattacattgttttaaaaatgaaacaaaactagattataacccgcggtgtaccgcggggctattatttttttttaaaagaaaaatttaacttgtttagtacattaaaaatatatatgatttaattttttatattttttaaatttacaactcttatattatatattttttagtgtacaactactatgtttgatttttactgtttaaaaatatggaaacaataacatatagttcattaagttagaatctagattattattatataatttaaatttaaattatattttttattattaatattgtttgttttgttttgtgtttaagataatgtaattgtatcttaattgttatatctaagatttcacccgtagtttaccgtcttatattactatcgacccaaacccgtcataccatttaatctcattcatgaaattaaacatgtctaatggatttcacccgtggtatatcgtctcgtattactatagacccaaactcgtcctaccatctaacctcgttcagtgaaattaaacattattttgttatttttgttttaatagtaccttaatttaaaaatatacaattcaaatcaatttaaaagttttctttcaaatggttatttaatttttataaagtgcatatgatataatattataaacccgtccctccgtcttatctcgttcgatgaaattaaacatatatgtttttttaataataaacttacttaaaagatttatagattcaaagcaatatcagt

SEQ ID NO: 27104 - DNA, 1670 bp, Arabidopsis thaliana landsberg
gctcaattggggcttcggtcattttcgaagaactaatgtgaagcataaaagtcgagaaagcccgttctccccctggattttatgataagagtaggattgatcaaacttgaagctccctagaaatgtaaatagcgaataattgaacgaataaggttatactctcaatggagcattagcttctagagattcaaatatagggcaacatagagggcatatagtaactaaggtcaaaatagttttagattcttagatttaagtaccatcttcaagggcttagttacttaacttattccactgaaccttgttctaacgtttctagaatgagtgaatttaagtcttaaataattcatatgcaaatctagagcagagaaacagcacctgaaagtcctctagtatctcgaacagcactgtttgttgcatcttgaggcatctttacctgtcgaatacaaaagtgcaaccaaccagtaaattaaagtaataatatagacatatcacatgcaaattgtagcaatatggcaccagttacctctatggacaaagttttgtcttcataagagactctgatatttccactgatacctttctttcttaaatgatggttgaatctgctttgatgatcaccaatcaaggaaaatagcatatgaaaatcacataactaaagagttagccaatggtattggtaattatgggcaaaacaattcgtactgccaagttaattctcgcttcagaagatctttatttctttggagcttgttccaccgtgagtctactgcatctttgcagacctgattaaacagtaatgcacacattaaatgaattagcacatatatctcggaattttggatgaagggaaaatatatctgtaaaccttgagtttttctcgacagcttttgtaagttttgcgtttcttcccaatcttctgttctttttccccgtgcataatcctgaggtcatcgattgattcagaataactgtatcaacaagagataaacgcatgtaacattaacaggcattcaacgggtaatttccgtatgtaggaacaatcacaaggcacagaaacttaagcactgctgattctctcgatgaagtctctgattcattctggtaatctgagcactgagttgctcaggagtactcccatcccagggacccaaagattctatctcactctcaggacaaatttcagaggccttctggtcactttcctgaaatttcagcacatgcaattcataaccacagaaaaatgaaccctgtgcaataataacctacaagataaaaaaattctacagctaatacacattactccagtagctaagttccatagactagacaacatgtcataccgggtttcaaactggccatttccttatagagggtttacaagagattaagagagggatctatatatatatatgtatatatatatatatatatatattgcgtgtgtgtgtgttgtatagaacggaaagaagttgcaaatgtcatttcgaaaaatttctgagtaattgcttattatatgtacctttcgcttatttttaagctcctcgtagttagcctcagcattcttaatatcaggtaggaccttgtttttcattatgttctcgtaatggattttctcctgaaacagaatcaagcttacattctacatgcaaaccaagtaaaaaaaatct

SEQ ID NO: 27105 - DNA, 1284 bp, Arabidopsis thaliana landsberg
tcgtatcagagaagtcgtgcgaatacaaagaagaacctcatgaatcttgtcacacttttggtggttcagggattttatgtgattctgttggggaggctttcacccagactgcacctgaattttatgataatcgagcctctgttattgattcaatcagacgggatgagtttgggttggatttaacttcttctggttctgagatgagtatgctgcagaaacaacatgctcggttaggaagagcacttcagtgtttgtcccaagaactgtattctcaagattcacacttcattcttgaacttgtgagcactcttaccttcttctttctttgttcataatcttcttacaaccatgttaattgggttcgcttgaataaatatcttgaataaatatctggtgcaaccttatgcatatgtgtgtatcataaggccgagttctactctgcctaagatgattagtagttcagcaatacctatatgctgtcaacttgtagatgaacctgttatcattgttcttgtaattgtaagggttaatgagtattaaaatgtttggtagccatgtaaggggcaatatcgtaggttgttagatgtctctttataccatttctgtgaacaggaggaggtttagtggacattccattttgtcatcctcttactctcttgctattgttgcttcaggttcaaaatgctgatgacaataaataccctgaacacgtggaacccacactcacattcattcttcaaaagaccgggattgttgttttaaacaacgagtgtggcttcatgcctgagaacattcgggccctgtgtgatgttggtcaatccacaaagaaaggatctggtggatacatagggaagaaaggaattggcttcaagtcagtgtttcgggtatgtacaacccaagctttaatgagtttaggattatagtatgttaagctaagaataggccttggaatttctttctattccaaaacattctctagagacatgccagcttgaaaggcttatatgaactttaagctcaattgttagacgaattatagcaaattctttctcaaataatcccttgtaacgcttttgcttgggtccactttccaggtttctgatgctcctgagatccactcaaatggtttccatttcaagtttgatataagtgagggtcagattggatatattttaccgactgttgtgcctcctcatgatattgaatcgcttagcagcatgttatctggccgtgctttacacctgaaggatgcaggatggaacacttgcattacactttctttca

SEQ ID NO: 27106 - DNA, 1111 bp, Arabidopsis thaliana landsberg
attaggtgacaaattctctggtccatcaaaaaaatggagataaagtgggaaacccatggctttgtctgccatcgtaaggccactcccacggtcgccttccacagctttatacccggttattcgtcaaatctttgttaccaccgtggtcgtcgtccacatgatctcttatctctccctttattttgtttccgtttcttaaaaccctagctctgataccacgtcagagggtaaagagaatatgtctattgtcttattgagaaaccctaactaccctactttaaagatattaacatattagactagaaattattatttatttacttatagtccctaacatgacatacttatatttttgaataggtatacttattaattgtgtaagtgtgtgtgtatatatagactcacctcattgagaagttcaacgcaagcacgacttcctccagcgttacaagccttcacggtaacatatttagtataaggaaacggtctgtgtaaaatcttaatctaatgtgatttaatatatgtcatcactaattaaatattagagtctaaccacgatcaaatgtttatctttcttgcaaaccgatgccacttgagaaaggaaatcaggatttataaccctacctacaaaaccattcacaattgtttgtaagttttatttgtgatcgaatattgaaatgaaactcatgctaaatttaaaataaccttcatctgttcaaagcctcctcaacatgactcttggcaaattcttcatttgtcctacaatcaacgacaaaaataataagatttcttacaaaaaagaagaagaacttaaatgatatatttttctttatacttaccttacgtcgagatatcggtgaccagtactaagaaagcctttagctgtataaacatcaacggtctcaacatcttcaacgctgtagaaacaaatcgacaatagaaccttaatatatacggatattgttaataaaaatcaataaaaataaaagttttttcttgactcacgtctttgggtgtgtttcctccatgagaaagcattaaaaatgatctgtttttctgttctatctggtttgtcttatgcaatgagaaaggttgaggagagaatatgtat

SEQ ID NO: 27107 - DNA, 4112 bp, Arabidopsis thaliana landsberg
aggatcagatgcctatacctcgcaaagcgtctaatataaaaacttgaccccatctgtaaagaacacgagcagtattaaaaattgagagctataaatatgtatacagcaaaaggaaacaatagtcgctttatggatccctttccccaatgttcaaaaccatgagtcctttatctacacagaaaaccttcaacttcaataacaacaaagttctgtcacaattttaggttagatacagaacaaaatgcatagataaactgatgctttaacacaagaagcaagtccgcaactcaacagattatcctactgtgaatatttaggccagcctgtctgttctccgaaaacaaaacctaatatgatctgactaaaattagtcaatcatacacaatctgagtgaaagtaagagatggaaatcaggaacgacttactcagtacattcattcaaagctgtaaggagctttgtgaggatggtactattgatttcaaatatgggactagtactattctcttggatctctgcaagggcagctacagcatttgccacaaccattggattattgtctgatattaaatcctttaaggcttccaggaaccccctatcctcaactaattcagcatttatgtcaaacagtttagcaacacaaatagctgctgtcttgcggacatatggatcatcatcctgaaaaataaaaaaattgcaacatgccagaaaatacagaaatatgtcatcagtcaaagaataaaaaaattcttgagggacataaatatttgctacaaggtgcagtgacaaggtagcattaaaaactcaacctttaggcatttctgaagaggatcacacaaatattctgtaatcttatcaacacgaatacagcccatcgttcgcacagccaaagcccggatcaatggatttgggtcttgtgaatcctgccaaatacaaagcgagaacttaataacgatgagtttcttaaataattttccatccaccaaaatcagagaaagaccaagaaacttgccatatgttaggtctttatgtttgggtaggctatataagcaaagtagctgaagtgttaccttaacaaaagtatttacagcgaggatagcaagatctggctggctttttgcatagtttatcagatacaagtaaacaagcttcttcaactccagattctcagtttgcatgcaattgactacatcagtgaaaagtgatgaaacatcctttccaacagtcattgccgcaataaccttcttaacagcatctttcctcttatcctaggaacataaagaaaaaaagagaatttaggaaactgaagcaaaaacgcattccatcatcttcaatcagtaccatatacaaccattggaccatctactcaaagaagaactgtttctatcgtccaaccaatgcattgatccatattcaaaacttatgatcccccaatctaaacacatccccgcattaaccattattctgaatttcattccatttctacatagtttcaaatgaaccattgaacacataacattataacgtacaccatcatcaatctttcaaactaaaatatcaacaaaattaaccgatcaattcgaatccataatcatacagatctaccagaaaatgattatgcataattcaacgaacgagaaagagatgagattagaatcgtgaaaatggcggatcacagatccatatatgaaattagacggagaagaagaaccttgtactgtgaattcagctcttccttgagctcagggatctctcccttcttcgtagtcgaaaaatatttagaatcatgaccgctcattttctcccttcttcaacctccacacttcttctcctccgagacgatcagtgacaagagacacaaagacacgaaattgcaaaaagtaataggtcggggttaaaataaaactaattacagtttaaccctagtattattgatatttgacgaaattgcctcgtgacttcgtctagtcaacgccagttgccatccaggggaggggagaagaagaatttgtattctcaagttgtcgatatgagagagatgaagtcagaaacacgtttgtgagagaacagctcttagatgtgactgtggatcagattctcaaagacttttcgcgaagagtctctgatccttaaatcgcttctctctcgcttgacctcatttcgtcgtcgaaatcagatccgtgtgaaaatgccgaaacaggatatggagaagatggagcttcgtaagaacttccgtaatgtttggcataccgatcttacccacagtatccagaacgatactccttgtaatttctcactctctctttttgaaatttgtgggttggattggttttggttgttgatttgatcgatttctgtgttgttcgcagattgttgcttcgcgttgtggtggtaagtttcgattgatctgagatttttcgttgcttgttctctctgtatttggaatttggatatttgtagtagtcggatcttggtttatttgaattgaccaagagttgacttcgatttaaattcttagatcggcttgattttcatttcatcaagaaatgtgtatggagtgatctgaatttcacagataatatgagtttctctgatcattgtatgtgataatttcagtgcattaggagtttgacattgtatgatttgtgtatctctttgggtctgatatgtttagcatacatatggaaatgtcttgtttcttcttcttctcattgcagtgccccttgtgcatcatacttgcttcgcaagcgtgcgctttacgatgatatgtcaaggtatatcacacattcagtcactttcatatagctccattccaattctatcttcttagtttaagaagattgtttttttttgtctcgcaggtacgtctgctgtgccggttacatgccttgtagtggtaggtgtggagaagccaaatgtcctcaactttgtcttgccactgaggtaagaaacttgattttgttagctattatcttcaaatgaagttttttttttttttggacaacaaaaatgaagtcttttctatagacacagctagtctagaaatttcgatttcagcatctgaatgcttcctgtagcatatgcatacaatctcagtcatacctaggtgtgacttgtgaggcaacctcgcgaaattttagcaaatttctggtcttctaaatagcagatcaatcgcaggtcttctgctgctttgcaaactctgtggcctcaactcgctttcttctgcaagatgagttccaaattcaaacgacaaaatgtgacaactgcatcattgtaagtatcctcattgcccagaccatgcctgttactgacactcacaagcaattacaaacacgataaacaagtttcgtaatctgtgctggctttttggctgtgtagggtttcatggtttgcctcagccaagtggcttgcatattctccatagttgcatgtattgtcggtatggatgagctttcagaagcttctcagatactcacatgttgctctgacatggtgtactgcacgtaagaatcccccatccaaagtgccattcttataagtttcgatcaaaacccaattttaacctattgtcctgatatatcgtactttgcttggtctgcagggtttgcgcatgtatgcaggtacgagcagtgatgatatcatatcaacccattccaatctctccttacttaaatcctacacttacggtaatatctataatacttttgtagacacaacacaagatggaaatggacaagagggacggtaagttcgggccacagccaatggcagtgcctccggctcagcaaatgtcacggtttgatcaagctacctcatccgcagtcggttatcctccacaacaaggttatccaccttctggttatcctcaacaccctccacaaggttatccaccttctggctatccttcaaaaccctcctccttcagattattctcaataccctcctggggcttatcctcctcctcccgcttacccaaagtgatcactctttgcctgttttctttcctgattggaaaattttatggcatctttttttcatgctgtcttgttacgggtcaagaattgaacgttcgcttattgttttgaggtcgttctttgtatgagattttgacctc

SEQ ID NO: 27108 - DNA, 5434 bp, Arabidopsis thaliana landsberg
tacctgcaagtctctaagaagttataaccaaaactaagacagcaccagttgtacacacttttctagttttggttaccagaattagtgaaacatagtatacttgcttcaaccaaataaacaggtaaggattggtgctattcggttttgcaagttcaagtagtagagtattaccatgccaacacaatgtgccagtgtaagcccaattgttccagttccacagcatacatcgaagagtaaagagtcgggaccaaggtcagcccagtctccagcaattgagtataacttttctgcggtgacggtattaacctggatcaataattttcaaatcaattaaaaaatttcaaaagaattttgaaatgtattgatcatgaaggttcagttattacctgaaaaaatgctgttggggatatgctgaaccgaaggttgttaatatgatcatgaatccgagcttcagtcaatacattggtggtttgctcctgatttgtcccattatctgacattggaataggcagcacttgcagtggagcatcaggtggtgcaacatttgatattcctgagtgattctgcgcaagaagcaatagaggcggttgataataaaattggactatagagctaggaaactgaattatatacaatttcttcaaattttattaaagagaaagtgaggaaaagtaatcacctgaacaactaatacagtcagaggaagagaaggagagcttgctctagctccttcagcaaacgctttcgccaattcttcaaactccgtggccacttctgcctcatcagaaccagttaaacaaacctgaatagtttcacatgagatagagaaattaaaacaagaactaataatagtctgaatgaaaaacatcgactaccattcaagacacaaacctgaaccataagcataacctccgcaattcttgtaagagcatcttcatcatttgaaaatacgccgggttttctcccctctcgaacctaatataattttgagcaaggtgaaagaaaaatttaattaggtaaagtcatagcctataatataacagcatgtcctgcaatacacgtaccgtcaactgccgccagaacccactatgttgaaacctattccaaacttggaactttgatttttctataaacttctgaaatattgaagcatattgaacagcaattttggagacgttggggcaatccacaggctcctcgactgctgtcacacccgcgctggaaagatcttgcattagtttttcccgttacagagtgaaaaaaaagaaagtttcagggaagaaagtagatataccaaaaacttcctagactgaatccaacagttggcttcccctgaagagataatccaaccgagaactcacacttgttcctgtagccatttgtaatcggtgattctataataccctcgaggttgcatgcaagaccacctagggattaaacatatgaattaaaagtcccaccaatcaaaatggcttcactataccaaccaacagctaagaagtgtaatcttatcattcaacacatgtatagttttcttacctctgtctctagatgtaaggacccattgcggaagtgaatttccatttggacaagctttacgcgcattcctagcctgccatatttccaaaaaaaatcagtctgttgaagctgagatacataaattaaacaccaattcaaacaagaaaacaaatctcctcacaagttttttcagcatttgccctatagaagtctttttttgttcaagctggtcagcataagacaagtaagccaagggagtcacagcgtcacgagcacttttaaccgattttcttgcatcgttcttgtcaaatgtacgcggaagaacatcagcaatcttcacattactgctattaacagtttttccatccaaaatctgcaatacattaaacacattacgatacaacattctctgatacatctcaaaataaataacctcaacacaaaacaaacctccacgccaatctgcaattgttctgcattctcaaatgtaacaaaaccaacaatcattcctcttcttttctttgcagacttatattgaactccctgcaaaattgactgaatcagtaactaaattcacaagctttatctacactaaccattaacctaaaagatcaaaactttacctgctctcctaaaaatttcttcaattcatcagattgccatttattaggtaaatgcaccaaacatttacttaacgacaaatcaataacactaccaccagatacttcatcaccatcaattgattccatcatctgctcagtgaacaaaacctcgtcttcttctttctcttcatgctcagacatcttcaaagccttagctttctttccacgctcagaagtcggatcccaagtattatccggtttcatccggagctccgcttcaccgtgagcgtatttacactcgtttccatgactacacgaagcctcacgcctaaaataagaacagagactcgtcgtccaccacggtgaaggagtagtaatcttcgtgtctgacgattcgagattggttttctcgtcttcatcggcgcgtttccgtttctcaccaacagcttcgatgttatccgttgcattcgaatcggacgatggaagttcgtcgattgatgatgtctccattgtaattggctcgacggaagcaggagctgttaggattttggtggctactggaagctcgttgatttcgattgatgatgtttccattggaagtggctcaatcggagtgataatgatattggtcagaggctgggaggttagggttccagcggcggcggagagaagctcgtcgaataatgatgacgatatcggaagtggcggtagatggtcgagaagtgttattggaagtgaaggagtttcaaaagtgaatcagattcatcagaccttaaaccctacccggttagatgattttacttcggtccaattgtctgattagtttattagtttcggtttagtttttaactttgtaaccaattttaatttccggtttattaattaagtggttaagagcaggtccattgggagggacttaacagatccttaaccaaaatctttgagtaaaatctttgagtaattttgagaaaaaataaataaaaaatgtgattaaatgttatgatcgcacctaattttaagatttttgatgatgttaaggatcggatacgtggcatgttttcattggttgagcattttttgacaaaacaagtttttttcttctttgccttttttttttcatttatcgatttctctctctctcttgaactcggctgtgcaattgaatgattgattatcgccggaagatcttcatgcttttatatcatcaaatcggaagagattatcgcccggaagtcgtctctaatccactatgctcatcatctcaaccgacgatgctcaacatcgacgagtttaaatcgaagaggattgtgaatcatatcggagtcttgtgtgaaaccatggtccagtctcatgataaaggtatgattctatctttaagtttgtgtaaatcgtgattaatttgggttggtagatgttattgaaattagagtttcgtgaattgggaattcaagcaaaataaattagggctatttgatgtaaacgaattagggtttgtaagaatgcataatcagtctctttcttggttattagtgatgattgaagacgatttataggctgtagattgtttgttcacactcgattatgagatcaattttttatatgttttgtatgtagaatgtatttgtcatatgtctatcaattgaaatctctgaatattatgtctatgaattgtagttcgtacatttgaatttgagatgtgtttggattgtttttgtttgaattaattgttaaggttttttatgttcctgtttctttatagtgaatgaattgtttttatcttggtttggtcacaccgcattctttacttggtatgaaatcaggctcatcttggtttgacgtgtgagattgtcaaggtatgaaatgcataatttaaatttacatgcttcagctttatgttctttttttttccaggtcatatgtgctctgattctcatctttttcacaacattctttactttcataatactaaggtaacttttattttccttgttcagatagtcttgtttttgatagaattcttgaaattttgagtttgtgggatttgtattttcctcagcgagtgcctacatcacatttttgaattagagatttgtagtgtgattgcctgaataactttatttgggctgcttctctgctccaacgtgatacctaccatgtcttaatagtgtgattgcctgaatatctattgcttgaaaagtgtttaacacatcatctcgaatgacatcttgtaggcagaagcaatcaattctacaaataggagccttgtgtctattgatcatggcagcagtccttctaagtgttggtgaaggctctaacaaagattcaagcggcattaatgcggatcaaaagctgttttatggaattatcccggtcttggcagcctctgtcctgtcgggtttagcctcttctctgtgtcaatgggcttctcaggtcatccagagtttacatatcatattccaataaaaaatctgtacttcaattcattcgtagcctaaactgtcttaccgtttacaggtcaagaagcattcatcatacttaatgacggttgaaatgtctatcgttggaagcctctgtttattagtaagtactcttaaatctccagatggtgaagcgattaaaaaatatggcttctttcatggttggactgctttaacactggtaataaactatctctttttttatccacaaaacaattcttttgatagcaaaccagtgaattctgatggttggtatgcactgtgactgttgttataggtcccagtaataagcaatgctcttggtgggattcttgttggcctagttacatcacatgccggtggtgtaagaaaggtaaaacaaaaaaaaaaactcccagactgatattacacaatcaaaagctgaaatatgtaatgtcgttatatcactttgcagggatttgtgattgtgtcggcattacttgtgacggcgctacttcaatttgcgtttgaaggaaaaccgccatcatcgtattgcctagttgctcttcctcttgtgatgagtagtatcacaatgtaccagaaatacccatacattgacaagaagaagaagaaggtgtaagaaaaaggttccattcagagaatagctgctagtgctaagtacaacaatgagatatcttaatgccattattattaactaagtagatgatagtgtgattcttggagcattcaaaagactttgtagtatatttacattcaaagatggaatgagtccaattgagataaagtaaggcctatattaggcccatagcatacgcaaatcaacccattgattacactattaacaaaaaaaaacacatg

SEQ ID NO: 27109 - DNA, 1305 bp, Arabidopsis thaliana landsberg
aaatttcacccacaatgtttgtttttggagaaaaatacctgttgaaattcttcaccttgacatcagttatggatttggaaagaaaattaattgctactttactcaaaattgtttatttataagagcaaacacagtaagtatccacccaaacctagtttggtttggtcatgaaatagtcttattaccatacaaaaaaaattctagtacaaggtgttgttgtctcaagaactcaaaagtcagaaaagttttttctcctgataatcacagaagaggcatatccagagcttgtaacacatccttgaactcaaagtcatgagtatgtttattgaaccgctcaagcagcttgtagcgagagtcgttcaaataaaacgattgagctgtctccatgatccattttgcctcctcgtcagtgagtttgcttgtgaacacaacatcgcctcggataaacaccaagtcttttgtctctgacagctcagtgtagaaggttgtagtcaggtaaggagccgcttgagttcctcttgctttgtagtcttcgagaccagtaaaaatcatgtgaggcgcttcaactgccacaataaaactgaccatttatataagatcataatgaactcttcagcggagttacataactgttgtaatgaagctcaacatgaattaaatggtacatctagcctcacatatcaaaacaccaggtaaatgaactgttcttgagattagtagtttgttaatttctttcctgactaagttaaacatttccactgctaatctcactaagttaactgaactttcagataaaagctacgacaaacctttacacaagattaaacggtacatttagcaagattcaacctcacatagcgggagaataaactattcttgcgatccagtagttcgctaatttttgttctgactaaattagtgcaagtaaaagaagatccattgctaatgaatctcactaatctaactgaacttaaaagctaccacaaacctagagcaagcattgttatgtaaccatttcatataaatttctcacaaggaaatgaaagatgtatatataatggaggattaaagtttgaaccttgagcaaacattgtaatgtaaccatttcctctccacaatggaatgacaaagtatcggctgcaatttgcaacatcaattagaataaaaagatccaaggattataattaaacgagaacaaggcttaatgatgttattaccactcggaggctcgttgcaacaacaatcgataaagttgagctttcatcgttaacccaatatgacctcgtcccaaatgatactgacaaa

SEQ ID NO: 27110 - DNA, 1431 bp, Arabidopsis thaliana landsberg
  unsure (1)..(1431): unsure at all n locations
tgagaaacagaacattaaaagcttttttatttatcagttttattcatggcaagcttagggacagggcataactaagatgaaagcggagaagaagcacaagtgcgaaaaagaaaccaaattgaaagtgttattaaaagtattcagagagaccaattggcttcacttcctcgacgagggatactgttaacacgattgtacacatccaccttgaagttggcaccgcatagaactccttcactgtctaccctcggcatcgccttgatcttgttcattggatgctcaaagctcattaaccctccttcactatggaacatacaccctgccaaaattcatcaaacacttcactagttacatatctcattccatcaagtacatacaagtctttgtgttaccaagcatatcaagatnnnnnnnnnnnnnnnnnnnaatggagcaaaagatttagcacaaccctctttgataacatccaaatcatctgatataacaacagatccatcagcagctatgccccagtatagcttcacccctccatcagatccctacatgaattacatcaaattgacttattcaaatctttaaacattgaaattgagttccaacaggcgtggactgattttgtgaattagtaccagagcagtgaagacagagccggctttgctatcataaaccacaaaggaaaagctaccgtctaagtctttgacgacctgatcagctggataaggacctctgtctctaagagtcctataagcttcgatcacaaacatggcctcgtttgttgtcttggtgagaccatactgtttgtttagctgacacagattgttcaagctcccaaagaagagacagtagatgtcatcaaatccacaaaacaacctaacaaaaacagaagattaatggagcagaacaccttaaaacagaagaagattaagcaagatttgtgtatgtgttacctctggtggatggagaaggaagcacagggacgaacgtaagcaagaacagcagcttgtccgaaagacatggagaaagtgttgagagggtaacgtaataagaaatcatttagggtttcttctggaagttttggttgtttagagcatttctcagatgccggactgttgagttcctccggcgggtgagcaaacgcctcgtggaagatagccaacatttctctccttctttagagaaccaaaaaaaatcaaaaatttaaatggaaaagagttgtgtgtcgctttaataagaatctttgaaggaagattgaaaaaagtggcagaataatatatttttgaagcgttgtgttgtggctagttgttttaaatcctccgctggctggttttcttctattcctgtggggaaggaaaaaaacgttttggatgccatcatgaaaactatttttcttttatatttaataatggacatattatttcaaattggctatta

SEQ ID NO: 27111 - DNA, 844 bp, Arabidopsis thaliana landsberg
ggcttcggtcattgctccataagtaacagtctgcgtctgcagccatattcgtcggatttagccacagtgttgggttcacaaagttgtagccacatgcggtcggtggtttgcagcagccggactataaaacaacaaattttcataattagatttgaccaaataaatgcttaaccatgttttcaaatgaaaatatgataatcatagtcttaaagatattatacacattttgttttttgggtaaaaaatatttacacattgtaaacacaaacgctaccatttgtgtttacaacaaaaaaattcattttacttaacatggttaatattatgggttcatttggagaaaaaaaaagtatatactaaaggcaaacacaaacaattaagagttcaagacctaaaacaatgaaacagtactagttttagtctaaaagccataaaacgactataagaaacctaaaaaattgcttgcttggtatgaaagtacataaggagagactaatcttcttttacttatgagtaaagtttggttctgtctcgaggacgagaaattgtatagtcttagaaataaacttaatttatcttgcttcttaattatccatataagaaaaattataatgtgagtggggcaacatgccaacatgggagggatataattatctattatgtttcatgatggagacaaagacttgtgatcgtaattattgaatcaaatcattggtccaatatttaataatgtctaatgactaaaagattaaaagattaaaaattcagtcgagacctcaccatctaggcttatttaattattagtggttccaatcttggtacagtgacaatggactaggatgac

SEQ ID NO: 27112 - DNA, 1331 bp, Arabidopsis thaliana landsberg
  unsure (1)..(1331): unsure at all n locations
ataaattctctatcccaatcaaagcatagagaaaagccgatgatacctgcatagaacgtgatttgccatctacaactgttgattcaacacagtgacagatgtcctgaccaatgatcctatggagcaaccatggaccaggagcatggatggtgagagcacgcgtggtgtggagtttcccggtctcagtgtcgagtttcctgttcaaggtatcgacttcaaggttttgagaaaggatgcgtttgttttcagggtctgcaaacttcctccatgaagcagcactcacccgctcccacggatgcttgtaaacatgctcttgtctgtatgcttttaccatcaagaatctaaacccaaatcatgaatgttttgtgtgaataggtgaaagtgtaaacgagatattttactacaacaaataaaagatttctcagataaggatctaaccacatgatttggtctgcaaaacattgtttttagctatgaggattgataaatttcaacaaacaaagacgaagaacactaacaatttggagaatttaaacattgatttcgtaaataaaattgatctaattacggaaattctaatnnnnnnnnnnnnnnnnnnnnnnnnnnnttccgacatcggcgtgaatcaaaacgcacttaagaaacacgaaagaagaatggcagtttttggtactgtgctaacaaaattgaaggaaacagaagaacaaagaaacgtaatttaacagttgactcgattgctaatcgagatttaaaggagattgtggaaattgggaggagagaagtaccttgagaggtcggcaaattcaagatcttggtgagcttcgagaagtaataatgacccaaaagtggaggacgtgacgagagtaaaaatagagaggaagctaatcaatggcggtgtttatagagagagacttgcggcttatgtttacgaaccacgatgtttctctctctcagtctctctcgtagacggcactagtttttgggcctttattaagccctattcagagacctcattcattattgggctttaattgtgttgaaaaactcataatttattgtcatactctgtgactttttttccttaaatgtttttctcattttcttatatacatagtaattatactaattttcttagattatgcaaattatgcaaatgcatgcagcacaaaaaggattaggcaaaagcatggatgtccaatgtggtttttgttaagtttggttcaaacattttcaacacaagggacaaaaaccagacatttgtgttaatgttacaaggcattcaagatctgaaggtaacaagaagtattcatgttgcagttaatgttacacat

SEQ ID NO: 27113 - DNA, 1146 bp, Arabidopsis thaliana landsberg
caaatgtaattacaaacaccaattttcgaaacaaggtgggcgaccaccattgattttccttaccaacaggcaacacataaagaatatgacaaaaaattgttgaaatctctctctgagtagttgtgtcgcacaacaaaacttgtgtgtttctaggaaagactacaaacaattgtgtacataatggatactacccaattctgtaagtgtctttagtgacacatcgatctttacttaagaaaaaacaaaaagcttctgggaaaataccatcgatcttttgcaatccagagataaaaaagctcctgcaagttacaacgtccaggacatataaagcctcaagaagaagaatctggcttttctcattcatctgttgtccatgatccaaatcccaaaacagatactgaatccaaatcaactcccttgttctctctattcaacaattctgacctctctgtgacatacttttcatcattcaagttgcttttgtctactattccaaccattcctccctaagtttgaccttgaattccgttcctctagtatgcggttagcccgttcaaggatcatgtcagtccgttcattaggcacatatcctctccgagctattctttcaaccatctcatatgcatcttccgcctggttcattacaatcattctcaacagcatattgtacgtgtacatatcaagaggatagcatttctctataacttcatctaaccgcttcagttctacttccatatctattcgtcctgagaataatcctatcaactcaccaagtgacttcatctcagggatcttatcttctatatttctcatccgtgtccatgcttcatacacccctttgctcttcattgcgttatgcaaaaggacattacctatgaaagctgtaatacgacgcccgcttttcctaaattcattgactaatccaactgcctcatcatacttttcttcgttgcacaatttttgtatgtttacttcgtaacattcgatactaggctgtagtccttctcccttcatttcttccaagaaatgcatagcatcatccaatttatttgctttacagagaccaacaatcataacttggtacagtctttttttggtcttaccttgttcacgcagatcattaaaaagtatagagcatcggcgatt

SEQ ID NO: 27114 - DNA, 1053 bp, Arabidopsis thaliana landsberg
ttttttttgtttaacaatgtgcgtgtcctatttaacatcgttgtttactcccaacaaaaattaaaaaactctacaatgttggaatcgagtgtattcttcttcacaaacaaacttattatcttcaacaaattcggaagattcacaattgcttgttcctctcttatgtctacttcccagaaaaatttctgcttttgaaattcaagatgtactcgtcgtcgtcctcttcttctatttttcttcaatttccaccggcgagaacaaccaccgcgtctccatttatactccgccgtagcaggaagcgaggagctcgttttaaacgacagagtcggaatttagttcttgtgaattcgtcaattttccctccgcctttcgatggcagcgttcctctcgattcctccttagctccatctctcgccggaatcgcttccggcttagccgtttatttatcgtcgaggttttttggaaagtctttggagaagattagtgataaaatcgttgatgatgttgttgttggggaatggattcttttcaccactccgacgccggtttaacagatttgttcttcttcggtgctctttgctctccttgaatgatgactctaagaagagttttagcgatagacttgtcacagaggagaggcatttcgttactttggatagtgggaagattgtaagagacggtgctgttacggatgagaatagtccgttggagtatcagagggtttgtatcactatggtggatggtggagttgtttcacttgattggccggctaatttggacattagggaggagcgtgggttggatacaacggtggttttcatcccgggaacgccggaaggcagtatggaagaaggcgttagatcgtttgtatgcgaagctctgaggcgaggcgtgtttcctgtggttatgaaccctagaggctgtgctggttcgcctctcactacacctcggtgagagctaacactaatccttgtagtcagatactctaagagttccttatctaaaatctatattgatcacctgaattgtaggttgtttacagctggtgatagt

SEQ ID NO: 27115 - DNA, 1476 bp, Arabidopsis thaliana landsberg
tctcaatgtttttgaaagtgattcgtcttgtgatgtcgtagattagtaaagctcccaaggctccacggtaatacgaactcgttattgctctaaatcttttttcctcccatgcaaaaataaaaaataaaacagtattatatttaagataagtaaaaacacataaattattaaagaaattcacaattctaaatgaaagataaaatttgtcgaaataaatataattttagtaagaaaaacaaaaagaagaaatggtcgtgacatttaacaaagattaggtccgtgtgacatcgattgcttataaagattttcttctgcgcgtgatctattttcctaatcatcattccaatcccaaatttcattcattatttttttgttatttatctagcatatttaccttaacatttagacacaaaaataactatcgaaaatttaacaagtttgacgtcttggtttgttacgttagaagttatacaaataaaaaaactcttacaaaacaagcatttttgttcatggtcaatgaaaaatcaattaatggaagtgagttcatttatttacgttttctttttctgtgcaaaaatattagtccaacgttaaatacagaaattttgatcatgtcttcatcatcaagtccgttatagtagtatcatacctttcttggccggcggtgtcccatatctgagccttgacgatcttatcatcgcattggatgcttcgtgtggcgaattcgacaccgatggttgcacgtgagtcgtggctgaaatcatttctggtgaaacgagataacaaattagatttcccgacgccggaatctccggttaagaccaccttgaagaggtaatcataatcgtcttctgctctatatgctcccatcttatttccgaaataaacctttttgcctttatgagacgattataaactaataatgaaaaagtatttggctgttccaagaacttgggatgacaatgagaaatcccaaatgcgttttatttttattttttttggttctaaaaagtttagttttattttctcttgtttttaacgttttctaaattggagaagacaccaatttgagttttgaatattgagaagacagcgagagaaaacagaaattcaaggaatctcctctacttttgaatttggctaaacataaacatttctaattttctaccgcttcaaaacgaagagagcttttgacaatggctaaattcagaaatagttgtcatgtcatcatttcaagaaaatcttttatatatatccaattatgcaacaaatttaccaagacaagactcatcatgtcttcttcttgcaatgccaactatttcttcgtattcttcctatctatatattatgcaacaaagaagatcatctttactcatgcacataatcaaacactgggaagtcacagttaagtgggccttcctctgagtgtagaagctcaaaacaaacatcacagaaatagctacgttctcgcgtgcc

SEQ ID NO: 27116 - DNA, 1709 bp, Arabidopsis thaliana landsberg
  unsure (1)..(1709): unsure at all n locations
ctgcaacttattatcattaatctcttccaccatcttctccacttgagagctccattcagcttctttacttcttaaattagctgaacagttcttgtgtatgttttccaagttccgaaacttgtttttcagctttgatagtgcagagtttcctgatccctgaattgtagcttcctggagttctttcaacgaacccagcaactcgcggttttcttgttctagttttccattctcatacttcatctccttaaaatatgcatctttcatgctcaaggtctgtctcaactctgcaacttcccaatctcttttaccagccaaatcatcaagctgtgttcttgcgnnnnnnnnnnnnnnnnnnnnnnnnncgtatttggctttgaattcagaaacttggatttcaagatgttttcttctggtctcttcctgtgtcaacgcaccgttacacatctgcaacttcttctgaagatcctctgagattctagttactgaatccagcttggtctgaagagagtagatttcatctaaaagctttgatttttcttcctcccactctgtcttgctatccttaaacagattcttaagctttctcatatgccttcctcaagatgcttaaactgctccttcttccatttcagcttctcttctacttgactcttctgctgctccatcttaaccactacatcatctcttcctctcatttccttcatgcctttaccagttttctcagcttcaatccttttcgtctccgctacagctaaaagccctttgagcccctcaatctcagctctatagacattatttttctgctcaagatcaatgttcttctcactagcttcatccaagccagacatcatattccgtttctcctcttcaaattcccggtacttatcttccccgttagctctaagcttatcattcacatcattcacacgcttgacaacagaatccttctctctcaaacaacgttgtagttcctcgttcgctcgcttcaactcggcaatttctctagatttttcctcaatctcaaaaccatgcttctcgttaaccagtctcgcctctcgaatctctattaattgttcgttctgaaccttttttagattctcaagaagctccgttttgtttctatagtcaatcctaagcttctcattcacagctttcacttcatcaagctcttcataaaccttctccattttttttcaaacaatcacgatacttcaacagatctagagaaagtaataaagcaagaaataagacaaaatcttttcaaaattcttagaacctaaaaagaacgattttatattaaatctcaaacctgcacaagagaaatcaaaaccctaattgataaacactcaaaatcagcggatcaatctacaaaaatcaagtacctgattcgtgaacactgaatcttcaaaccataaatttcattaagaaatcaatcgatctgttaaaattcttcaggattagagaatgcgagaaatctggaggagagaagaactgagacaatcgtaaggagccgttggagaagaaagggcaaaagattttaaattttaaatgtcgcaaacggagatcgaagttaacgccgttaattaacttccgttcaactttatgggcctttttgcaaatcctggcccatttctatttagtcccctttttattttatttttttaccatatggtgcctaaaagaattgtatcggaattgattttattttt

SEQ ID NO: 27117 - DNA, 1307 bp, Arabidopsis thaliana landsberg
atttactatcacagagaccgttgcaaatatatgcatcttcgtagcttttaaggtgtcatttatcggtaccaaaaatatgttgatatggactagaatcgtctttaccaagagaatcaaaccattgtggcttcaaaaagtagtccgcaatattgcataatgcttggtccgcaatgatgaatggtgaattaagtgcggactttaatccggtcttgagcatactacataaccattcatagccaaagaagtttacacacgtaaacgaacaaaacggaacgagaattatgcccactcctagtgaacacgaaagcgtcggcgtgtcattaaagaatttcaaaatctgaattaaataataataaacattttaagtccgtcaaatcaatcttcacccgccactgaaccatgagtccatgaagaagatccgtctctaattcttatcgccggatctgtaacaaatcacacacaacaatcaatcaatggaagaagaagatctgattctatctccatctccatacgatcttctctttcaagctctatctctcatcccaattcgtcactacctcatcgctctcttcgttctatgtaccatcttcttctacaatttcgttgaatttcacttccttggagatgcgattcttcgttatttcagatgtcgcgtcaatctcatttgcaatccagattctcctctttatcacggtgttgtttctcggtgtcggattcttcacggccggtgagtgtgtgtaacttagattttgggcgagattgtgaattcggtttctgatttttcgtttttttcagatatgtggcgacgccatggttagcgagccctcatattcagacttgtttcttgaatttccatggattccctccagttttcacctatacaaggtgatttggtatttttcaatatttctgtttgattttgagtcacaaatttgtataaacttgatgttttattgtattgttttagacagctatttcttacttctgatggtggaacgattgcattagattggcttacgaattctgatggtaagatttagtgactgattttactaccaagatggttggttttggatggatatttgaatctgtttgatttgtgtagttcttgatggttctcttcacaataagagtgaaattacaaaagaagatacaacgcctatagctgttgttattccagggttaactagtgattcttcatctgcagtaagtttagttttaaatcacttatctgttcaataatagctaattgactttatattggtgatttttttttgttgtagtatttaaagcatctgacttcgact

SEQ ID NO: 27118 - DNA, 2107 bp, Arabidopsis thaliana landsberg
tggactagcgaccaaacaaccttctgttgtagtcattggtactgaatactcaaccccatcaagcggcaaaggggctgcaatccccactgggatctgaacatacccaactggcatctcacagcattgccccaaaattgaattgtaatcgaaaccttccaatggaagaccggttaaggatttaccggttatcctctgaaccgcttctcttctaatcgctgctgctcttttacaatctccgagtttcgtctccaatgagtacgaagggatggttccgtcgatcactaatttaacgatttcttcatcttccaccgaatcaagctctgattctcgaggaggatcgacggaattaggtttaatcggaagaacctcacgacaatctagggattgattacatggaatcatcccatcgttaacccaaacatcatcatcggaagaagatcggaaaatgagatcaataccacagaaaccaaggaggtagataaacgaagcaacgaaaccgattagagcacagatctcagataagtcaacgacgtgaagaggcgtcgagttacggatcttctcacgccatcggctaagaagaaaataaacagtagcgaagaagagcgagaggaaaaaagtgttggttaggtataacggaagaggaagcgcgtcagaggctttacgaagaggaggatcgacggcgacattagagatttcttctccgttctttttagtcggaaatctacgacggagatcctccattgacgccggagagaagaaggagatttgtttttaatggttatgagattattttgggctccaaagtccaaagtgtgagatgacaaaaataggtgaagagtgtttatttataggtgttgagtgtgacatcgaaatcaacgtcatgttggtgggtcatcatcgtatgtgagagaggagaagaagaagaacagagatgatgattttgtctcctccgtcacaatctaactgcttcttttattatttccacttttgggatgattatttagggttatggtttttgttacttttgattctttttttcaacacatttaatgttatggatttgattgttactacttactagtccaacatggatcagtgaagaattattcactttttaatagttattctgaaaattaacctaaagatgaggcgtttattttgggtctttttgaatcaaaaattcaaaccttcaatgattttagattgttattttttttccccaaattgaaatggtaaaaatcaatctctaaaactataaaaattttccttaaaatataaaggatgggacaaaattttaactcttgggtaaatttggccacattcttaataataacttaaaaagaaaaaaaaaaacaaactaagagaaatatatattctttcaaagctaattatttagtgatgtagtttaaaatttaaatgttactatgccaacacagtaaattttatctttttttttttatctctatataaagaacgataaaccgttcattgtaaaaatacacaacattcgcataacttcaattataaagaagtaaaatctcattctctctcgtctttttgctattcagtttcccgatccttttgcggcattaattattcaatctcagtaaaattttctctatgatttatatttatatccaccataagttaacgcctgttaacacctattttggcttttggaattcagcagttttggctttagatattctcaagtcttttcttattttgctggatttcaattaaccatatgctaagtcgaaccggttcacatcaaatgacattttttttaacttgaatgtagaaaaaccatcaaaaaagattcgaagacaatttcttgttgtcatgaagttacatgatcaatgttctatgcttctatcatctagaataattttcttgatttactcttataatttccccaagcttaaaacagattcatgcatggcgtttgatttcatacaagagatacattgttttcaatcaatatacctgactgtagttgcatttccgaggcacttggttcgacattgacttcagtgtcgtttttgttgttatcttctatatcattttgtaggattttttgtttgaccaagtcaccaaggagaagaat

SEQ ID NO: 27119 - DNA, 1176 bp, Arabidopsis thaliana landsberg
catgttttgtatttcagacatcccttgttcttccatctcctgaatagtttgcttctcttgaattgtgttctccaattccatttctgattcggttctagtctttgagctcttctctatctctgtttccatggttttgatctctttctccagtttcaaagacttcttagtcatgtcgtcaacttcttttctaaccgaagcaagcttctcccgagaaagcttcatctccgattggagctttgttttttcttcctgggatttcagcaaatctgtggcttttcctgtacgcagaatgttatctatcgtgcaaagaacaccctcttcctcatgcctcttgttctcttcatccacttttattttcagcattacaatgttactcttcagctctgcctcagattgttggatcttacccatagcagcatcgatttctcttttgtgagaacggataacatcgagttcttcatttttctggtttagataaccggaaaatgagtttacatgcgcccttgctcgttcttctcgctgttgaaagtaaactgctgatgatgcaaagtttgatagtgagcatctgagagcggccaattttttctctgcaacttcctttcttgcattagtttgatcagaaacagttttgatagatcctagctcagactggtgctccttaactttttcttcggtctctttgctttcctttgacagcttgatgatgtccaaaatattctcttcaagcgaagagaacactccaatagttttcgcagatattgaaagcttttcctgcgccagttcaagtttcagctttgctgagtttaaatcttctgtggacttttcagaagaaatgttacacagctccatttcagtatcggaattagcttcaataggcttcttttggtcaggagaagagagaagtcttttcaattcatccttttccttcatcgcattttcgtacagactcattagcttctcgttctcatcgtgcatctcggttagctgattctccaggtttccaatcattttcttctgttcttcagctgcacttttttcaacctctaaagcaatttcagcactgttctgagcgtccgcattattacttgacgaatctgtctcgatctttcccgaagctctggaactgttttcttcggctacttgttcatacagctctataagcttgttgttgtcctc

SEQ ID NO: 27120 - DNA, 3464 bp, Arabidopsis thaliana landsberg
  unsure (1)..(3464): unsure at all n locations
acaaaggatgccccctcatagcatttgcacaagacgagaactttcaaattttttttagcttttggtgttgtcgacggcgagaccgaggcttcggggatttggttctttgacaatttatcaaagattgttccagatactgacgatttgatgattgtctcggacatgcattcttccatatataaaggcgtcagtgtggtgtattcgaaagctcatcatggagtatgtatagtaacctggagcgaaacatatcagtgtcttacgctaggtacggtgtgtcttgtttattctttagcgccgctaaagcatatcgggttagagattttgaaaaatactttgaagagttaggaggtcggagtccgggatgcagaaagtatttagagaatgttggatttgagcattggacaaggacatactacaaaggggagcggtacaatatcatgtctagcaacaactctgagtccatgaatcatgtgttaacaaaagcaaaaacttatccgattgtttacatgatcgagttcattcgggatgtcctaatgcgatggttcgcatcgaggaggaagaaagttgctaggtgcaaatcttctgtgacacctgaggttgatgagagatttctacaagagttgcctgcgtcaggtaaatacgctgtgaagatgtctggaccgtgcagctatcaagtgacaagtaaatccnnnnnnnnnnnnnnnnnnnnnnnnnnccagtgtacgtgtacgtgtcttaggtacaccaagttaagaatcccatgtgaacacgctctagcagctgcaatcgagcatggaattgatccgaagtcttgtgtcggatggtggtatggccttcaaacgttttctgattctttccaagaaccaattctacctatcgcggatccgtaagatgttgtcatcccacaacatatagtggatttgatactcattcctccatacagtagacggccaccaggaagaccactgtccaaaaggatcccatctagaggtgaaaaccgggtatgtactaacatcgttcattcatctacttgtattttgaagtattaccatgcggagatttgtaacttcctgtctttgtcacttcagaaaaagagacagaaaagacttttaccaaatcagtgctcacgctgtcgacaagcaggtcataacaagaagacgtgcaaaaatccaatctagttccggtgacaagtttctgagccggcccatatagtgtacgcttctgtgttttctcggtgtacgtaagtttatatataatccacctataactatgtacgttgtgtacgtacgtttaaactctacgttcgtataactatgtacgtttttgtctgtgtacgtgttanagttcatgtaataagggtacatagaggtggttgctcaatattttgagtaatttgaaataagttttttgaaaatctaacttattccccctcttaaatgaacggagttgcagatatggttgggtatattgtggttatgttggtatttaatggaaaggacgtaactgttgctgtttattgtcaaatcaacgttataattaccctatatgacggttaccaggctattaccaaaaatttgaatcaagtgtagttggaaccgcattaataactgtagctgttccagatttcctctatttaagtctcctcccttccttaattttatccacaatcctcattctaaatccatttcttctgccggcagttatatcattcacaaaaaaaaattttgtctttcgattcgcttgttcttgctatccgtgagatggaggggtttcatatggtctcagaattgtctcctctgatcactgggtggcgaatttatgtctttgtcgtgagagtcttcaagatggttatatcgcccaacgtcttcgaactcggccttatcctggcagattaagaggtaatttccgttaaatcattatgtgtttttctcgttcattcgcttaacttatatattaaactctctactatcatgttctgtatgtaaagaataaccgtattgaggccaccgttgatcgtcgccttgctccgttttacgaagaccgattcgttgaaaatgagtggaagacgatcacctctttcttggtccgtaagtcaactgacttagtcagagcaacaaagcatgaatacggcatactgtttatggatcggaccgtcgtcgttcatgccccaccgagatcaccaccagttctagatttcgatttcactcccttcgactacattttggataaatctgcatacaagaacgttttagtcggtgaggaggaataactctgacgcttcatttattacatttttgaaaatgtttgtttattatctttgtttctccatcatctagatgtcattggagcgttggttgatgttggcgcattgactacagactattacggtctcaaactgaggttcaagttaaaagatagatagtaagtgttcttttcatttgttttatttacaatgtcactctaaatgctaacagtccttatttctaacgtagcaatgaagtcttggagtgcgaagcccgcaatcaacaggcggagtacttggatggttactttcagagtttgggtaagagaaattttgttgtcgcactcagcttttggcgtctaaccgaactgtctaacccgaagcttgagagccatggtgctatttcaaaggtggttgccaatccggacagagcagaagttgcggatatctcgatggtggttttttagctagagggaatgaaccattattctccgttttaatataatataagactacatttcaattaagttttctttcccagttgttgttgttgtttccataagaaccaaactacatttcagtcgttgctgtttcttgtttccgttttaattttaatctaatttgttgttttatgtacgtgccttgttttattgttcaaatcctctcgcaatgtacgtatagtttctggtgtacgctatcgtgtacgtatattagttttggtgccttcaacatcaaaaactgttagatttatacttatgttgtgtacacaatttcccaatgtacgataaaccaagtttaatgtactatatagtgtacgtacacgaagacatctagtaatacttaaagtggtaattcattcaaaagccagaaacataaaaaagtacaggcagtttatataaagggaaattcataagataagataaataaactggaacgattcaaaaaacataattttttaaacgaagcatacacatgtgttgcaaaatatgtgtgcatccgtcataccaaaagactcgagagtagagccgagtagagtagcttagaccttagcagctttgcttctagtagaatatagcaatctccctggcgtaccagtagaaaaaacaaaccctgcagccatgatggaacgtgcattgccctacgcaactcggcgggtggacaaacctccaagacctttcccagcggcgagcattttcagtgtgaagctggttgaagtgataca

SEQ ID NO: 27121 - DNA, 1507 bp, Arabidopsis thaliana landsberg
actattaggtaacaaatatgtgacataaacattttgcagtccgatgcaaaatatatctttcaatttcaacaatatgtttttttttggtcaacaatctaacaatatgtttaattgcatcttcaaactaaagtcccaaaacatgtttttttctttgcacatggttgtttgtgtggaaccacaataagacaaaggatcgattgcagaatttgaggtcttctagctagttgaccgactaagaatcaatggaccacttattctttaatattatttttcccaactggtttggaaggacttagtgaagaagttacactaaaacttctcgagtcaatcctcatatggtttcttttggcaattcctatctctgcaaaatcaaaggctcttcatatcaattaatatggcaagcaactactttgagacatggcaagaacggaattgttgatcacataataagcaagctctttctcatcaaactacctacaaagttttgcgctctacaagatatttcatcaatcataaaaatggggatctcgtataatactagtcttcttttagggctaacaaatgattcagaagattacaagtgtgctttgtagaaattagcaatatagtgctttgtagaattttatgaccacaagattggtaagatcatttagtcaaatatatgttttatctcttcttattgattgagatgattatttttctaatgagtcgatccacatgtctcattccaattgatctttgtgatttagtttcatatttgttttctttaacatatgaaatttttttgttagtgtagaaaatctaattttcacacaattaaaaataatttttacaataaattatgattagcaaacacttcaaaaaaatctccattacttaaacacttcagtttcctactactaattaaagttgtttccttttgtttaaattgtgattttgctttaacaataaagatgacggcgcataaaatataattatatataaccatgcattattaaataatgaaaaaatggaaaaaaaagaaagaaaaagaaaaacaaatgttcgaccgttccttatttaaagccggaagtcccatagccttgtggtgtttactttttccaattcggagaaagccaaaagagagaacaaggcaataaaaagaagccaccgtcgctacaaaaagtcgcgatttttattttctctatcccaactgctctctacctttcctcgaaaattccttcaaaacccaattctcaagccttcttcttcgtcgtacccgaaaattctacaatctctggatctacgcgtctacttctgaatttcgatttgggtttcccgggagctgaaattccgtgacttttgggttttctgatttagggtttgttccccttctcgtcctttctcgggttaggtttttgtttttgtgattcgtgatgggtgaggaaggttcaatgtttggtatgggaggtgactttccggttgatgattgtgatggtggttttgagtttgaagatgatgacgagac

SEQ ID NO: 27122 - DNA, 1470 bp, Arabidopsis thaliana landsberg
tttttgattcttctcattactctgtcttcgtctttctcaacgacgtcctctgaagcttcgtagcgatttcgaactgttcttgtcaatgggggttgattactacaatgtactcaacgtgaatccaagcgcaacggaagacgatctaaagaaatcgtatcgaagacttgcaatgaaatggcaccctgacaaaaaccctacttcaatcaagcaagaagctgaagctaagttcaaacaaatctccgaagcttacgatgttttaagcgatcctaacaaacgtcagatctatgatcaatatggtgaagacggacttacggcgacagaagcaacggcgtcgtctcaacaacataattactcttctggtaacaacaataattacaatgcagggtttaggtattatccacgtgatgctgaagatattttcgctgagtttttcggtgcatctgagaaagtctttgatggtggcgtcggcggtggcgggaggtttaaaagtgcggaggcgggaagtcagacgaataggaaaactccggtgaacaggaaagctccggcgattgagagtaaattggcttgtactcttgaggagttgtataaaggtgggaggagaagatgaagatttcccgcgttgttcctgatggtcttgggttagtatttcataacacatgatctaaatgaaatcgccttttttcattcagtttcgttcgttatattagtagttcgtgattacgtaaattatatttggaaaagtgttgaccaattattttgtggtttcttgtgtgagtcaatggataatcctctgtatatatgctctgtttttgtgatttatcttgatggtaaaattttgtaatcaagacgaaacaattatccaaattgttgtgtttttgacatttttctttgataagttttctttatttttctctgtttaatgttgttgttattattggtttttttttttgtttttgggacggttttcctttgtttaattgcgtttttatctctagtgatgttgatattgtttgatgattgatgtacctaattattttcttgttgctacgtttgatttttctaagcctagttgcttttttggttgtgatcaatatatattcatgttttgatatcagaaagtcaaagccagtggaagagatcttgaagatagatataacaccaggatggaagaaaggaactaagataacttttccagagaaaggaaaccaagaacccggtgttactcccgcagatctcatctttgttatagatgagaaaccgcattcggtttacaaaagagacggtaacgatcttattgtagacaagaaagtttcgcttttggaggctttaacagggatcactcttagcttaacaacactagacgggaggaatctgactatcccggttttggatatcgttaaaccgcgtcaggagatagtgattcctagtgaggaatgcccatctctaaagaagttcaaagagaggagatct

SEQ ID NO: 27123 - DNA, 640 bp, Arabidopsis thaliana landsberg
ttccatctcttgctgggtcaatgctatggatagcaattaaagcttcagatggagaaagcactgggccagattgagatgatccctaagaacaaaattccacagtgagcagatcaaacttaactcaaaagccagacataagaaatgaatacgatacctgcagcacacgagaaagtgcaacttggaatttctccataggaagattcaccatatggggaaaaatgcggagaacctgatcgagagacaagtttaggaaaataagaaaactataacccaatgagtcaataaaaggggaaaaggtagggaaagagatttacatcatctcttggcaggaatggcaaaattgggaaaagaatctctacatcctgtagtcccataaaatgttcaaaaaccaagaaaacattagagaagaattagcttatggttttgctcttaacgagttttcaataaacattccatcgtcttcacctttattcttgtatcaaacaacttccgtatagtaagtatcaattctgaagaaggagtgggcccctcggtgagggtttgaagaacctgtcatcaaagaggaacaataaagaaatagtaaaagcacattaccactatttacagtatagaagaaactgtgaaggatgataaaaacctg

SEQ ID NO: 27124 - DNA, 879 bp, Arabidopsis thaliana landsberg
aagaatcgaatcatctccgtcgaccaaaccagatctcaccacccagagaaactctttcccgctcctcgctaaaccccaagcgaactctaagatctgctcactagtcaaaaccgttagactcccgaagttgacgtaaatcacagttttctctgctttagtatcaagccaatccaaagattccgtctcttcttcccatagattcaatcctagctttctgatttcgctgttcttatcgatttcgcgattctccagaatctggaacggtccaacggagtagatctgagggagaagagatcgcagagataagagaacgttatgctcgagtttttcgaaagtgttgatgaagatcgcagaagctcttttgattcttccgtttacgtgaaggatgaaactaatcatcggatcttgaggatccgtcgtggtgacgaaatctggaaaatcctttagcttaatgttcttcatcgacggtatccaatcaatctccgtctctaaatgcttcttcaagtcactcgaatctgatggaattcgaaattgttagttgagaatttttcagttgatgatcttcaatcgattcgtacctttgagaggaattatctctttctcgatgagtttttggtaatggagatacaagattaaagcagtagcactgttggtccagaggagaactaccggaattttaagctcctccgctgcgtcaattgtgaagctcgttgaagcgtcggagataatacagctaaccggtggtatatcagaaccggagtttaaccggaggatgaggtctttgaatggagctaaacagttgttaattgtggagtcaataagcttgagcatatcttgcttagcgtcgacgtcggtccaaggaagaccgtcggggatagt

SEQ ID NO: 27125 - DNA, 1589 bp, Arabidopsis thaliana landsberg
ctaaacttctatgttggaagttctagcaatgttgctgctccatagctgctagtggtggtaatatctccacaaacgcatggtttctttgatcaaaacggaaactctacttctgctccaacactgccgtttggatttaatgttatgaatcgcacaccagctgggtacaacagttaccaactccaaaaccaggaggttaaacaagtccatcctcagtattgggctcgttactattagtctatctctctcgttgagtgactttttaagtctccaatagtttgttctgctttttgttttgtttttgattgctggtgatgttgctgtcgggcttttaattaagtctcgagtcaactagattcttgtttcttttcgttatactttgtcttgcagctttatatcattttcttgcggaatatgagtaagctatatgaaggttcatattatgtcattagtccattccgtataaaaacctaagcaacaactgaatattacaaaaaagctagtgactttctacacaggctttatctgtcttctaagacgttctaaactattgagacttatatgtacaaccggttcattcattcatatcccatgagactaccattagagacttctctctatcgtttagttctaactggcgttgtaagatgatatcaacttccgctgtaataaacagagaaaatttgtttactcttcaatattctcaagagtcaaaatgtaacaaagagtcgactagctcttacttgttcatcaaactcgggactcgtcaggtttacagataaatttttcatcagtaagagaacctgttgaacaaaaaaccgtgtaaacgttagttttcaaatcaagacatgttcatgtgcagagttattggttttcataccgtctcaagatttattggatccatttcctttaatctcttgacatgacctgttgttttaggatcaaacacacttcctataaaattgtaaacttcagcgaaatttggcgccactgaattgaaaaaccaacatcaaacaaacaaactcataatcagtatatgaatatcacaaagtcaggaatctcaagcaaaattgttacctctatgtggctttccacaactttcttggtcatttgtctctgtaacgattctagtcctctgcttatctctactactactagtgctgcaacagttctctgagacaccaaattcctctacaatcacaaattcattaccccacattattaacaactcaaacaagcaatatcttcagattattacattagtccacacagcaaacttaagcacatattttacctttgataacagaacttggtatactaacatcgcaatgcactaatccatgcttacgggtggtgctaatcaccggatgtgaattagtgttgtataagtagtcatgttgaaataatgcgtttgaagaagaaagagtaactgcatcaaaaacataaccatgagaaaatgagataaagtaacaaaagcggaagtagaaagataaaaggtttaaggatgccacatttaggagctttttgtggatatgggtgattggcttgactatttggacgaggaggtgggagatgttctttagtcccatcct

SEQ ID NO: 27126 - DNA, 1545 bp, Arabidopsis thaliana landsberg
  unsure (1)..(1545): unsure at all n locations
tatacttaaccaaaacatcctctcaaccactcttttctccttgtccaaggtcaaatgtcatgcattatccattttattttctattattgagttattgggacttttcctttatataactaataaaaggtctattactaataaacaactaaacttttcttttcttttctttttgataaaattaaacaactaaacttgtcgaaaagaaataggagaacaaagaactctaacttctcacgaaattgataaatcaaatgattgcgtatcacaaagacactaaaaagaaaaattaaggaatcgtgtagagttgacactctatacattcagagtagtaatcatgtgtttgatagataacacatagataatggaagtatgaaatgagaaaacttgctgggatcatttatcatttgtggaatcctctaaatcttttctaacttaactccatgtcgtttgagtccaagagatatgaattttatcggtttcttcaatacagaatttaattagaatatagtggaacaacatccacgaatctaaatgtcataagttgttaattgatcaaacgaaatagaatgtacttattataagcttataattttacaagtttgatgtgaatgtaaagtgtactactccactatttatttataaattctgtggtttctaaagaagaccaaatgtttttttttttttctttcctaagaagaccaaatgttatgtcaaagtttaggcactgttttaattatataacatgtctccacggacgaataaatgtacacacgaacatcatagtacgaccgttgacctttgcccctccattgattgataaaaggctaaaagccgaaacattttcattctacgagccttcccattccatttccccacatctctcctctgacctctctttgacccctctcgcctctctctctagatctctcaataaaacagtgaaatagcaaaaaagaaacacaaaaaagagagagagaaagaaactttgttctctctgcatttactcttctccaactcagagatagagtccctatgcaccgtttctaatgaccaatcatctttctccctcttcatcattctctacaacaagaatcacacaaatgccataaaacctccattcttcttcctcagtaaaccaaaccataagacgacgaagaagaaaacatgcaaccactagttcttctcctcctcttcatcctctgtttttccggtttaggtcaaccgggtatcatcaacaacgatcttcagactcttctcgaggtgaagaaatctttggtcacgaatccacaagaagacgatcctctccgacaatggaactctgataacatcaactactgttcttggaccggagtcacatgcgacaataccggtttatttcgggtaattgctctaaaccttaccggtttaggattaaccggttcaatttcaccttggtttggccggtttgacaacctaatccaccttgatctatcttccaacaatctagttggtcccatcccaactgctctctccaaccttacttnnctggagtctctgtttctcttt

SEQ ID NO: 27127 - DNA, 905 bp, Arabidopsis thaliana landsberg
agggttggctttgcactcaaattttcgaaggccattcccattatgttatgcaagtcactttcaaccccaaagacaccaatacttttgctagtgcatcccttgaccgtaccataaaagtaagattagtcttcaacttttaagttacaccttcttctttcattcccaatttcccattatgagaagcttaacatttgttttcctgtatctacatcttttcttacctagatatggaatcttggctctccggatccaaattttactttggatgcacatctcaaaggggtaaactgtgtagactactttactggtggggataaaccatacctaatcactggttctgatgatcatactgctaaggtctgtactgagctttcttgcttctttgcaagttgtttgctacatatgtgtgcttgtatgtatcaccatttgtattgtatgtatataggttcgtgcagggttttctgtttgtatattgttcataaatatcttctggaagcaggtgtgggattaccaaacaaagagttgcgttcagactctcgaaggtcatacacacaatgtttctgcagtatcttttcatccagagctacctataattattacaggatccgaggatggaactgttcgcatatggcacgccaccacttacaggtaactcgtatgctgtctgcattggagctgctattgattttgtctttaaaaacttccttcaatttttcaaaaatcttcatccaacagttttttacttaatacttgacatctaggcttgagaatacattgaactatggccttgagagggtttgggctattggacacattaaaggttcacgccggtaagtttctgatcttttactatgtcaatattaattaaatattaaagatatatatcttcacatcataattatttc

SEQ ID NO: 27128 - DNA, 5302 bp, Arabidopsis thaliana landsberg
ggccgagtggagtaagctcatactggggaacttcttttggattccctttcgtcattggagtctttctagttggggaagcgtgaactacaaacaaatgttgaagatgaagcaaaacatagagaccaatcatctttattttaaataccataccggagctttagcgcctcgagctttcaagagattataaacttcaacattcccataatactttgcatcaacagccgcctggacaatgtcaaaaatgtcaccttaaggatgcatccaaaaccaaacactattaaaacaggggaagaagagaacacaccgtactaccccaacgatcacgagcatcgatattagctctccggctaagaagaaccttaacaacatcataatgaccttcacaggaagcaatgtgaagagcagtacgaccatcaagatcaatgctattcacatctattccttcattaagcagctcctcaacgccattaacatcacctttactcgccataaagagaagctgcatcgtcgaatcaagattctcggggacagacatatgcggctcgcagctaagagactcaggactacgtctgatcggatcaagcgaagattgacgaccgaagctgaatctcatgttgttacgccgtggatcgagagaattttggcgcgtgaattgtcggcttaatgttcgtctcattgatcctgtcgagaattgtctcgatatcccacgcttcaactgcgcggcaatgttgtccatgattgatgatgataatgaatcgcaaagaaccaagatcagtcaatgatcaaaaccacattgtatcttccaaggagagggacgatcgtggtgagctttttttttttttaattgttcgtcgtttatggattatccataaacagatttgacaaaagaatagtttcgttggctcaaaaatgtcgttttgagcagtaaaacgcgggtaatcactattttctaatctctttatttattggatccatacataattagatgaactaattagaacttatataattaaccaacgccattaataactaagcttaatttaatatgaaaatacaacctggagattggtttatattaattcaaacgttgacatttttgttgttataaccagtccaatttagcaaaattaatcatcactgcactaattaaagatgagagaacttgttcgatttcaaatgaaagagatgacattaccagaccaaatacaattatcaacgacgagattgaacaagtttacatcttctacagattattgactgattcctcagaagacgacgcgaaactgtggagcgtctttgccgtcggcgggaagaatctcccaacggcaaggttcgagatcatcggaaacgggacagtaaccagcgagagtgactctgtctccagtagcagcaacggagccgaactcgaaaaccgtcgcgcgatcgggccgaggaacttctatggctccattcatccccggggctggagtttctgatttcggcatctgaatcatctccggcttagacgtctcggactgtgatggcttaggacttcccgtgaaccatgatagaatccccatttgctactctcgaatcggtggttctcaaattgtaatctgaggaattagggtttatctttttccccttctgatctgctgagtttgttacattgggcctttgaattattaagctgcgcttcacttgggcccatttaaacacgaaaatatggaatttaactatatgcccttttatttcatataaattccaattagaacccatacccttaaaatacgacatacaaggtagtttttttgtaattttacatatatccatacatggatagatttctttactctcaagcaaccttgagaacttgcttaccaacgttttttccatgaagaagtcctacaagagcagcaggaccattctcgagtccttcaacaatgtcttccacgtacgctaatttctcttcttttatgtagggaagaacaaactccaagaacaaaaggaatctatctataaagtcataagaagcaaacccttgcatccttatcttcttgaatatgatgtcaggtagattttgtaacctgtctctggtttcaagatggtactgagatatcatcccacatacagcgattcgtccatacgttttcatgttaagtagacccgcgtcaagcattttgcctcccacgttctcaaagtatatgtcaataccttttggtacacacctgcagagagaaatattgtgaggagattttgattcaatgattcaaagaaactgatttataagaagccaaatatgaacctcttcaaggcggagtcaaggtcaggctcttccttataattgaatgcatcatcgtaaccgaatttgttcagcaggagatcgaccttttgtgggaaccaaattatgtaattagagaaaacttatatagagatagtttaactcatttgattgatgagtttcaaaactatggcctaaccttttgtttacttccggcacttccaacaacatagcagcccatcaactttgcaaactgacccacgagctgtccaaccgcgccagaagcagcagacacgaacactgtttctcctttcttaggtgaacatatctcgaaaaacccggcgtaagcagttaaacctatcatacctgttatgaaaaaacagagcttttaagagaaataggtataggtccataacactattacactttttttagtttctgtgactaaccgaggattccagtatagtagctgagaggaacattgatattgacgtcgattttgaatatagcagccgggttgatagtactaaactcctcccagttcacaattccccaaatcatatcgcctttcgtaaaagatggatcatcagaatctattacttgagacactccaattccagctataggctgcacaaagaatcaacaacaatttcttattaaggccttgtgtatgtatgtatgtgtgtggagagttgttacctttccggggatgaaggcatccaaaagtgctagagtggaaggagttggttctctcatgagaatccccatgtaagggtcacaagacaagtaaagattcctcaccataaccgccgctgatccgggcttaaccttgagttccacggggtctgaagctgtgataatcattaggtcagattctttagggatacccttcacataatttctcagtatcacttgcttgtttttcacggtggtctccatattcctctgttttactcttagtaaaagcccttcttgctttggtcagatctatatatcttcaaaactgaacaaagtttaaattggtgcatctcccatcatacatagaatgggctcatcatagtcattatcacagtactatgattatgaattgcatgcataaagtatgtttggtaagataaaatttaaaatagtgtatggtctaattcataatcatagtactgtgataatgactagtgaccaacaaaattactataaaatgtaattcaaaccacgtattagtagatactgtaccagctccattatgtgatgcgacaacactatactttgtctgaaactctagatctgaggtatcagagaacctcaccaaatttgtctaaaattctcttgagtgtgacctaatatccacgcattttgtaggaattttggaaataagaaattatattctaatagttttcccatgatttatcattgatacataatttattattagtctagtagagtttgacgaggtatgttaaggttactggtttaacagctgagggagagactgccaattgttaaagaaagatagctccctgcaataaaagaggctcctgcaacagtaagagcaatgcgacctgtattgcaattcatgagtttcatgttacacagaataattctctaagctacatgaaatattcaacttggatcttgcgcttcgatgaatctgaaactccaagatgcgtctttagaagtctttcatgtggatgactgaccgtgatgtgcgtcccaaaaccctggagtacctacgacgagttgccatacgcagcattatatggcgtcacatgtatcatttccaagccaagaccaactcaaatcgggcattacagattaacggagttttcgatagagggccaccaagactcacttttgcttttgtttagaccctaaactctctaatattcaacaatgtgctgccacgattcattgtggtacttaataagaaattcatcttacacatgtcacttatttttttcaaaaataataaattagttgaaataaattcgattgaacatatgttactttattttttatatactcatgttcttagattgcacgactaataaccaatgtaaatgttcttagtattagctagatgaaatatctctcaccgtctccgtccaataatatccttaaattttgcttttatatattggatttgtaacatttcgatttacttagacaacattgtttacacgtaattcatttatatagctgataatactatattaggcttaggctataggcattatgatgtacaatttatcgatttgattcgttttattaaacacaattcccattcattttaaatatccacctacgttcataatcattggttagtccgcattgactaatgcataacaaatagcatcattagaaattgattttgcgaaaatactagaccataatttcacgtattccaaccctccgggaataaagccgtaatatatatgaaaatacgacgttacttacaatttcactactaacaaaaagaagacaaatatttttcttttctggtcatagacaactgttgggccgttgaaatcctgcctcactacctccagcgtgactacaatctgttgttgctggtttattccggtacgtcaacttcacatcttgaattcgaattcccgtgcacggcttcttagagctacagtctaatttcactccaacttccgtcgccgatgtcccgtgtatatcgaagaacattacatcgctgatttttatcccagaaacctatcattcatatcaatcatatataaaccaattaatatctaaattaagaatagctttttatgtgacgtttaatatgttttgagaaaaatgtggacctgattagggcaattttcgttgccagggcagtagttttggtcaatgacgattgggttttgtacgttgttcataacacaatgctggaaacggatattcttagcaaatccattactgggcctggcccatgactttattctcaccccattctctgttcctgtaaacgtcgccgttttcactgttatgttttgtacacctacctccacactttcttttcccaagctcccaatgctg

SEQ ID NO: 27129 - DNA, 375 bp, Arabidopsis thaliana landsberg
ttatacgcgccacactgatgcgcgtgtactttataggctcatatagtaactcctagcgacgtcagtgagaactgagaactttctccttctttcctaaattccaagtcttgaacacttttttctgttaaatgttagtgcccagtctacgaaatccaaaccttcttaagttctctaatttctactaaatatctctagcacgatcatgctatatctacgtacttattattgatgggggaccaatgagctcatgtttatatatcaatcagtatgatagtccgtaaatgctcgtagacacctggcatcttcggtatcaatttggcatttattatggattattgtttgtgttcgtatacatctgttgttcttgcttgttta

SEQ ID NO: 27130 - DNA, 1333 bp, Arabidopsis thaliana landsberg
ttttaataataaaacaaaacaaacccaaagccagtttattattcaatcgggttttgtttgggacattgctaatttcaaggcccgttctgatcaaaggtttggatgttggataaacattttttcagagagagccaaaccaatcgaagcgacaaaccctaattcccaattttttgagcaaaagacaccgtcagcaagagatgatgcgtgcttccgtgtatgccaaggtacgcgaatatgaacagaacctgcagctgaattctctttgtttgatccgctggtttcattgattatatatgattccaaatgcatttcagtattgtgtatccctgatctcgcaatttttcaaccagagtaggggtaagcaagaataatgtgtatttttttttctcttggatatgaatacaaatttcatggaaccctaagatataagaggttcaaatttggattgagagaatcagaacaaagtttaagattaagcgaaaggagtttggagaagacttataaaaggctagtggaaaaggaacaacaactttgtgaccgggtaaatcaggtaattaataatcataaccaataacgggcatttttattttggatatgatcataccaattttatttgatcaaaacaaatttagagatcgaagaaagtaaaacaacgtttgaaagaaaccgagttgagtttggatgagatttctacaaagcttgatgaaagacatcgacgactctttgataggcttgaggtaactaagaacgagttttttttgtgtctttcttttataaacactaattatattgaccctatgttatgtttggtagaaatcagtacaaaaattggaactaagtgaaacgaatttggaagagtgcttgaaaagctacgactatgccattacaaagttgaggaagtgtggatgaaggaatcgatgaggaagagtagtactgagagaatcatgaatcaaaacctttggaataataattaattagtaaaatgtttctagaagtcttgttacggttttaggttcctttgatcctattaggactaggtcttatttggatgattgatacaaggtaaaacgttacatcttccttccatcaccatttggtttatccaagcaaattcaattgcttcctttgaaaatgtcaatttatgtataaacccactactgcaaaatgaatgcaaccaatcaaatataattatattaatgtatgcatataatatatacttttgtggaaatgacgatatattcctatttcttagacagcatattgcgatgtccttacggtcgagaatattgcaagacaatcaatgtatatcatcaaaatgtcgtcgtgttggcgt

SEQ ID NO: 27131 - DNA, 1969 bp, Arabidopsis thaliana landsberg
agatactataaaattgtgcccagatgagttattgattctgatgttttttgggttcttcacttttgtttgtcggggagtttgctaatggtttgatagaagccaaaaatgaactacaacacatgtaagtggacactaccataacagaatatcatatactcttatccatcaacttagatcttcctacattttgaggacacaggaactacaaatagctgcttcctgtactatgcttcgctatgttgatggagcgacatgttgctttactgagttagccttttcttcttcggtgacactgagttaagcctgatcgtgtctactgtaggacagaagtaatcaagcgcaagtgttcaataacaaaggcccttgtctttaaggctgatagatctttctttgaccgacttcgtcaacaggtgaatttagcttcatcaattgattgtctgatttttatccgtctgttgcttttgaagttaattgtttgtgtgtcatcagatctataagctggagatggaacaaaaaagagtagaagaagatgcacttgtatataattggctccagcaacagcttaaactctcacctgcatacaaaaaggttaaaaaccaaactcaatcacttgtttccaaagattgtgtcctatgtgtccaaaacctcaaaaatctgttcaatgatgtttctgattctagattaatcttactgattgttgttgctgtctgataaaccagtagagtcttatctcctgtattggactctgttagcataattgggacttcccttgagatttttggttatctctagttaaagccgttaatactctttatgatactactataggttcttgaaataagcgcttccatggaactcaaagacaaatcgagcacagagttagacaatccagatgatgaattttcagacatttccttcgaagagctattggaacaagaaaagaaagactcgttttggtcagcatttctctccatctctcctcaagcttattagtaaatctaaattacttgctcatatgaatcttgctccatgtataggcctttttgagtatttccgcaatctttcttcatattgcttatcctctataaccatcttactctccactcttgtgttggttttcaggcataaaaatggaagattgcgaacttgcagaacatgatttggtgattgaaactgccgcgagctcagcaggaaaactgaatccttttttgatgttctcctattttaggagctgagtatagagagtctcctccatagggatgcgttatctatataacacattacccggactgcaaatcgattttttcagttcgggttgaatcaaactgattcggcttatctgaattgagcaaagtccaaacgtgcatgagtatcgtacatagtgaggcttttttcgagaaaaaacactgttgataaaaatatacaaacacaagcatcatgactcatgagggataaatgcacttgaaccgaccggtacaattatatctgcttgtgaattagctttaaaccgaagcatatgcaacgcggccagtggattttgttcctcagtaaaaatctgtcagtttccgcctcgaaatgtgagaatttcggccacagtctactaaacaaacgcactggccagtggctatgcctttggtttcattatcttttgcttcatcttcttcaaaagccatggctttgtgctctatctgtcctcgcatccctcttcgattcaggccaaaacccatttccccttttctctcaaaacctcaaatttgtctcgcttacagggtttactcttccctgcaatctactactccctctaccagaggtaatttcttgctttgtattatgcatacactggttttccagaactatgaattacgtttaaatggattaaattgtgaagtgtcgctctctttttaggacaaaacccacaagtttcgagaaagatgatcgaatactataatctcccaatctttaacctatg

SEQ ID NO: 27132 - DNA, 1439 bp, Arabidopsis thaliana landsberg
attacacaaggcttccaatacatatacagaattccctttcttttatagattttttaaatactacttggagtgcgtttttcgttttcagttattaaactagctcaaggtgtttgagtattttggttggttccattaaggaaccaaaatacattttttattcaaatttcattcggttcaggtaggtttaagaaactgactcaataactaagtaggatttgaaagttttctaagtatttttcggtttagctttaagatatctgaaaaaccaaactattttgggatatatgtattaggattttctgttttttatttgagtaatttttgtaaattctgttcaattactcaaatatctttcgattatccaggtatctggaatattcaactcgaaaattttggttcacatattttaccaaaagctagagctaatttaaatcagctttagtatatatatgtttttttttgttttttctttgattagtatgagagttaatgttaataagaagtattcttagtttttccctctcttttctttgtttaaagtgagagttatagttacagtaaagctttttttttaaaatggtcccatcaaatactataaattaatgattgtataaatatatcaaaatatatttttacaaaaatccattgtagtttttgttagaattcattgctaatattttcaccatatcaatttattttttatcatctgttagacatgataaatgattgattatttttagttgattttagaagtatattgattataacgaaaaactctctttcaaaattacaaaataagacaaatctctatatagattaataattaatatctttgttaattaataaaatattttagtctcaacattattaatctatagaggttttactaatatgcttataaaatcagaccgaaaacatactaagatacatacaggacatttataatgatagagcttctcagtgcaataactgttcttcgtggacagataaaaaatatctactatttgacaaaaaataatattgacaaaaaaatatatgtatatatatttatctagaaaaatatcgagtcattgatgtataacctgtttcgattttccaagttattatgtttaaagttttggagattttttagtttttatataacatgaaaaatattaagctataatctttataatcagttaaattttagtataaaattcaataaaccatcttttatttaaaaaaaaagaatgcataataataattaatatttatttcgactttagtttatgttttcattttttctccaaattcgaattaaatgatttattaacttttaatttaaatcaggaaaatttttcatattacaaatataaaaatgtagtttttaattaaaagagaaaaatgatatttttcaaacaaaactcataaataggatcggtttcaaagttgcccaatat

SEQ ID NO: 27133 - DNA, 2057 bp, Arabidopsis thaliana landsberg
cgaaattgcttggacaaaagaagctgaacacgacaaatcatttttgcaatttacgttttcaaaaggcatatttgacaggagaagttattgtctgcaataaagaccaccgtagtcacgagtgtctccacttgaccccacattttccctatcattcgctctctgccattcgattattgagccctactcttatccgttattgttttttaattctcgttgcataatctcactaatgtatatataacactcgtttgaattttgttaaaactattttgttttattttatataaaattaccgaaattcaatctacaaattcaaatttaaattaggttctctacatatcttaaaaagataaataagtgaaattcataatgataaagccaattttgttttgtaactattattagcttcttttttcttttttttgaagcaatgtatctaatctattctcttctaacgaaagagtattaattattatagacaaaaaaaaaatagtattaaacaagcctacgcaaaacacgttcagtattaggttatagtttttagtactaattaaaatatgagatatgagttttttttgttctattagaacttaagaagataaagaatttataagttggtgcgactccgaattactcaaagacaccaatcatcgcgttatcatcctaatctacaaaacaagaggtcaaattttgcatgtcacgtcacaatattgtacattatcatcacgtttttttacaaagctatagtatatcaacgtatacatttcaatgaacgagttttcatttgactatctatccctaagtttgaattaggtttatcgaatctctttctttatttatatgcaaattttaatgatgtcattttaaattattataagaaaatatccccatacaaaacatggtgaggcttatctcatgcgataatactttaaaataggttatgaatataatcatgtaattaaaaaaaaagttttaaattaatggggagaaaacaattagaaaactacaaacacatgatgatagaaaagtaggttaaaagtccatcacatggtgctctctcacagaacgagaccctttttgttgaacgttactgttgggcatgagattcacgcaaatcctatgcgacaaataattttctttccataaaaatctaaataaagaaagaacgtaccattttttatatcgaagtcaaggactatatatatactattgataagaataatatactcagactatactattaattaaatggacccacgttaataacgatgtctgaaataaccaaaaccccaccagacaattcagacaatatttctttgtttctttatgcatgtgagttatttttattggtagagaaaaaaaataaaaacaaataattaatttagtactatttagtacataataaattttaaaatatttcgaccatgtgatctatacttcttaagtacattactataatttgaatctctcacgtaggtacatacacacgtgtgtacacaaaacactattttctctaaaatttaccaagtgcaaatatcgttgtttcactaaaatcaccatcaagtatgtattacttttacgaaattaatcggatttggagacaaattcaaagactagccagatttaggggtgagataatccatttgcaaaatagatttgaaaagagattttagattttctatctttattcggagagaaacaatcaaagtaagtgaacttaaaatcaggaaacagagttaataatcagagtaattattaaccatggttaagttgaataaccaaagtaattaacgtgcataagtaaccatggttgggtttttaaaaagagctttcatacaaacttcaattaccccagcaaggcttgtctccttctctctctctctccctctctaactgtatcttcttcttcttcttcaaccttcagacttttctagttgcaactctcattcaattgttcaatttctctgtaaaaatcaaagctttttggaatctttctttggcgagatatttcttcaccggcgcaagcttctcttgagcgtgattcatcactgggtttg

SEQ ID NO: 27134 - DNA, 894 bp, Arabidopsis thaliana landsberg
aatgtcatgtacaggttagtaaaaggacaagagagggaacaatgtgaagtgagaaaataaaataattgataagtgccagtgtcgtggttaagtctttaaaatcatttgatcgctcttcgtttggctttatgtcccattccgatctcttgtctatgtgtggaaagtgctatggattgctactaacttaattctaaaaccaaaagtatatgaagcacatatataaccaataagtgcctctacaaatatcttctggtttcctcattataaaattataaatatataaaatacactttgctggcagaatatttcgttacatcattagtaatccaaaggtttagtttgtctttaatcaattatttatgaaacaacaatgtatttttttccattatcagaaagacaactatatatatgaagttatgaactataaagacgtgataatatgtagatcgtattaactatatatttttggtcgtttataaaacttattatggaactggaatcgggttatgatgatacgacaaagacaccagtacaaaccattatgttataaacccctattccacaataactatttaaatgagtattttgttatgataacttgaaaccgcccagtgatatttttatttttatttcttgaagaaaaaaatatatgaaactcaaaactccggcacatgattttcttcgagaaaacagttacctcttgttgaacatatatgtagagtgtgtaactgtgtattcattcatgaacgtgaccaaatgtatgaaataagtatgccaacaagaagtagaactatgactttacctttgagcgatatttacctttgcttaagttttgccccaacccactgagaaacctttgactacttgcggggtcagggctcatgagggggtacc

SEQ ID NO: 27135 - DNA, 1144 bp, Arabidopsis thaliana landsberg
accggcggttctgaagagaaactacggcaaagcaatcgatatttggagcgccggagttattctctacatccttctctgcggaaatcctccattttgggcaggtaaacttcaactgaaccactaggtttggttctgtagtttctaaagttaagttgatcttaatttttggttgtcgtgtgcagagactgataagggaatatttgaggagattttgagaggagagattgattttgagtcggaaccatggccgtcgatttcggagagtgctaaggatttggtgagaaacatgttaaagtatgatcccaagaaacggtttactgcggctcaggtcctaggtaaacgttactagtatacttggtttgtttggtttaatgtttcgaacgaaggaaattgaaccggttttggtttttctttagaacatccttggataagagaaggtggagaagcttctgataaaccaatcgatagtgctgttttgtcgcggatgaagcaactccgagctatgaataagcttaagaagcttgcattgaaagtaagtatctttgatgtttcgttttacttgatgaaattagaccggtttcgattcattaatatgatttggtttggtttaagtttatcgcgcaaaatctcatagaagaggtactaaagggtctcaagacaatgttcgcacacatggataccgataagagcggtacaatcacttacgacgaattgaaatccggactggaaaaactcggttcgaggttaaccgaaaccgaagttaagcagctcttggaagatgtaaggcgttttgttctctttactaacttaaactaaccggttttgatcaatttggttaatgttttttggtttaggctgatgtcgatgggaacggtactattgattacattgagttcatttcagctactatgaaccggttcagagtagaaagagaggataatttgttcaaagcttttcaacatttcgataaagataacagcgggtatgtgtcggaaaccgatatgtaccaaactgatgaaccagaattaaaccggattaataaccaaattacatgtgtttgtaggtttatttcgagacaagaattagaaacagctatgaaagagtataatatgggagatgatattatgatcaaagagattatctc

SEQ ID NO: 27136 - DNA, 1496 bp, Arabidopsis thaliana landsberg
gaaatttcaaatttgtcagattttatatgtgctaactttttcatgatgcttttggatttgaaatctaaccaagagtgccatgtttcatgatgtcagcaaaatcgaaaaaaggaaattcggattctggagaaggatcagtttcagaagtgaccgacacaagtgacaatattgtaagcgtcgtctcgtttcaaaatttgttattagagaaatccttccttcactctttctaataattgctaatatgaccaatgattataactctattcagaaatcagaatgccgtttgattaaaaagtctattgctcaattttcagggaccaagaagaagtcggagacagagaatttcgtaggaacatgatcctgtttaacgacggagttcctcctaaatatgttgataatctcgtacaaaataattagcgaatccttgactagagttaaagtgttgatgacccacaccgaaaagaaaattaataaaaagaaaaagttggtcactttttgttggtttctcgacttcataatcaaccaggtcaattagttttaaacttgtctaaactcatccattatcttcctaatttcacataaatccattttcttttagttgcaaaatttgttcatatttgatgagaagaccatattattaggtttaaatgcagttcgattggttgtgaaattaggtgtgaaattgacaaataagagcgttttgtgcaatgagaattggcgtaccaacaggaaagaggttatttgcatggccgttgtcagattgatgacctaacaattacacacatccaacggtccatatcacctgactatacctccacgtatttatttcctcatccaataatttcaaaataataataaaaaactaataactttgttttcttcttatatttttttcgtttcgtctttccgcctccacagtcctctcgacgtctccgctaaaagaccattataccctttactgttctctctgtcttcctcctctctatatttgagcctcgctgctgttttccattttttattgttcccgacgacgtcttctctggttccgttctgcttcgatcacggtatattccatcttcctctctttcttatgcttcacattcccgattacattcttcgaatgtgtttgtttcatggaagtgtgtgtgtgttttttataaggctagattagtttgttctacactcgcctttttctcagatcttttgaaagttaaactcaattcctccgtcgatcaaacgaaatgtagtaaaattagttctcgagggggttcttcttaacgaatatgatttacttgagtttatttcgtgtagctcttctctgtaatacatacaactaacgcgtgtattaaagttggttttattgaaattgatttatgttattaatattgtgatggggttttggttgcagcaggtggacgtgttttattaaccatataattctttgtttgggggtcttagtgaaagatgattccttatgctgctggtgatattgtgcc

SEQ ID NO: 27137 - DNA, 1632 bp, Arabidopsis thaliana landsberg
aactattctcagtctcacaactaaaaattaactttccactgtttataatttagtgtgacaggaaaaagaagattctactctttaaaattatctaaccacaaaaacgagtatttaaattgtttgtcttttttttttttccattgaaataacaagactttaagggtttgcactctgcagagtccactcctttccaaaagactcaatcctttgacgttataacgagtaaacccaatgcacctatgagaatatactgcaagaagagaagatacaaatgtagcggtcacaaaaccggaaacaaaaagcgaaaaatattcatttttgattggatcaaagagtgaaaatgtaccttgatgataggcttttctgtcatgataatagtcacccatccaacataaggcaagaacctaaatcagacaaaaaggtaaaacaattatgagtcacggaagagctttgatttaagtattgcacaggtattgagagtattgtgactcaagtatactaattacccgacagcacgacccattatatgatgtcgatgaagccaaagctgtccttcagcatacagaagtctgtcatctccatagttattgtcacctggtaacatgaattgaaatgtgaatgtgtgtatccacgagtaacactaaaaaacaactcacagtacctttcgttagaacatcaacttctcctgtattttccctttcgtgaacctataatgtgataaacgcccaagaatcagttaggtttctacaccaatcttttacaacatacgtaccaagagataataagaggaagtctagaaaaatgttaccttaatgacacgatggacaatgggaatatcacgaccctgaggagaagcatgatgcaaagaaaaaccgattaagaggaagacccacgaattaaaggagagaaaatgagacaaagagaaatgggaaacttacatcaacattgaaaacaacaatttcacctgctcgaatcgggtctttactcatgtgcaagaacaatatatccccctataagatatcacattcaatacaattttgagttaacaaacagaaatatgctgaccctcaaatagattattagtagctgattcatccacaaagagagagtaaaggcgctgtaaaatcttatgtatcccgaaaacctaagtccaattaccctcttaaaaccgggttccatgcttccagagagaacaaccaccaccggagattcgcttccagtgacacacatcaaagctttccatatgatcaaagcagatgtgacaatcatccctaccagaattcaacacagagagcaatttatcattcacttaagacacaacttttgtcatataactcatattgaaaacaaataattcaaccaccaataaatcatcaggtgtctaatcatgttagctcacaacaaaaacaacaagtctcaaactttaacatttcgcaagtaagactagtaatatactcggaattagacctaatttttcaggaaaacaatcacaaatggaacaccatcgacttcatcaattctaattaaccaaaaagggtctctaatttactgcaaatgttcaactttggagcagcgaaggtcatacattagtgaaatcttaaagccaattcatcgatataggacacagagatc

SEQ ID NO: 27138 - DNA, 905 bp, Arabidopsis thaliana landsberg
aagtaacgcattgtttcttcttgctttatccactgctcttcttcaagctcaagagcatccggtgcaaacatctcagccttaagaacaacatctttaatcttcttctttagtgaaaacaatcctgagacaaaattttcaaaatctcaacaaatatataccaactttccaaaatcataaagctctcaactttaatctgtatagaacaaatttcctaaaaccagttccaaatttactattttgcttctcctaaaaactcaacagagacatacccaattgcttgtagacggtgtccatgtcatccatggaactagaggctcgaacagagaaaatcagaaatcgagatgatgttctcttcctgtaaaagcgtcgccatgagcagcatccaccaataatctttgccgccattttatttcaccggagctccgactaaaatataaaatggggtttaagcttcgtttcttgtccgcgtaatgggtcaccacaaccttatcctttaagactctgttttaaaatttgagtctcgaatgtcttccacgtaattctccttcattctcataaagtttagtcacatagacacaaagcgaatcaacaaaaccgaatttgcaaaacttatacgaatcattagataaattatttgctggggtaatcagtgttttacgctatgtctcgttgtcgacgtttcatctgagtttggagggtatttacgtaattatatgtagggtttaaggtgaaaaattgaagtcaggctcgagccaatacgctgcgttttgattctctctgactaatcctgtcgacggagttgcttatcccggcaaattttcggcgcgatatcacccaattcagaagtgacacgctctcaaacgccatggtggttttgatttcaagtacagtgacgatttgcaatg

SEQ ID NO: 27139 - DNA, 2827 bp, Arabidopsis thaliana landsberg
  unsure (1)..(2827): unsure at all n locations
catatatggtcattcttatcctagtaacaactggaaacgaatattgaacgcgaatacgtgaaatacatacatttttgttttttttctcatgacctacaggcaattggagcgttaaccgcagaagctaatgtgttcttaggttacactcattcataatctctctcctttatttgctccccacaaacaataatttcgtactttgtcctgctgagacagaacatggagtttcctcattgctgacaagttaccagaagcgatactccattataagctgtcatcaagaatcgtagagctcaatagctctcgaacaaactcactgcgtttcaacttctgcttgtgatcctcagctgaaagagaagtttttttcgcattcctatcatccacaaaaccttcatcagtgatccatacatgtcctatatgggtataagaactcaacttgatcaaagagtttcagtttggctcataaatcccaagtgtgcccaaaagtaaaacattgaagcaaatgttccaatggaaagttatagaccaaacacttaaaataacctagaatcatctaggttcaatcagtcttgaaataccagatttttactaacaagaggttaggcaaagtaaaatgattgagaagaagtaagcatactgttcgggtaaacactgaatagttgttttcttgacaggacccgtttctgcagatatgcatgactccgtggtgaagaacccatcagcaataggagaaatgaacgacgataacaatgggtcagcagctacattggatgatgaggaagacgatactatacacgaagatcctccaaagaggctctgaaagtttccatcaggaaactctctccttaagatcgataatgtggaatatgacccgcctcttcttggttttctcttgcggtgcatgtaatattttgtcaagaacacaacttaataacagactatagaaacactgatagaaaagattgattgttatatatgacttgggagaaagaaaaaaaggatatcttgaaaatattagcgtgctgaagggttatatgagcaaccatgtcaacacccaccctaaccgcacaaactggacatacctgcaataacaatgttcactagattaaacgctaagttttcatagaatccaaacaaaatcccccaaatatcagatgcaatagatacagctgatcctactattccttcgtgaatcggctataaacatgctattattctcagttttctttgtcatatcatccaagtaacaacagaggaggaaccaacaccgctcagtctaaacttttgagaatcatgtgatgaatcagaaatgtataaacgcatctttatgcttcaaatggttgttttaaaaaagaaaaaagaaagttaccccatttttggcttccataggatgatcttcatctatgtggcagcagagagagacaatatcaaaatagtcagaacagaaagggcaagcaaactcttccctgaactcttcttctccatctatctcttcaaaccctaagaatgtatctgcaatcccaaaaacacatcaaccaaatatttatacagcaaagctataagaaaacaaagagagtaatcagatatactaaacccctactctacctctgaggttacagtatatgaaacatattctcctcttctgaggagaacaatatcttcactttctcatgttcataaacactgagcatagtagcatcacaggagtaactaaaatgctaacaaagactgcaactttggataattttcatccattttctcaggaatcgagcaaaaccagaatcaaaccatatttcatcagtcaataaaaatcaattacaaaagccccctttccttcatttttgctagtatcaagcaaagccctaggcgatgaaaaaatgacaaaatacgaaatctttcaaaacaagatcgaagatttctcatatatttcttaatcttcaaaacagagattctaaatcggaaagaaaacacaagtctatcacctaaactaccttcgcccatcaattttcagacgaaaaaaaagatcagataacaatcatttagaacagagggagaaaaaattcatatcatttaaactaaccagatcgtgatggaaaagctagctggtatctcctcgtagctgaagcgagacgatcactccatgaatcggaatccattattgacaaaacccggaaaacaaaagtcgaaagttttgtacttttttccttaacaaataaaacgttttgaagaaaatgaatctgtatacgaaagtaaatgattctgattactgtctgaagaaatccaacgaaaatggtaaagacagattatgaagaccacgattctgggtcggtttattaacaaagttttgtctttctttttttcttcttctcctcgttttaattaattttggatagagagtgagagacagaggagacaagttctataaattatttctttaaatttatgttttttatctaaaagaaattaaaacgtttgctttcagtgatgaatcaaatatttcgcggaaaaatagaaaaacaagaaagtgttgggccactctataaactctttttgtaaagtctacgaaaatgcatgccgtttttattattttacccgacgtataattgcattcagaaacatgacgtttccaaataaaacgtcatgctgttgtcttttagacacgtggcgtgttttcattggttttatttataagatttcgcagttaaagatgcacgcaatagcaggagatttttagccccgttcttatgttttttctgacttgtgactttttttttttttnttgtgccaactgtttatttatttatcgatgggatgttttaattaattt

SEQ ID NO: 27140 - DNA, 3271 bp, Arabidopsis thaliana landsberg
tttccctaatttctcttctcctcatccatagcttccgacgagagagaagaagcaaatattcgatcgctctgggtttttgatcttttagggtttctggcaaatttggatggaaacctcaactttatccaaagatagtcataaaggaagaagctttcgttgttgtttccattgttccagctccttcaaaaactcttgtctctattgctttcacagctaagaattctcgattccatcgttgtcgttttcgattttgacgaaattgggttcttctagattttggttatggaccgtatagctcaatcagatctctctttaggattcggtagctcccacgctttacctctacctcatcctcctagaatcccaatcgctgatgactcaatcacgcttcagattgattccagcttccgtccttcgtctaatcctatgcctcctgttcctcttcagttacttgagcagagattcgatgtcaccggatcctgtagccgagttgttgaggaggacgatgacgttgttggtgataatgatgatgatgatcaaagagaagaggagcaatttattctcttgggtcatcctatgaagttgaaacgaggtagaggtgggaattcgtattcattggcatcatcaagtccttgtaagagatttgtagttgattcagggattgaaagtaggcgagctgttgttagagcttggggtaatcagtcgattgaagaagctgatcctgagattcatgagtttatggaaaaggaaaagcagagacaatttagaggtattgagcttatagcttctgagaatttcgtgtgtagagctgtgatggaagctttaggaagtcatttgactaataagtactctgaaggaatgcctggagctagatactatacggggaatcagtatattgatcagattgagattctttgccaagagcgtgcgcttgcagcttttggactaaatcatgagaaatggggagttaatgtgcagccttattcgtgcacttctgccaatttcgctgttttcactggtcttttgatgcccggtgaacgaattatgggattggattctccctcaggtggtcatatgagtcatgggtattatacaccaggtgggaagaaagtctctggtgcgtctatattctttgagagctttccatataaggttgaccctcgtacagggtatattgattacgataagcttgaggaaaaggcgcttgactatcgtcctaagatacttatttgtggtgggagttcatatccgagggaatgggaattccctaggtttaggcatattgcagataagtgtggagctgttttgatgtgtgatatggctcatattagtggtcttgttgcaactaaggttcgaatcttctactactatacttttattgatatgttgattagttctgagatttttaatggtttaggttgcatgtctagttattgaatgtcagaggtagcagtattagatagtttcaatttggttaggccatgtattgatataatgtgtttgtgttatgattgttctatgttctattgaaaccttagattgtttgattactttctatgcaaagccttcttctgtggtgactttgaaataatatgatgaatgagtttttggtgtgtcagtcaatattgtttgaaactattcgtatatgtagacttttgttatgattctgttccaggaaatattgtttctgaatttggtttggtatttttgttatctacaggaatgttcaaatccatttgatcactgtgacatagtaacctccactactcacaaaggtctacgtggtcctagaggaggtatcatcttctacaggagaggcccaaagataagaaagcagggccatcactctagccattgtgacacttccacgcattacgatctagaggaaaagatcaactttgctgtttttccatctctacaaggaggtccacacaacaaccatatcgctgctcttgccattgcattgaaacaagtggccactccagagtacaaagcttacatacaacagatgaagaaaaacgcccaagctttagcagcagctcttcttagaagaaaatgcagactggttactggtggtacagacaaccatttgttgctgtgggatctcactcctatgggcttaacaggtactgaaatcactcaacctaaacataactactcgtcgatcgaaatttaaaattttgtctgattttgtttgtatctgttttccagggaaagtctacgagaaagtgtgtgagatgtgccatatcactttaaacaagacggctatattcggggacaatggtacaatatctcctggaggtgtaagaataggtaagcacagatagattggtttgcatattgtttttgagttagcgacatgtcacattcgtattcacatcgatccttttatcaatagggacacccgcaatgacaacccgaggctgtatagagtctgatttccagacaatggcggattttctgataaaggcggctcaaataacaagtgcgttgcagagagagcatggaaagtcacacacggagtttgtgaaaagtttatgcaccaacaaagacatagctgagcttagaaaccgagtcgaagcatttgctttgcagtatgagatgcctgcttctcttattcgaattgaatgaaagaaaactccacacaacagctttatttacagttgaattttatcttatctctgggtcaatttttttttttttttttggagttctatcttgtaaattagagtaaatatatatttatattgggattgatttgcattatttttttccattgtaattctgtacacattttgataaatgggaatgattactacaaatttacttatcttttttacaaaaatttaaaggtttctggtaacttaaagctgataatacgctactacaaagttacttatctctacttttaaattcaaaggtttcttttaagttaaaacagaaataattatcagtttcatatgttatacaataacctatgactattttagatactttctaaaacctaaacttgtatgtaatagatctcttctcatttgttcggagcccaatgaatccgctatatttggaactagaactttttgtttgggcaacaaagaacacacacccttaagcctatcaagcaagcttatatattaaagttttgagatggactatttcttttagacgaaaaaagaaaagaaaaaagagatggactatttcaatttgatgatcaaaatgatgcaataatttttcaagtaggtcattattctcccatatgtatgacgatttg

SEQ ID NO: 27141 - DNA, 928 bp, Arabidopsis thaliana landsberg
  unsure (1)..(928): unsure at all n locations
tgaggcagtctggtcaatctttttagtttgctttatgcataatttagaagacgttatcaacttctgcgaaaacgggaatatatctagaagaacttgataaacttcactggcattaaagaaagaatatggtcgacttggtgctgtctgcaatctctattttctccattgaactttgttatgttcattgcagatattagcagatagaagagcagcttctggcaatacttcatctgttccagcccgtgtccaaaatagaaaaggtacaccgaagctgctctcattcaccagtttacaacaatgaaacgagtcttacctcttatgtgctcatcatttttttttcctattctctagattctcgggaggtgcctgtgcctcagcaccagaacaataaaccagcctctgccactgccactgccacaaacacagaaaacggcttcttaaccaggtaagcaaagagcttttgctttcgctggagatagctttaagatttgacttgttgtagcttaatgggtaannnnnnnnnnnnnnnnnnnnnnnnnnnnattgattgtacgtgaagtttgatccttgtacaactcttggatctgcagtagtttagtcaaactaatcagtcttatctaccataaagcgtgcattgttgtatgtgagtcatgaaatgagcattgtttataacacacaatattaatttccgtgggaatgtatcaggttcacaagaaacgcaaacctggttgcagcaggggtgatgaagaacatgaagagagttggtaactatgtgaaagaaactgtggatgattccttggacccatatcgcaagcgaccaaaataaagaaactttttacattagatgtggagacaacaaacccaaaaaaaatgaccgacagacgacaggatatgaatcttatttgacactttttggattctcttgaat

SEQ ID NO: 27142 - DNA, 1502 bp, Arabidopsis thaliana landsberg
gaaaccgctggaaataagttacatagtatatttttctcaagtccatccttttatctcttcaatgccaacacatacaacattgagcttcaacaagtactcaaacttgagcatgacaagttcatgagatttcggatctgtaatctcgtcatcataaacatgaaggacaactttaagaggatgaacttgatatactcctccctcatcagaacccactttcttgagtcgtttcctttgcctttcttcatcaacaccaacctctaatcttagactctctgtattattgaacatacatgtcattttaacgagcacataactattccattttcaattcttattttaactaaaggtgtgagaattgctaacctgagttctgttctgcttgctgccgcgcataagtttgagcatccttaagactcccagatacctcaacatcgatattctcttcgaaagcttccttcagtgccatgaactgcgaatatataacataaagcggcggaggaagaagctcagctagattatgatacttcagcttcttctgattctgcaaactcaactggctctgtactggcaaagatgctttctttagagatttgagatgcactggaagacttgacagaaacttgttcctctccgcattactttcaagtaaactcttcttctgttgctccaacctcactctaagcttgcatagctctttcctctgtgtataacaaacttaaacattcaatcacttttgaataaaaactccaacaatatctaacacatgaacttggtctaacgattcgagacagagatgtataaagcttaacattgaatcacattgaatcaagtcacattgaatcaagctactacaagaccttaaagacatgaactttgaaatgaaatttacctgatgaagctcaaaattgagtcttttaagcatcaaatcatgagaactatcatttgataacgtttgagatttgattgcttcgggagcatcactgaagaagtcttgttcggatatgagatcgatgtttggatacctagatttgaaatctctactagctttattagctttgaggtaatgactcttctcatacatgagattgtgaagctccaacgtcgtgaaatccaccggagattttgctatttccgtttctgttctcactttctcttcttctataagaatcgagcgattcgcttgacgaagattgatgaagttgagaaacatctgagtgaggagttctcgattctcggatttaggggttccttgttgcttgatggagagcatctttgctatgattgcttcgacggaggctttggtttgttgaagtagctctagtggtgatttctccgccgtggccaccgtgtctatcgccatctccgattgcataatttacttcctctgatctcgccgagctcggagagagggttttaaaaggggaaaaatgtaaaaaaaagcccgaactttcaaatttgggacggaaaatgcatgaactttgaaaatgtcatattaattataa

SEQ ID NO: 27143 - DNA, 1371 bp, Arabidopsis thaliana landsberg
  unsure (1)..(1371): unsure at all n locations
atcagtgccaggtcgaggatgtattcgaagttccgagtctgaacgagaaagaagctgtacggttttcgcccggaccgcgttccataaagaagggccaagtgatgctaaattaatgcacgtatcaaagaaggttgctagatatgctggtggaaatcctaaggctctatgcttctatgggagagagctggagaagaaaaagaagccggaagaaatggaggaggagtttgagaagatgaggcaatgtcccccccaagaaatactcagtttattcagaagcagctatgatgcacttaacgacaatgagagaagtatattcttggacattgcgtgtttctttaatggtgaaccgtgtgacgatgtaatgcgaatacttgaagggtgtgggttctttccacacgttgggattgaccgtcttgctgagcggtctctactgacgatctcaaaggaaaaaagagtggagatgcaaggttttattcaagatgctgcccgtgaattcatcaaccagacttcgaggcgtcgcagactctgggaaccatcaagaatcagattattactagaaaacgataaatctaaggtaggtgatacattctgttatctataacaatgtttatttaaattgtttaaggtcgatttattcggtttttcaggggaatgaagttattgaagggatttttcttgacacaacagaattaacctttgatgttaatcctaaggcgtttgagaatatgtataatcttagactgttgaagatctatagtacaaactccgaaactgctcaagaactccgtcttactgaggaacttcgctctttgccttatgagctcaggctactccactgggagaagtatccgttgcaatcgttgcctcaagattttgacactcggcaccttgttgaactcaatatgccttatagtcagcttcaaagtctctgtgttggaactaaggtaaaggttacattccgagagaaccgcaaattgtttttttttttagttaagctatttatgtgctttgttttgttttgcagagcctagccaaattaaagatgataaatcttagccactctcagaaactacnnnnnnnnnnnnnnnnnnnnnnnnnnnnnnnnnnnnagaaaatagatcttcaaggttgtacaagcttgaagagcatcccacacacggatcggctaaagaatcttcaatttctgaatctatctggttgcacgagtatcaaacgtacggaggctacaaagaagataaaaggaatgaatcaagaaggctacttaagagaaactacatttgaatcaatggtgttcgaatactctgttaaagaatcttcttaagcgtcctcttctgggggaaaaaatgctagtgctagaaactcagatcagat

SEQ ID NO: 27144 - DNA, 1509 bp, Arabidopsis thaliana landsberg
tttctctactacgtgacttatgttgcttttgagaatgtgatatcagtaaccagtttttggaagcataatgtagcaacatatctcagacttaacattagttgagttctccatttggttcgacatatcgactaataaaaggcatttgatagcagatactctaaaatcttctaaccacagaacagaacaatttacaatgatggcttcggtcgcatgatgacacttgtataaacctacaaaagtcatgctaatgatgcaaacacacctcgtcaatgtcgaccttatacgttgttacatcaggatatttattactgagctccaatatcacaggagagataagcctgcctagagccaaaccatacaaaaattaataacgccacacgtagaaaagatttactatccagaagctttcatggaactaaaacttacaaggtccacaccatgcggcagtgaaatagaaaaccgatggcaaagatccatctgaaaaaaatgaataacatcaagagaagataaagcagagctgaatcatactaagcaactcatataattctgaagtagttaacaaaagaaaccaatgactgtttgtttatttacctcgagctttactcaatgcactgttgaactctgcttccgatttcaacactacaaagctggatcgatctaaatttcaaattacagagatcagcaaaactcctcaaacaaacaaggtaccattgtaccaccatcaagcttaaagctcatatttttcgattcaattcgtttctcaacaaataaaaaaaatcatctagacaatacccttgaaccaattcatgtactatgcaagaacaattagaattaacacacaaccaaattaagcaatttacctccttctgcaaaacagaagcttcttcgattaagaagagaagtgtttaagaagttgaattcgtttgaaacgtaaacagtagaagcagctaagaaagagtttctcccaatctgcaaaaacaacgagtttgggaatagaatcagagatggttcggaattgggggtctaagatcagagaaagatgaaaaacctgatgaaaattagaccattgactcttcatagtataaacacaccaagcttcgattcaaaggtctctccttttcgtcgatttagggtttctccaattttccgattttccgatttcttttttccgccagcgttctctcccgccgcgcacggcgaagtgacaaactaaacaaaaataaattacaaaataaccctcacaaaagctacgttttctaaatcagccccgtcaaaaacagcatcgtttcgtaagggcactattgtacgcgaaacgacatcgtttagttttttgccgcgaaacgactttgtgaagaaacggcaccgtttattgacgaacccgagaatctaaaaaggcgtagtctttctttttttgtcgtcaaaccccataaaccctaaaaggctaaaagtttgaatcttcacgaaatgcagtttcttggaagatcaatttcgaaatcgataagaccttcg

SEQ ID NO: 27145 - DNA, 1713 bp, Arabidopsis thaliana landsberg
acagagacggattcatatgaccatcacacacagatggccgccacaggcagtgtgtattgtgagaagaacagctaacagcctaagactaaccataccataaatgaaacacacttgtcgtcgaatgggaatatcactcacgaagaaatgcatctgtatgcatagtggcaaaaaagagcgagacccaccgtttgatcgggaccgaatgggggggaaaggatgagatctccagactccagggaccagaagcgatttgcagaacagaacatgttttggatctcactctcagggtttcgatgtctgagggtctttattttgcaggcctggcccaatagtagtatttaattactttttaacaattgatttatctgtggatcaaattggtaattgtatgtttctctcttgattttttgtttgtcaaattgattttaacaactctaaacttcaactccttgtggcttctcagatcagatagtggcagccaaaataatgacaagaatttatattacaaacgcaccggttaggttcagtcacactaatcacataaccattttaaaagcaaaacattcgacacccaaaaggcccaaagcctctatctctagttctctacacaacacaatcctcctaattggttttgttcctgactgtacaaaagcagagctccaagaaaaataaaatttctggagctgcagcctaggttcatgatttgttttacacacacagctaagagaaaaaaaagcttcagtttgttagcccaaaaaatgacatgccggcaattatcagaaaccaacccactgtttctgtaagttccttaaagccgcaccattcccgcagaaaaaggagaaggcgggaccgagttatttcacatttctgttgatcccttcggcaactctttactatcaacacctttcttcagaaccttcagatctcaaccaaaattcaggaaggatttaatatcacaagagtgcaagatagccaaagtgatgtcacacacgtagccatatctgaattttgacttgccgactcccctgcttgctactttcagctacgagtccagtattctatgaattgtcattttctttcactaaattctcttccatctcttttcacggcaggaagcggataattagggtggtgctaaagtaactctctaagattctctgaaactgatgaacttacataagccatatataagaaactggaggcttatgagagccgcgagttcagagctcgtttgatagctgaagtataccacacatctgcagatatggattctctagcagtttctcattattgctctgcacaaaacaagaatacaatcaatgtggatcattattatacatgaaacaaaacaaagaaagctctttgattttgaggttctctttgatatttccggttctacgcatctacaccctgaattatgacgatagcaatacctgctgagccttaaagacaagcttctgaagcatgttttggtatttctctggttcctccgtcatcatcctctgaaataatccaaattttaaccggtgagccaaaaaatatttggaaacttattattctttcaatgatgtctttccaaaatcaaaatggtgaatttgaaaaatcctcttgccttcagaagaaatgctgaagagtaataagccacccttgaatcagtatcatccaggagttccctgcatagataaacataggttaatgccatgaaacatgttg

SEQ ID NO: 27146 - DNA, 2014 bp, Arabidopsis thaliana landsberg
agagtatttcttcttcagaaaatttctgagggttaaaagtgttagtgatttgagactcatcatcggtaactattggtccttcaccaccaagagtactggttgatgtcagattagcatcacaatgctcttcgagcaatggagacttagagagtatttcttcgtcagacaaggaggattcaactctaacttcttgtacactttcctcgcctggaaagacagaagagttttcagcagaaaatttctgaggtgttaaagtgttagtgatctgagactcatcatcggtaactattggttcttcaccaccaagagtactggttgacgtcagattagcatcacaaagctcttcaagcaacggagatgtggagagtgtttcttcaccatccaaggaggaggctgatgaattctctccgtgagctatattctccactaaaatgtcaccttgaactcgttcctcaacccccacatgtcctaaaatgtcaaagttctgacatggcggtgaatcagaaggactattacaacttggtgaagcaacacgatcatgacgtccttgtacattagaagaatggtcctctgcaacttcctttgattctcctctaacatatggcacgaacggaggttcacttgatttcaaacaaagcgtgctctgtgccaacataagaaaaccatcactcattctctctattctttagacattattagctaaaattgataatgacaatcaaacaatggactaacctgagaagtgaaagagtcaacctcaacaagcaaattttccaacttgttgtagattttactaaaccatgctcgtcctttagattctggtcccatgatggctcacgctatacgaaaattatgcagcaaaaatataaactttggttaggcaatatcatcagaataataaagagttgaaaaatatcatgttattccaaacttgatcgcaataagaagatgaaagtttcaaacaacaaaaacaggtcctcactaagaaacagctcaaaaatcctgaaaattttgccatcatcactaatcactaggtctagattttatcgaaactcagatgcttaatcggaaaagatgaataatttagaaaaactgtactatacagctatctcaaatttgtgacccgagcacgaagatcgctgaaaaagagaaactcatagacgcatcgaattacataaaaaaacgagactttgagatgaaaaacagagaaagtaatcaaaaggagataaaccctgaaattcaaagtaaacatagatgagaaaaacaaggaaagagagaagaatttacctgagaaagtaagaaggaaagtacaacagaggaagaaacgagaaaaaggcctcaacataatcatcatacaacaataaataaatactaaagagcttatttaagatttttttttatttttttattttttattttttgagaaaaggattctaatttaggattacaaccagatccataataaaaattcaatttagagaattaaaaaaagaaaaaaagaaaaaagtagtgttattggtttgtgatttaaatagtgatttaatgactttaaatgttactagaatctattgttattcaataataaaagttaattaaaagtttggtgttattagtttgtgatttgtaaaaaatctttataactctaggttattggatttagaatttgataaagttgttgaaaaaaaaaactttgggttattcaactaaaacaacataattttttttattattaataaactaaattattatattattaatttataattttatacattttcgtcatacaaatatcgtcaaaatagagaaattattcgtgaaactttacaaaattacgaaaaaaactaattaacaaaattatataatactctctaccaatttctcttcatttatttactttatatgattttaaatcatcaaaattctttttaaactagaatccaataccagcccaaagttacatatagattccgggcttttattgggctacctatctaaagttaacgggcttataaaa

SEQ ID NO: 27147 - DNA, 1388 bp, Arabidopsis thaliana landsberg
aggtgcttacatgatcacagcaagtgagctcgatgggttcttaaccgagttgcagaagcttggttttgacaaggctgcttctgcagcagctttagcagctgagaacatggagccttcaaagtgacaattgtatccaaaagcttgagatatattgtcaattgtacttaagacactagaaaattatcatttttttcaagagaatgcaaattcatagagtacggttaaaacttgagacggtgcaaggttgaagaggttcaagcatggtttctctgttgcttgtccaaccgagaagaatggacctttgttttaatgagacagtgatagtatgtttatatgtgtcatcttgaatagattcattacagatctctaagagcagagtatcccatattagtttcagaagcaagtttcatatatttacggtttaaaaaatctaatttgaaattgacatcattcttcatctgcgctagttttgtgtccccactaaaccacggctgggtctcagaagttgtttgaacagagcaatcttagggacattccaatgctccacgtgcctgcaagccaacattcatcaaaatatgtttaaccagcttcttcttcttcacaaaagatttcaaagttgaaaagagattagtggggtttatattaatgagctcataagtaatctttttacctgcaaattttcccggattctgtgtcgaaataatactccgtgtaaccagttgctgtaaaaacagatttccataaaaagacatagtaaaagttttgttctttttgtcttcattactaatcattgaagctattaaagttgcaaactttatcctaaaaaggctacaaaaatctgaaaacttttaaggtttccttgataaaataaatacctgaaagaatgggtttccatggaaacgacatgacacagctaaatttccaatgtccaattcctttatcctgcaaaactcatgatggagctctggtgagaaacaaaaaacgaaacttttactccgacatcttttagtagttgaccgtacctcaaaattctcccatttcatgagcttcatattggatttctcgataaggcttccgaaattagtgcaattccttttgaaacgagcaagacccttgaaggatccagccggatcagcgaattcacacttctcctcataaacctccggcgtcaaattacctgaaaactcagagatttcgatttagacaaaagaaacagaattcagattggatgattttacactgacctgtgacgaagtaggatcgtttaaagtcttgtttaatcgagtccacgacagctacacgaacggctcgaccagaacaatcaacaggaacctcaaagcctgtcacaatcggagatgtctccggagatcggaaaacagaagcagcta

SEQ ID NO: 27148 - DNA, 928 bp, Arabidopsis thaliana landsberg
tgtatacagacgttcttatacgtggacggacttctgggtcaccttcggtacatgcgagagctagatgaaaaacggacaagacttgttgcttggcgtgaacttcttgaagtaacattggatcaaccatgtccgacaatggagtctcctcttcaaaccctttcctcacccacttcaccaaatccggcacctcaacaaccaccgtagacgtcgaggaagagcttaacggagaagaatccggcgatttcccggtgagaagctccataagcacaacaccgaaggagtatacgtcccatttctgagtaggcctccctccagggagccgggcctcgggggctttatagccgttggatctatctgagggtttgatggaagtgtaaggaagagctccacctaagaaaccacccgcagcagaggaggaggaaggttcgttagaagaggcagaagcggcagtgatggtgatgagacgtgtgagaccgaagtcagagatgtaaggagtgaaggaggaatcaagaagaatgttggaaggcttaacgtcgccatgtaccaacttccttggactacactcgtgtagataagctaacccacgcgcagctccttttgcgatctttatacgcgttgaccatgttaagctcggtgatggttgaccattcctccctattcacacaccaaaacaaacaagtatccaatattaaagtaagtaatgagttacgatgagaaaaagacgggacagctagaggatcaacagagtgggtgggtatataaaatcattactcttagcccacaagtaaacttctctcatcattgtttcctcattctgctatttttactaattacttctactctaagactctaccacacttaaatcatatactaatactttaaaaagatatttattattcggacatgtcgaattctcttacaagacatg

SEQ ID NO: 27149 - DNA, 1800 bp, Arabidopsis thaliana landsberg
gagcaagcacgtagaaccagttcgcaatgtcattgaagaaaccgtagtgaaagagggagaagacctggtctggaagcctaaactattgatcttgatttagtattcgtttgatagaaaatcaagtattaaaccttaatctatattctttaggtgaaaaaaacagctgtgaatatcgatgaagcggttcgagaacttcctgatgccaacatggtaagtgattgtctaaggatctgaatatgatcattttagattaaggtttattagaatatatctgacagaatgttttattgtgtcttgtttttgaagacaccagaggatttatgggcaaaccactcaaaggttgttcattgtaagcctcacaggaaagattctccaccatggatagctatccaaaaggtgttggaaagtggtgaaccgattggtttgaagcatttcaaaccggtgaatcctttgggttctggtgacacaggaaggtctgaaactctatctaatctaatgaaatagcttacaaaaaaaaagaacatttccttcattaatcttataatatcccatttgtgttttatcagtgtgcatctagtggaactcgttggaacagatcagttgtttgcaatgaaagcaatggacaaggctgttatgcttaaccgaaacaaagtaattacagtaacttgcacttcaaggaatcttgagtttcgctttttatttgtaagttttgtagccactgatataattttttgcaggtacatagagctagagctgagagagagatcctagatttgcttgaccatccttttcttcctgcactctacgcttcttttcaggtcaaaacctctgtttacacacacacatatatatatatatatatatgcgtgtctctttggtctttggttactaatggatcatgttttattctgcagacaaaaacacatatatgtcttataacagattactatccaggaggagaactcttcatgctcctagatcgacaacctaggaaggttctcaaagaagatgctgtaaggtacaagtgttcctcgctcgaaaaagtctcaagatttcttcacttaaatattgaactaacaaaaaccctgcatgaactttcagattctatgctgctcaagttgtcgttgcactcgagtatcttcactgtcaaggcaatccattcaacctcttctttaattacaaagaaaattttggatgcaaggaatcttgacatgatactaagttgatctttgtaatttttcttaaattcaggaataatttaccgagacttgaaaccggaaaacgttttaatccaaggcaatggcgatatctctttgtcggatttcgatctgtcttgcttgacatcttgcaaacctcaggtttgatttctctcaacctttcccttcagattgtttccacttctactagagagtttgctcatgtatactaattaagggtgattaatgaatcttgtagctgttgattccgagtatagacgagaagaagaagaaaaagcaacaaaagagtcaacaaactccaatcttcatggctgaaccaatgcgtgcatcaaactcatttgttggcactgaagagtacattgctccggttagtatattatatataccaatttaagtacagtgattaaggtatttaccattgtcttaaccagtagttgatgtctcatatggataggaaattatatccggagcaggacatacgagtgcagtagactggtgggctcttggtatacttatgtatgaaatgttatacggatacaaaccttttagaggaaaaacaagacagaagactttcaccaatgtt

SEQ ID NO: 27150 - DNA, 2795 bp, Arabidopsis thaliana landsberg
  unsure (1)..(2795): unsure at all n locations
aaactccggtggaaccattgcctcatccccggctactaaatccggccggatcacccacaaaaactctttccccgttgcagccaaaccccatgcaaactccacaagctgttttgcgctcaaaacagttatactcccgaagttaacgtacacaacactgtttctagctttcgtgtttagccagtccagacactcagtctcctctctccaaagattcgatcctgtccgtccgatttcactatactcgccgctctcttgtttctctagtaaatgtaacggtccaatagaataaaccggaggtacaatggatttcatagattggataacgtcgtgttcgagatcatcaaacgtgttgagaaatgatagctgagcgcgtttggctcggtcagcctcacggatgataannnnnnnnnnnnnnnnnnnnggattagtcgttcggatgaagctagggatgtcttttagtcttaggttcttcatcgatggtatccagtctatttttgtgtccaagtgttccttggttaagtaactctcatctgccaaataaaccaccatattattgatcagaactcgatatcatctcaagatttcttaactacaattaaagatgcaaatttggatgcattaacattgatactgtatacaggatcagagccagcaaaaggttattataggtcaaagatgtcagacaaaaagtggtctaaatacaatgatatatggaatggctaattgcatagagtttacttttccaagtatgtgctctcttttggaatttaaattttattttaatttatccagtttgattttattttattttgcaagttatcctactattctagttacagccaccatatatgactattaattatgtttcgcaatcattgtgatttttagtgcctcaaataggggaatcgggaaaacctaaaaggatatgattttttctggattcatctttattcgattgaaagttctgatttacagtttgtttttaatatatagaaatcgtttgggtttgacggtgtataagttttaacccaaactataattctctgttgttgacaaagtttattagtttgtgttattgatgtattttatgaccattgttctttattggtttgtattttttattcactatcggtatttcgtttggacaatcacaaaagtatggaaatgattatatttttctttttgagaaaatacaaatttagggatacttttttttttttgacaaatttattatttgtccctattgtggacctcttttttggtgtataatttattagttggggtctctagttgggatttttttggtaagtccaaaaccctttaactagcacagtagcatcccagttacgaaattatatagataaaagccaacaacttgttcaccttgactaatcttgttcgtgtgtatatacacgtaaaatatacgattcgcattgattatctcatggtttcttgtttctacgctaaacttaatattataacacgtaaatcagtttaaaaacacggattaaatcatcaatccaaaattaataatacaaacgtaccttttattggtgataannnnnnnnnnnnnnnnnnnnnntagtaaaggtaagccaagaagccacaagcactagttgtccaaaaaagaacctccgggacaccgagctcctccgcagcatcaagtgtgaagctcatacaaccgtcggatacgatacagctcacaggaggaacatcatcccttgcgttgatctgccggagaagctccttgaatggagcgagacagtgcttcattgtggactcgcaaagagtagggatgtcctgagtgacgtccacgtcagtctcgggtagaccgtcagggatggactcaaaccggaaagaaggaagcccgtcaacggcgttaggcccacgggaccggaggagacggttgtggttgtagacggtgttgacgaaggtaatatggaagcctttggcgtaaaggagtttagccactttcatcattgggttaatgtggccttgagccggataaggaacgcaaacaacgtgttgtttttgtgcgacatgagatcccattttctttctctcttatgcaaagaaaatatgaaagtcgatttgtatttttgattgataggaatatgattcctttacgcttataggactccgttttatagaaattattaacaatgtgttggctcgaccttatgatcagattttcccacgtgggaactgtcgaaagatctgcctcgcatgtgaagatttccaagtgggcgatctcgaggccgaatttgtgtatttattatgtataaagcctaacaaaatgataatattttttattcaaaagatgagatgttattgaggtgtaggtgaaataaaagtcaaaactagtggcatatttcaacactcaagccaaaacataaaataaggccaacgatttataagactgtgaaataaaattgaaattttgatataagtgatgttgtttcgttattattgaattcaagtatgcataatctttactgttgaaacaaaacaacacttattttatctggttaataattaaacagatacttgttcatcattatatatatgataacactttattaaatttcagtacataacataatttttgtacgatcatatctagaataaattgtagtctctctactcccctaaaagaaccttggcaacgaccatctgaaatttagtttcgacgacccataataggcttcggcgtttctctagccagccctgtccttttgggcctttgcctaattttcttcctttgcctcgacctgagttttctacacactcttcac

SEQ ID NO: 27151 - DNA, 1357 bp, Arabidopsis thaliana landsberg
atcagaaagattgctttttccatgattgagagcaatgtaggcttgacgtagcttcgggttctcgaacttgagacgtttgtctactttgatatcactgccccagtcgctttcatcgtcgtggtctgctttgatttgtaagaaacaaacggaggagagcaagagggtgaagagaaagagggaacgaagaggagggaacaacattgcttatgggtcaagaaacccaattttactaattatgaacatctaatatctctatgtgctccatctttataaaacagtttagaaattccaaagtcgtatctctttctctctctccaatttggccttctttttttttacggaaattttcaattagtgacatgtttacacgttgatgaaataacgtagagaagacaaaaagagctgacctttgcggggagataaaaccatcgtcactgaattcctcaaacttggacgcacgttcctagaggttctatgatgttaaagaataaaatagtcagccgtcaacgttaaatcatataaagtatagagtttaatatgttgataactcaaaactacattatagcacgatctatggaattagaagcggtcaaagaaagagaaacctgcacgcacgaccaaatggaaacaaaacttggacgcatgtctgtcacaaaaacgtgtatatatcatcattccttagatctttcaatcctatgagtaagagttgttcatcagttgtcaagtcttccaaaaggtgagcaactagcataaaacagaaagatcgatatctcttttttggtttgtagaataatctgaaatagcatgatatcttaatctctttgatttcattatttatagtagcttggaagcgacgtagatctttttaatatatgaacaagaaagtcttacaaagacactcagaaataagtgactccttggtacaagatgttggtcagagttcaactggcttacaaaacaccaacacatggaagataatatcataggataaattggtccattcgcttgatcaaacaaagtttaaagaaaatcaagcgatacgcgtcgatccacatgaaaatgacctaaatacctcacttttaagctatgttgcacgggtagttaaataagcaaagctcatgtgcaagtcattttccttttctggagattgatccaaggggatgtatatataggccctataacagagcaagagacgtccaatattacatgttcaattgcgaagcatgttaaaacacgagagggataggccatccaattttcccgatgagaaaacctctagcgcgaagaatagtatgaacatcccgggtacacacataagcataccatcatcagtgtgtcattaccacagccatgctcg

SEQ ID NO: 27152 - DNA, 2245 bp, Arabidopsis thaliana landsberg
tcactaaatatacttcttgtcgaatttcgtattggaagttttttgaccaaaaaagaagacttatagagagtttcactagaaaagtccgaaatttagatattaagcgttctcttatataaacgcgtttctgcattacaatttttgtgtgtctgtcaacgtctgcatttcagttaataagttatagttatcacagtaattaacgttttgaatcaatactatgatacaataacttgttaacgctgtccttgcaaactaacaactatatgtttattgtaatagttaagagaaaagtgctacaaaatatttaagttgattttacagcctaatgttatattagcactgttgatgtgtcataatctgatggtatatgtttgtgcttatagaggatagaaaaacaaatcacaaattatgtattatataaaactaatattctttcgtttgaccaaaaagatgatcaaaaaagatacgtactatacttcatgatcttgtctagaagaaaataaaacctattttccaacttttccaatacttacatatcatttacacagacacaagacattcgcatgttatgtatgtatgggtttgcaagaaaaagtcaaatataggcactcataaattatgatataaagatatacgtaccggaggtattggcaatttccaggcgttacagattcttaaaagaccaaaatggagattctcttaccaaagtcaactacatttacatatacatttcaactaatttggcttcaacgtcgtatatacgtgagttgtctaaatcattataagagcatataagctagtcaacgttttgtttcgacgactctctttctttaaacaatggctagtgttacttcacgtattcggttacattgctaacgaaccttaaagaatttagttattgtagctgtctttttcccttaaaagtggaatcttctttcatcaacaaagcaatgactattgatcaatgccatcatttgattacaactcacagtttttgttttgacaattatcttgttattacatatgagagaaaatgaactatagtagtgtttagttcgtttcagattgagattgattatgtttatgttatttgtttttttcccaaactttactaaggaagattgtaagcttgggggagccctaacgaatcagaaatgaatgatatcgtaagtgcgaaaacaatttgaagactggactgtgaagcggtcaactctcaagcgtagatcatcggagtaaagacaatgccgatgcaaaagtcaaaagtttattaagtatctttgataaccccaaaaatgataagaacatattaatccaagtgggtatttttgacttattattatatagatacattaaactgtaatgtaagctggttctacttctagtcttccttctacaatgtgtattatccgtgtgacacgaaccaacattttggatgaataatataaacatttcttttgctcggaatgcttacatgttttagaatatgaacctctccctctccggtataatgatatgtttgaagaattaaatcttttagtttaaatatatcagaggagatcaaagatctttgacagcaaaacagaggtatacatacaacaagagaatattaaactttgatgtcttactttctacaatgttttcttcttctctcgttctgtataatcaatgcagagaataagttatttcgtatggaccagacaaagtataattccactaaactgattagaattgaataagtaaatccatcacatcctggtgcttggttagtcctcccctgatggatcaagtcttcttgtgacagagatcgagtggcaacttcttgtttttctctgtatgcctctcctagagtagatttttgtttctgtagattacagtcaacccttacgcattcgacttcctcgccactttgctgcaacaacacaaaagaccctgttcagattcataatgactttagaactgaggcttagaaagatagataaacgtctaaggcaagaagatctttggttgcccatagattcaagtaactttccatcgcagacaagataaattacaaagcccataagaaaaactggaaatatgagcaaggtgtgcaacagaaccagaagcatgtgagtaatttctatttggtgatccttttaaacagtcaatttctctgtttacggtcacaattaacaagggacttttgttcaagatgctaaaaatgtggattcattttggagtaaaacaccacacacaaaacatagaa

SEQ ID NO: 27153 - DNA, 929 bp, Arabidopsis thaliana landsberg
ctttttccagaaaataatgttaatctaagatcatttttatgtacctggtcattagcgctcaaaggttcgagtgaggatctttttgtcatggtaagcctttgtgcgttccttgtagagctttgagttttcataggcatgaatccgtatctcatcaagctcattcaactgaataagtctgcttctccagctgatttgatgtgaaattcatcatcttaactacccaagctgctttgtgctccaattccactcgaagatgacaagctttaccatataaaagatgaaaaggtgtggttccaagcggagttttgaaattctactcgatcgcaactctatatcaacaggaagtcatttctttcattctctttgtttgtttctcactaacctactaagctttagttgtgagtcttaaatcgatttcagcttcaagatgagttcacacagctacgaatcatctatggatgccgactacaatgttgatgaggctgaatcttggtcaactaggccagagagagaagcagaggagtacaggcgatttgtagaggaaacagagcgagcagtcgccaatgacagagaagagatttccagaggaaaacgggcaatgacagagaaccatgagttggtcgatgaagagatggaggatgatgctgaatacattctggagcaaacccgcaagaccaccaagtccctgatgaaagaagacatgctgaccccgggagattactacaaggatctcaaaagaaatctgttttggggaacaagatatcctcacccggagacaatggatgagctaggcatactgtaggacgttcagctcttgttcgagaaatgccacatgacaacacgcatgtctcatctctatcctacctaagaggatgagacactctaatttctttcatcacttcaagtgaaaatgcttgaggggttgtcag

SEQ ID NO: 27154 - DNA, 601 bp, Arabidopsis thaliana landsberg
tggctattctaaggatgcagaatggaatgatccaaggtctccaaatttcacgtgcattctccgctacttcacatcttttgtttgcagatgacagcttgttcttttgtaaagcggacccatcccaaggtcaagagattattaatattctcctcatttatggcgaggcatcgggacaacaattaaacacagctaaatcttctgtcatgtttggacatgatgtggacaattcgaccaggagtaacataaaatcaacattgggtatccatcgggatggaggcatgggaacttacttgggtttacctgagaaaattcatggctcgaaaacccaagttttctcatttgtgagagataggcttcaaaaaagacttaatacttggacagccaaattcttgtccaaaggaggcaaataagttcttataaagtctgtagcgtaagcccttccgacatatgttatgtcttgcttttttgctccctaaggctattcgtacaaagttgagtagtgctattgcaaatttttggtggaaaactaatgaaaatagtaatggtatccaatgcattgcattggataagctttgtaatccacactctggagggcggtctt

SEQ ID NO: 27155 - DNA, 1221 bp, Arabidopsis thaliana landsberg
gttattgagatagatttcatctttttgatgcgatgtcgtcagtttctggctttgcttctatgtgggagctatcttttctctggggatttgttgctgttatctaatgtatgattcatttttacgtttttttcagccactgaatgggtgaaaggcaaagctatggaggatgttctgaccatcaaaaacacgtaagtaccgtctgtttctattcattttatgcagatattaacataatctgttgtgagttgttgtgttatgccaatcagtgttgtctaattggttaaactcattaaatgttgatataccagttactgtatttcatgactgttatattgttttgaggaacttggtcactggactttgtctgttggaacaatattggttgctggttagtatgccctgtgttcctattcatgttttgcagattttttaacataaatatgaacactcgtgttatctaattgctgcactcattgaatgttgacatacctgagccgaagtaatgtgattattttgtttagatgaacttagttactgcattttggtcagttggtctcagattggttactggtttggtttgtatggtatttcaggttttccagcctataatgatgcagacctcttgacttctttttcttagacaaagtaaacattgtgatttctgtcatggagtttctcaatatctgaagacttactctgaatgtgtgcttctctttctgtgatttattttgccagctaaatcgcaaagcatctttctctcccaccagtcaagctccactgcagtatgttggcggaggacgctatcaaggcagctgtgaaagactacaaggagaagcgtgtgaagacaaatggtgctgcagcagcaggagaaaccacacaggcttgattccttttactagtgtgtataccataatgtgtatatgatggtgaaaacaggggagaagtagaagaggatgatacatacaacctatggtatgttgtaatgttcaagacttaaggagtattttagaataaactctgttcacagaaacgtgtaagaatgattttgctttggccctgtagtttttgctgttttatgcaccgatgtgatgtaatgttttctctcttctttgggaggattataaattacaactttgacagacaaattgtcaattttgaattttcaccttatgattgtctctgcatggaacattctccaaagtcgcgtttcgatcgaggggg

SEQ ID NO: 27156 - DNA, 1613 bp, Arabidopsis thaliana landsberg
  unsure (1)..(1613): unsure at all n locations
aactgttttaaacctatctaactcaccattcacttgtacagagaaagtggttgtggtgatttatattttgatcgaatgaataaatttactcaaaatatttagtgccgcaagagtgttcagcaagaaatcccattgcactgaatcaacatccttatatatgtttatcttcatagcacaacggagacataccgatactttatgataatctttgacgatttctgttgccaacggtacattttctgtcaacaacatttccttaacaaaagcttattggatttgcaaaataaatctcggatataaacactttagtctatttgcaaggatttttgaaatgaccttataaatcacattgcaacacgagatcagacgatagtctttcatctcagcagctacttctttcttcggtattaatggtaagattgtcgtcttcaattctttcgggagaaaaccagtggtgaagaatgattgaactacagctacaaaatcattgccaacgatagatcaagtagcttgaaaaattttcttgtgtaaccgttaggtactggatctttgttgtttggcattgcaaacaaaacgtttggtatttcttcccctgatactgtctgtgtaagcattgcttggtctgtttctaggcagcaaaatggcatgagatttctcaaagcttctagtgtcatacctacaaaatcactcagttgagtattgagaaacgccttaaagaatctctcatcctcttcttcgattcattcactcgtctgcaaaattttgccatttagtcctcttagttgccgaatagaattttgcattttctgaatgtgtgcagctttgtggaagaatgggttgttctgatcacctacattcatccaatgaagcgtagatttctgctttatatagccttcctccaaatcagcgagatactaccaatttgtgtgagctatagattcttcttggatcgtttgtagcgttggatgcgctaatgtgttagcttgtttggcacatagattatcataagcctcacgagtcctctttnnnnnnnnnnnnnnnnnnnncttacctagagatcgcaagcttggtttcagagtctttaacttcttcggaaatcgatgtagtgctgaagtagaagggaaaaggggatgtgtggttgtccactggtcttctactacagactgaaattcggcaatcttcattagtacattgacaaatttaaagggctttcggccccctcgtgctataggttcaaggtttatccaaccccgagcatggtctgagcagccacccgactcaaatacactataaaaatgtggaaaaacatcacaccatacttcattaaccaaaacacggtctaatttttttccaaataagaccctcctccctcttgttacaccacgtaaataagggaccatgatatccaagattagttatggaacaatgtcgtataatttcctggaaatctctcatccccgcataattgatttgtgtactgtcaaaatttgagtgctcacttccatcaaggatctcattgaaatctctccaaatcatccatggtttatttctaacaatggtgaatcatgatgatacatatatcacccaaagtgttttctttctctgcaaatgat

SEQ ID NO: 27157 - DNA, 1082 bp, Arabidopsis thaliana landsberg
ccgctgcatgcttgcccgatccagaattactgacgaggaccatcctttaagcctagggaaggcgagtatctggaatacatacttccaggtactatatcttacatcctgggcaggtctttcattgtcttaatcttttagagagacctcagtgcattacttaaggacaggattaaaggttatatagtatttaatttgtccactagttccatcatcactcttttgttaatgtaggatacggagaccatagaacaaatagacagagatgtcaagcgtacacatccagacataccctttttctccggtgaatcatcgtttgcgcgttctaatcaggtaacctttttgtgttctcatcagcaaattttcacctatttttgattaatcaaagctcagtgacatttcgatttacatgtctaggaatctatgaagaatatattacttgtatttgcgaagttaaaccaaggcatcagatatgttcaagggatgaacgaaattttagcacctatcttttatgtattccgtaacgaccctgatgaagatagttcagtaagtagactctttttgtttcggtgataccctttaaccaactttcaatgataacgtacacagttttaaggtaacagtgctagtctggaccctcaataatttcaagatatgcgttcctttgaagtaaaagctcaagactgttttactaaatgatgtgtcacagagttacaaataaaaaagaaccccgtaatctattagtatgaatctgacctctctgtctaattttcttagaagattggttcgtgtatgatcttttttcttcaaccttgtttttcttcttctcagcttcaatcaatttcatattaactcttttcaaaatatgcagtcccatgctgaagcagatgcattcttttgctttgttgaattgttgagtggatttcgagacttctactgtcaacaactcgacaatagtggggtgggaatccgatctgcaattacgaggctttcacaacttgcgaggaagcatgatgaggaacctcggccgtatcttgagatcacccacaaagtaagacattggttttttcttttctctcatgtct

SEQ ID NO: 27158 - DNA, 1605 bp, Arabidopsis thaliana landsberg
ccaaacggatttagctgatgcgtggatgaatctgacacctgagccatcacaatcgacgtaaaacgacgccgttccagcatcttcgttctcgagcttgacaagacgaccagcgaatgggtagaagatcttcaaagcgacagagagagatgatttcaactgagagattatatgggtttccgggtcgggttgaggaaagagaagacctctttgtgggtattcggatcgaagaaagaagagatcccatggagtgagatggatcttaacccgatccgattcctcgttgtagctctctggtcgaacaatgctcttagagatcactactacttcatctgccattttcttttctcgagtagatagatgctgataaaattcactagtccactactagtggagtgtataatttctttatctttatattttctgtttttggaatcaaattcagacatgacataccaaactagtgaactacaacgtgtttcatgttatttatttggttatatagttaagcccattaattgtccctagcccctaggcccattatcaacctatcgtcgaagtttgatggaattttttacagagctcgacggaatgttgcaaccccagcggcgagtgtttccgattccgttcaggtacgttactatatatataagaatctctaaattcgttgaattatccgaatttgtttgttcatggtgatgttgtgaaccgaacacgaaagaattgcataggcttattattgtattaatttgaaaaacgagagagaattggtgtttggcttagttaaattcacattgctaaaccaaatcatctcatacaatgcttacatattcgttaaattcagcatctttgactaatttttccactacctgaggcagtaaacaagcctgaaaatcaagacttgcttctccaattcctttgaaaacaacgagtcttccattgagatacggtggtccagctcttgcagctatcggtttaccccaaccgaaatcattacagtacacatcgaaccggtgagagtttgtgacaactaaatctttgctaccaacagaaaccggaatcttgatatttttcacccaattctctgcaaatgctttggctttttcatcagtttgtgacagctccatgttgttgatttgcattgcagcccagcctagtccatggtccagcagctctccaaccgtgaccgtagctatcccggtttggcttacattcccaaaacactcttcttctagtggcggatttagccgttgcctcatgtttataggtaacctgcaatgagtctcttcctctcggctcatgccactgtgtttaaccattgaacgccatatatatgctaacaccgcttgaatagaagagatcttttgatcagcctcgtcgttggctttagcgtcaagtttcaaaacattctcttttgtaacatgaaacatcttctcttgtagattggttggtgttgttacataactagttggttttgtttcagggtctggaatatggattggataatcaatctcgtcaaagaaccaacctttaaggtgaagacgacgttggaaagtttgggatcctgaagaatctttcgagcaaatctctgaccatgcattgatgaac

SEQ ID NO: 27159 - DNA, 3712 bp, Arabidopsis thaliana landsberg
  unsure (1)..(3712): unsure at all n locations
tctcaatgtgtactccgttaatggtgctccctgtcaaaaaacaatattataaggtcttcttgaaatgagtctaacttttagatgaatgtttcgttcgtttattgttatcgttacctcgtagtgatcgacgagttcttggaaataagaatagaccttgttacagctttcatcatcccacacaaattcttcagtaggatcaagaatcaaagtgagtttatccatttgtgactggtcaaactcacaagtctctggatcaatataagcagcgtagatcctaacgtgacgtgtgacactgcttagccactgaccaccaaaatcgcccatacccttgctcttcacgttcagctgtttctccactggtctcaatggtgttggctgcttcttcatcttctctgttgattgctcttctttgagtgtctctgtttcttgtacttcaagagtactgtcttgttccggatttgtcaccacgaacgccttttgtgttgttcttggtcggatttgagcaaccatagaaggatgtaatagagaaagcttggtgcaggcagtgtaagagaatgctgcaaccatttttctgtctaagaaatgaaaaaaaaaaaacagaacaagttttgagatgttgtccggttacagaaccatattcttgtaaagagatttgatgaggttgagaaatgaccacagcttgtggatgagcctctcccaacttctagtttcttatttatccctttctcgttttgttggtattttgtggttactcttaagtcacttgtgagctaaagacaatcttctttagggaattcactgttttgttgtatgtgttttttttgtctaagtatatttctttttgatgtatagagagaaaatttaacagatcattatttttcgcatagcgtgaaaatagagttttacatgtatcatctatacattccatgggaattcaaagcataacagaaaacacttgtggggtgaaacagtttagttcttgtacttcatggtttctttctcaaacccaattgttgggaactgcttagcgaattcctcgnnnnnnnnnnnnnnnnnnncaatctcggattggatggttgaagaggattccattgctgacacgaaatccttcagcttggttcctggttttagaaacataacaaatgagttcaatcattgtatataagaacggaaagcatagcatcgtgatcagagaagtaaaaaccttgagcttcagatttgactttgagagctattgtcacagctttgtcgaagtattcagctactttggcaaagtcttcctcaacaaagcctctggaagtgagagcaggagtacctgaaaataacaatggcagaggatatcaagaagaactccattcgaataccaaaaagaaaaatggttaaatgtgatttttacccattctgattccaccaggaaccatggcagaaacatctccaggaacagtgtttttgttggatgcaatgtgaacagcttccaacactttctcaactctagatccatcaattccctgcaaacaaaatcgaataaaaaatgagttttaactaagaaatataaaagaagattatatacaaaaaaagatcaagtgaccttgggctttagattcactagaaccagatggttgtcagttccaccagaaacaagttcatatcctctctccattagagtctgcacgaaacaacaatgtagagatataatcaaagtagatactacgccatatgtgtttttctttccttcacgggattagtacctgagcaaactttgcactgttactcaggacttgttcttggtatgctttgtactctgaagtagttgcctgcattttcaaaccatttgaaggttacagaaaccgcaaatccaataagcaacgttagttccattccgtgcctcaccgtacctgtttcaaagcaacagctagtcctgtgatagtgtggttgtgtggaccaccttgaagaccagggaagacagcttggttgatcttgtcttcaaaatcatacaaaacctttcaagacaacaaatgaatgacgtgaaggattatacataaatctaaaacattttggttcaaatggtgcttctttttcttttttacctctttcccttgcttgttaatttccttaacaccctttctgaagaaaatcatggctccacggggtccacgaagtgacttgtgagttgtggtggttacaacatcagcatagtcgaacggtgaagggattacattagcagcaaccaaaccactgatgtgtgccatatctgctagcattacagctttttgcttgttacagacctgggaaaagagttcgaatcaaaactcactactgattacaataatctgttctgtagttggatatgagactgaaattacctttctgatgcgggcatagtcatacaatctagcataagcacttgcaccagcaacaatcaattttggcctgaaaagagtagcacttttctccatctgcaaatcaaaattaaagacttatgtattgttatgaagcgggttagttataagttactatgattgcttaatagaagagttaagaacctgatcgtagtcgatgtagccagtgctctcgtccaatctatagggcattgtttcaaagaagatagacacagctgatatcttcttggtgtcagtctgatgagaaataagaagaaagaaactgttattcatcagagtcagagagttccgaaatgacatacaaagttaacttgaaggcacctgataaccatgagaaagatgaccaccatgaggtagatcaagtgccatgattctttcatgaggctttaacaatgcagtgtacacatggaagttggcaggagatccagacaaaggttgaacattcactgtaagatccagtcaaataagccatcaaaggactaatcagatttcttgtttctcatatacatgaaagtagtaatttacctccccacttttcaggatctaaccggaaagcttcaagagcgcgcttctggcataaggtttctgccatgtctatatacctacaaagcaaaaggtacttgagatttcaattcttattacagagattggtcaagcaatcatgtcctgaaactaaatgtgtcagattgaaaattcctgaacatactcatttcctccatagtatctggcaccaggatagccttcactgtatttgttagtcatgacagacccaacagcttgcatcaccgacacagatgtgaagttctcagatggaataagttcaagtccctataataacacaagcgttacaaacatcagcctaacttataaggaacaagatttaagagatagtaatctcagagacaaactaaccttccattgtctagctttctcatgctcaataatgtcagcaatctcaggatcaacctcctctaaaggtgcgttaagctgttttggccactgaaacgaacgtttacaaagacataagtttcattagattcagtcacaccaaaaatagaactccatacatcaatttgaaacagacatagaacttcaacaatcaaaaccattgcttcaaccacaaggaaaactataaacagacaagagatacaaaaaggcgcttaaactcacagtgacactagatctttccttctcatcaacagcttcactgggcaaagaagactgcaacggaacaaacagaaatcagaaaaaaaaaaaaaaaaaatcgaaaatctccaatccgattataaaattcggagataaaaggaagaaac

SEQ ID NO: 27160 - DNA, 529 bp, Arabidopsis thaliana landsberg
tttatctttagctcttgtcattcttaagcatgttgttagttgttactattaagaacttttattctgtgttcttgtattttggtaccttattaaattagtcttttatgcagattttgaaagctaatcttcagctatgagcacagcaacaaggccttcctcttcagcaacaacttctgtcatattagaaaaccctgtttctcaatcacaacctactgaaagattagtgcttcggttgaaccggaagaagaagaaagtttcatggaaagatgggactgtagacaatgagtttatgcagaagaagagttcgaagaagtgttgcatctttcataaacagaagccttttgatgaggatgacagtgaagaagaagatgataacaaccatcactgtgatcataaccatgaacactccgaatctggtgaggcatcttcttctaatgattctaaagccgttgactaatcaatcaggttttttcacgtgactatatattgaagctttttaatagatcatggaagaacacacatttgttgt

SEQ ID NO: 27161 - DNA, 1485 bp, Arabidopsis thaliana landsberg
attcagaacatctgaacattatataaatcaaaaccctaaaaattaattgaataattgatgtatatatatgtcactcacttgctccgcaaatggtgtaggcggtgtgacctggagggtctgaaggagactctcatacgtcaaaggattaggctcaaacacaaacataccagcattgaagtatggagagggaggagcagattccatctcggcgggccacacgaccttctcaggacaatattgacaatagccgatcgagtagagaggagtgtaactccatattttttcacagaaacaactcaacacgccatgtaaatagccatcttcaaaatcaaagaggtcgtcgatattgccaaaaacttgaatatctgcgtccaagtagatcatcttgttgtactcttcaaactacaagtttataagtacaaaacagattagatatatacaaaagatttcacatactctttctatttcacttaaagaaccattgaagaaattctagcgaacccatcaccaatacaccatatatttgtttctattagaatttagatcatatgcatagatcttgaaatttgttcaaaaatctgaatttgcttcaaaaatatattatttatgaaataactaagggagtataactttataatctaaattcaaaagcaaatatttgtgtttgcgtttaaatatgaaaatattttcagttcaaaaatatataattttttttcttataaaataatttttgtaaattgtagaagctatgacgagaaatgaaaatttacataaaatttataactaaaacactatgaactaaaattcatttgaaaataaacatacttttgaatatgtttatataaacattatttaaagataataaacggaggctctcgttttcatgaagtctatatatatacacacttacattccaaattcgcagttttgagtagttaataatgtaataagcccttgcgtatgcatcttggctatccggaggatgaacaggctcgatctcacgcacgacacagccttgagacctcaagatctctctatgttcctcaggcacatcaggtaacatagcaacaacaagaggatacgcacttttgaccttacgcaaaccctttgctagtcccaccactcccttcacgtagtctccatttcctgccaaaaacgtcacataagctctccttggaggtgcttgatgcgccttttctgataaatagatcgggtttacggtaatctcaggggccattttgagcaaagaaaagtattggggtcggttttagaagataactgaaaagttttcttgagtgtttgagaagtaaaagaacagtttgatggttatgtaaactttttagttactttggtctttggcttgtgagtagtttctacgaaggctaccacaacgtttgattaaataggcgtagcatgaagggtaaatccgaaacaaattaattatgaataacttttatttttccgatattgttttctatgaattgc

SEQ ID NO: 27162 - DNA, 967 bp, Arabidopsis thaliana landsberg
ggatgttgaatgggttcgtgtactcaatcggagataagaaattctcattcaagatcttccgattggatcctaggtgactctgcaacaacaacaacaaaaggaacccaaatttagaaatgatcgatgatgatataaagagagacagatcaagatcattcataataaacttactaggctaatgcttgctgggtttgtgactcaagatgttgatctcgctaatagcttcatcaacgagccaatacttacccagaagtttgttctttaggtaatggttgatcacttcctctcccgtcggactaaatctatacccaatcagacctttcatcatcttttcacacagaaactgatcgaaaaaacaaaactttctaaaaaaaattctagggtttgggtgaaggattttttttttctgcttctctgtttttttacggcatctctctctccccctgtttttctttctttttcaaatacaagtagacagtgattggtcaaaacataaccagtgatggtatttatagttgttttctatttgaaaaaaaaaaaaaaccaatttttagtaatttctcagtaagtaaagaacaaaagccgtgaagtctactcgcggcgaaaccgtgttcatcacttgtgtctatttctaaaatgttttttctttttaattttttgttaaaaaaaattttttcgtttcaattttattttgtaaaaaaattgtgtttagtaactttttatcttttgtgtttgtcacacatcagccgtaatttttcacacattttaagatgaatgaaactccaaatttacaacgatcggatatttaatatcaattatgtattgcacaaatgtaatattatgtattttataacaaatttactactgttaataaataagatagttgaaaaaaaaacaaaaaacaaaaaactgttaacgataagattttaattgaatgcaaaatgttttccaataggttgacaaattc

SEQ ID NO: 27163 - DNA, 930 bp, Arabidopsis thaliana landsberg
tgtaaagtaaggatacacaggtcgtacaaaagtcagtattacattgacccttcacagttttcatttgatcaaagttgttgaatttgcatcatttgagaaagaaaaaagtgaagctgagctacaactataccgtgtctgcctcaattgtagacccatcagcaagcttaacagctgatacacgcccatccgaacctgcttccaagttatttatggaagcgccctgttcaacagaaagagaaattcaagtttgcacactgtgtttctgaaattcttaggtttgcaggaaagcaaaggcttcagtataaggtgttgatcgtgtgctgatatcttaccttgacaaacttaacaccattttgacggtacagttcttcatatttctgagcaagcgatggagtgaacaatctttgcaaaagctgatcttcagggaatacaatctattgttccacatgggaaagcccaaaagcaactgtaagttagtacatctgttccacaatttatctgaacgtttctaggaatttgtttaactcatcgaatgattagaagtattcttcatttctagcacaatttaaaaattcaagtgaaagggataataaccgttgtatctagattccacgcaacagctgcagcagcaacctccatgccgatgtagccaccaccaacaatgacaattttctttgcctttccctgtatcacatattggaaggttattttgtagccaggaaatttggatttttctgatgacgcatattacaacattgcattaagatgacaaaactggtaactggtaaaaatgcccttagcttaccagagatgctatcagtgaatcagcatctgcaacctcccgaatatagtcaacccctggcaagtgcccaccgattttataaaggatcctacaataaaaatccagagcaaatattcataatatcagtg

SEQ ID NO: 27164 - DNA, 1232 bp, Arabidopsis thaliana landsberg
cattccttgatgctgtaagaataagtcaaaaacacattccttatattcattgtttaaaaactcacattgaaccataaatatgtttaacctttgcttcaaggataaatggtcggaaatgttcttccccatagtctcaagcgccaaaacggctcagatcatttcttctggagcttctggaccaagtggtactcttcttctggtaagtaatttgcaattttacaatagatagagtgttcacattaattggttttaaggtcactgaatcttgtctctcttttcaaaaaagatgtttgcagagttacaagtagtgtctccattggtaccaacaagagaagcttattttcttcggtatgtggagcaaaatgctgaagaaggaaaatggatggttgtagatttcccgatcgataggatcaaaccagcatcagctactactactgatcaataccggagaaaaccttctggttgcatcattcaagcaatgcgtaacggatactctcaggtcacatgggtagagcacgtagaagtagaagagaagcacgtgcaggacgaggttgttagagagtttgtggagagcggtgtggcctttggcgctgaacggtggctatctgtgttgaagagacaatgtgaaaggatggctagtctcatggctacaaacatcactgaccttggaggtatatatataacttgtttcacaagtaaacctcaaacttccacaaccaatgtgattagttatccgttttctcgtgttttttccttcagtgataccttctgtagaagcgaggaagaacttgatgaagctgtcacagagaatggtgaaaactttctgtctgaacataatcaattcacacggacaagcaccaacaaaggacacagttaaaatcgtaagcaggaaagtttgcggtggtcttgttccttgtgccgtgtcagtcacgcttctcccttattctcatcaaaaagtctttgatcttctccacgacactcaacgtctctctcaggtaaagaaagtaaaaccagaatcttcttcctctgttcttttgatccaaagattctgaaaatcgattctctgcagctggagatcttgttcatgggtagttcatttcaagaagttgctcatatcgctaatggctcacatcttggaaatagcatctctcttcttcggatcaataatagtgattgattcaaaatcccaacaaaaaaaaaaatcgaattttgattttaaaacttaaaaagtt

SEQ ID NO: 27165 - DNA, 1056 bp, Arabidopsis thaliana landsberg
gaagtcttcggtttgaattcccaatcttattgtgctaattatactagtgggccaaaaaattgcctttaggcagcccacaatattgggccgacattgatcgcgtcaagggcaacattcattgattctcatctgattcaaatttaaatgcttgcaagccaatatgaagggttcgatcgtcatcatcttgatgatagactgccagattaaaaccatctccaagaaaataatagggagataagcctcatcttagactccgcactcccataatgatcgcctctccatctccttatgcaaatccaacctagcccgtaaaagaaacaaaatcttttcaagttccgttttaaagacatctcactcccatgattgctgctatttctgagatacaatctcactcttgaagataaagatatcactcaaaatcaaacactttatatgacaagtgttatcaccatgttttgcaatgaattcaagataattaaagtcgtagtataatgtatggtaactgctgtttctaggtgtgggtggatgtgaggatgagatgttaattcatgttttactctagtgttgtctaacgtttcaaacatgggttcttttgacaagttccatcagcactaaaatgttcttggcgtatcaagaaagttagattattgtcgagaactctgcgatatcttaaagagttaaaggtagaaaaaaatcgattgcgattgatcgatcttctgggggatatagatcatatttcaccaactacatagtacttgtgtctcaggtatcataacgatggttcttagaaagacaagacgatatttttagaggattgttggatttactatcaggataataagatagtgtctcttaagggtgacctaaaaaagagataaatgcagaatatctaccaaaacaagatatattcgtgccactaaaagtattaccaatcgaaaattaagaaatatatatctctattttcttgattgtgagtttagagagtaagagataagattcaaagtcctccagagaagttttttcactcttaaccttacttgctgctctcattaaggg

SEQ ID NO: 27166 - DNA, 1212 bp, Arabidopsis thaliana landsberg
ccctttctttggctaatgcttctattgtgacgaagaaatattgattttggccaagttaaaatatgtgcacaacattctaacaaaaaacctttattttaccgtttaagacaaactatgaatgaataaaacggatctcataatagggtaattggttggtactgttagatggtgatacgtactgtctgataaacctcgagaaggatcctcccattgtcatttttgatgaaccatctccagataccaatatatattggttgatcttcaagacaacttaatcacatcatcttcttcattatcatcattggatggatccataagcatatatatatgatcatgtcatttgctcgtcacttcaatttcccttcttcaaagaggcgattgtaaggaattaacaaactcatgttctcaccccaattcaaggaatttctcttgttttttatgcatttatcgaaacaaagtcttttatgttgttagtatttatttactatactttaaaataaataaaagttatttttagaaaatcaagttagtttacaaattgaccataatgggccgaaacatatcggatatggggcctaagatccgtagccgcgagagtaatgttatcctcttttatccaccgaagagccttccttactcgtttggctgtgaatggctaccgttaccaatttcaagctcgtcactccgccggaatcttcccgcgccgataagccaggagctacgaaggcctccgacgcattccaggagaagaaatctgtgtctgtgaactacgaccgtggtgagcatgaggtctcggtcaacatcggcgggctcaggaaagctgatattccgagacgttaccgaattcgggttgagaacgaccggtttcagaaggattggagtgtatcggaggttgtggaccggcttatggctctcaatcgttgggaagaagttgatggcgttcttaattcctgggtcggccggtttgctaggaagaatttcccggttcttatcagggtatgtatgtctcgatttcgattggtattattcactgatgctcttttgaacttattggagttttgaattttgtaactttgcaggagcttagtagaagagggtgtattgagctttgtgtgaatgttttcaagtggatgaagattcagaagaactactgtgcaaggaatgatatatacaatatgatgattaggcttcatgctaggcataattgggttg

SEQ ID NO: 27167 - DNA, 368 bp, Arabidopsis thaliana landsberg
gaccgcaagttcttccggttctctgttggaggactatccgatgttgctgagattaaggtatacacatgacaaaactatgattgaaatctgtagaaataataacatatcatcttatacattgtttaggggcatcgtcgaacgtatattggtgccatgcctggaaagatggtgcagtgtctaaagaatgtgggaacagaaaatcctcttgttctgatcgatgagattgataaggtagctagcttgttagtatttgaattggctttttggagtttgtagtcaaaatgaattagtttcgtttctttgttaaagcttgaaattctttgcaataagtgtctatggttccttggcagcttggagttaggggccac

SEQ ID NO: 27168 - DNA, 1168 bp, Arabidopsis thaliana landsberg
tagttggttagtaactaattacatgttcaatttatacaaaatcatatataatggtcaatctcttagaacattttaacaggaaccattttttatgttctaacttgtaacaaccaaccaaattaaatctcaattaatcaaatagaaacccttcatctttctacacttctcctccaaccaacaaattaaacacaagagattaaaaacacaaaagctcttcatcagtatcaacgttttctttgagcttttttggctattactttaacttcatcagagacaactttttcttcgtctccataatggcctcttctcttttcgttgctatctctttcatatcttcctgatacttagcttctatctcctccagctcttgtcttaacctttcttcttcctccaaacttactggttcggttgcttcttctacttcttgattggagctcttgtcttctcctttggtggcatcgacgcattgcttatcttcctcatctgatcgtgggcaatctgagttacacgagtgactaaccaactcacaagtatcatgaaaaacagtctcctcttgtttctgtggctttgcttcgttatgatgacttcttgagttctgattcagttgcgaatggatgagatgatcgactgtgacatcggttttccaggtgggtatcatgttgacaagtagtatatcaatcagctcggctataaacgtgacgttctggtcagttaactcgagttgctcaaccatctcactcgacaccttagaagcagtgtccccttcttgatagaacaggaaatgaatgttcctcacacgccctgtgcaacaagacacagttatattaagtttcagaatgcaaaaatatcgaagaaagtaatgaatcttagctggagcagaataaagaactgaccattctcatctactatacgaagaattaaggacacagactgctcatcgttttcttcacccttgaggacaaagaaattccctctctttgcgcgtctaacctcaatacacctggatcctgaattgtcgctaaaagtaacaataggcaggttactgtcttcatcaagatctatcgacaaggttttactaggccgtgttgtaagaggaccttcagacataaggcaacggtctacaaatgcgccttctttgggcattacaatgtcaggaagcggcaaagga

SEQ ID NO: 27169 - DNA, 2281 bp, Arabidopsis thaliana landsberg
tatacagtttgttaaaaacatggagctactctttggattttgtaggagatatagagtccatgccttttattgaagctcttgggcagttttcatatcgcgtgggtaagtaatggtttgtgtattcattgaggtatatcagagaaggtttacttaagatgtcaagattgactgatgtgtttttatatcttttttcaggcactgacaatttttgcttgatccatgtcagtcttgtgcctgtattgaatgttgttggtgaacaggcaagtttcttgactttcgaaattttgtttactctgtttggaattgtggtcctaataatgtctattttcttacagaagactaaaccaacacaacatagcgttagagacttaagaggccttggcttgagccctaatatcttggcttgccggagcacaaaggtttcatccttgtgaaatgtttgattttggtaacgcttgttcttcaatctgggctctaagttcttatattgaacttgattttgtagccacttgaagataatgtgaaggccaaactctctcagttttgccatgtcccggtatgtaatatttgcaagacaagacttaatctttctctttgtacatataaacattggaataacatatacctcatttgcagatggaaaacgttgtcactatctacgattgtcccaacatttggcacatttcattgcttctcaagtgagtaactttctcatccaccatagtttcaaagtttcagtaaacagttcttatcaccggtgtctttacatttcactttgtttgagcaggaacaaaaggcacacgaggctattttccgtgtcttgaaccttgaagggtaagtctttcttactcatattctcaaatagattggttcatttcatttaaattctgattcttgtgggattcattgtgtgataatttcatatacagagttgcaaaggagcctgcattagaggaatggtctttgatggctaaaatgaccgacaaattgcatgttccggtgtgttcctggtcctaccgtgacatttcaggtttagtttatatcactggttttcagctggtgactgacttcattatgttttgagtttataggtaagaattgctgtggttgggaaatacactgagctcttggattcgtatctttcgattcacaaggtacaccttttccggatacctcaataccaacaactgtaaccacaaatctaagcctttctatgatcgaactcaacacaagatataatctataatatctcactatgtcaataattgggattcaattgtggtatttaataaaggaattcttgtgtttgatgatcaggctctcttgcacgcttctgtggctaggcgcaagaaacttgtcatagattggatttcagctagtgatcttgagcaaggtgctaaaaaggaggtatgtttacactttacactaaagctctattacttagacaacatatgaaactgaagcaaaatgatttctctctgcagaatccggatgcatataaggccgcctggaagttactcaaggtctgaacattctttcattcccatcaaatgaatcctgatttcttgtgtcgagataggctttcgttgataggttttatgtaatttgtcttcagagtgctgatggcgttcttgtgccgggaggttttggcagtagaggtgtagaaggaaagatgcttgcagcgaaatacgccatataaaacagagttcataccttgtatctgtctggtatgcactcgctggatcggtatgcagaacctactcgtttgcagatcaaatgcactgaacttgatccaacaccaaaaacccctgtgttattttcatgcctgaggtttgctgccttccacattttctgtttaagtttcagttacttcactctatataagtcgcgattatattccgtgtaatttttgtctgaagcaggggtcgaaaacgcatatgggaggcactatgaggttaggctcaagaagaacttattttcattctaaggactccaagtcagcaagactgtaagcacgaagttctttctccactcaaaagagtttcatctttatgcatctttgagcttaaccgatatattatgatgcttttgaatgtttcagatatgggaacagaagttttgtggatgaaagacacccacacacatatgacgcatttaagcatccgacacagttttgtggcaactctcagagtattcaaaaaaaaacgcatctatttcgacagtttaagccaaaaaccaagatgcttttctttacagggggaattcccagccgatttgtttt

SEQ ID NO: 27170 - DNA, 701 bp, Arabidopsis thaliana landsberg
caagatctttcttttgcttcttgggatttttatgccttctctgctcttctgttcacggattgctttctcctaaaggtgttaactttgaaggtatattcactgtaaagtctcactctttggattctctctctttttttttttttttacattgtcactttcgtagatgaagtgtttgatatttggtctttctggaatttttagttgatgggaattcaaataaaagtatatatttcttcttgatccaaactaatatgggagttttttattttcgtcagtgcaagctttgatggacataaaagcttcattacatgatcctcatggtgttcttgataactgggatagagatgctgttgatccttgtagttggacaatggtcacttgttcttctgaaaactttgtcattggcttgtaagtttcacattttacattgatacacttatactgtatattacactgatgagcaagcaaggaaaacaatgatataaattttattacagaggcacaccaagtcagaatttatctggtacactatctccaagcattaccaacttaacaaatcttcggattgtgtaagtacttactgttcactaaatgattattaagtttaaaatttgattaaattcttctgttttgtgtgtgtgtgtgtgttcttgatgattttttcctcttacaggctgttgcagaacaacaacataacagga

SEQ ID NO: 27171 - DNA, 1133 bp, Arabidopsis thaliana landsberg
attgaccacatctatatgatcctgtccattgggcaatttgctttttttttcttgaaactgtgtttttggtttgcaaaatgtcaggtagaatctgcccttctactgggaagaaagcaaacagagcaaacaaagtttcattctctaaccacaagaccaagaagttgcaattcgtcaacttacaatacaagagagtttggtgggaagctggcaaacgttttgtcaaacttcgtttatcaactaaggctttgaagaccattgagaagaacggactcgacgctgttgccaagaaagccggcattgatcttcgcaagaaatagatatgatgatcgcaaagtttattatatacatttcttgcttctccttttgcagtactcgtacatttcctttctagattttggtaagtatcaatggaatctctgagctgttgtatcagacactgtcaagaaaagactttaaagagaaacgaaaacaaactctcacttgcaggtggctcaaataatacatttcatggttttgtttatgtttctcagataatatcgttacaggttgtatcaactgaattctcgggttttccttttgaagacttcttaatcgaaccttctcctcctgctgatgatccttttagtttcctaggacgcgatgtagccttccgtggaggagctgaaccatcaggtatttgattaggaacttctgtgtctggagccgggataccaccacgccttctgcgaactgatggttcttgatcattcgatgagtctgttgacccgtgtgcgcttcgattatgtcttgaatgctttgatggttcatctgatgatgcagcatttccgctactttttctaggcggagacccgttatgatttggagaagctgctcctccgggtttccgccttgttttctgtttcggtttctcgtttgtgttcgaaggcagtaactcttttagcccggctccacgttggttcgtccctattgagatacacatcaattcctcgaaccaatccagatttgttcctcaaagcttaacactttaagggaaaaggaaaaacaaactttgcaaaaataactaaccccgcgggttgtatttgttggaatttcccctggaacgacaaacctttcatgttcttgagtttaaagtc

SEQ ID NO: 27172 - DNA, 5488 bp, Arabidopsis thaliana landsberg
aatgtcaagcaattgataacctatacaaacaagctttcattctgagagttcaatttcgggaaggagcaaaccatatagtgcgagattatcaaactaatcattcaacatcaagtagcctaaactaaatttaacagagattatcacggaaccaagaccttaatcatcaaatcgaacagtcagcagctagcaaaatcactcgatagaaatagttacctcgcgacagagcatcaatcggagaagacgaaacgaaaagatcaacgcagacggaggaagaagagacgatcgattgatggtagattgatatgacatggtgcgaaaaaagagcaaacagagattagatatatactgaggaggagagaaaaaagagaaacctcttctccaaggctttagtcgcaacaaactcttaatttaaacctcttcaccaaggctttcattcgcaacgaccgcgtatcacgctgggttttggggaatcaccggaacggctgcgttttgatggggttttgtatgtttagtgacgtggcatctcctggtgtttcgggtaggcttttgtagtcatcaggggccccactgtgtttattcgtaaatttgtaaacccagtctgattactgataacaagtaataaaccgagaatttttcttactatcaaactgtaaacttaaattacatggatttgtccacaaagaagcagaatcatggcttatggacgagctttctactttgatgtatgtatgtattcatccttcttattcaaatagaaaggtatatcacaaatcgaaaataaatataaacaacctctgtgaaatctctttctccgatctatctgtaatatatggcaggtccatttgaagtgttatcccaaacacctccttccttgacatactccaagtacctagcgaattctggttttgcagtcgtcgtgctcttcttcttcttcttcctctttagactcatatcgaagaaactaaatagagggtgagccgaacccctggttttctccaccggtttattcaccttcggggattgaccatggggatttgtaggaacgctctccggtttcacttctaaaagccctgcgcctgcttcttcttcgtcgccgagcttcttgtagctgcctcgaaccttcctcgtgctcagcgctctaatcattatttcttgtggttttgatcaattctctctggtgatatgtttttaagaaaggatagattttgaaaaggacacatcttttgacttctcttctccttatcccaacgactcctttaacttaaaccttatgtgacattgccctttcacctactactattcgtgggtcaatgctactttatttttgactatgtcttctttggtgtttgacttaattaggacaacgagacagttccacaacaatgctttagactttagtggacttgctctgtttcttgacacaaaaacagtagctcaagtgtagtgtaatgctgaaaaaacaaagcaattcatatgaataagctgtgtcctgctgttttaaccaaacctttattcttcagttttcctctcaattcttcaacgacatcccacttccccatcgctgcatagaaattcgaaaccaacacataaatgctcgcgttctctggacccgtctcttccataagcctccttgctacatattcgcctcgcgtaagatccatattaagactacaagcactgagtaccgctacccatatagcacaaggaatgctttgattatcgttctccatcattctctcgactaatctccatatctcttctgtctcaccagccttgcttaagatatcgatgaagcatacgtaatgctctgttccaggaaccaaccgatacttctccttcatcataccaaaacattccttaccttctttaactagtcctgcgtgtgcacaagccgatataacaacaagaaatgtcactgaattcggtaaaactccgcttccttcttcacacatttccctgaagatttcaagagctttaaccccatccccattaaccgcatacgtatctatcatactcgtccaagaaaccacacttttagatggaatagctctgaaaatagtacgcgcttgcacaatctgaccgcattttccatacatatccattaagccattgcatagcttagaatctgaaacgaaaccattacgtaaagcgacacagtgtatctgtttaccaatccacagatcagagttatcagagcagccagcaagagagctactgagcactctcacattgggtctctgcctactcataagcagaaacgctcccttgtaatttcggtttcgaatgcaacctgatatcaaagaattcaacatcacctcgtccgtatgaacattcaaactgttataaaccttcatggcttcattgatcaaacctacactcgagtaaaaactaatcattgcagttcctaaaaccacgagatcgcgtccggtgaccaccaccatggcatgaacttgcttcccttgctgcaaaatcttgagagaggcacaagttttaacaacagaagacaaagtgaactcactgatttctactctttctctatacatagctgcgaaaacgccaagagcttctttgcctttaccgtttctaaggaaacccgaaagcagagcattccatgagacgagatctttttcctcaacgctttcgaataccctaacggaatcaaccaagtgtccgtacttggagtacatgtcaataagcgcagttttggatatggttcctgtttcagcgccttgtttgatcatcaaggcgtgaacttggcgtcctgtttctgggtacgacaagagggaacaggccccgagaaccggagtgaaagtgtgcgagctgagatcagggctagccctatgaatctgaagaaagagagccaaggtgtcatttgggtttccactgcggaggtgagacgagagttgagagttaagtgaggagaggtctcgttgcggcaattcgtcgaacaggtggtcggcatgggtggcaaaatttcggataaagacacatctcagtaccaaattagtggatttaacggtaacgttacccagacgaataaagcgtccaatacgcaaacatgcgaacatgttttacttgttaccgctacagacgaaacttatagaagcagagctatctttttatgggcaaggtcaacctaaatgtctgtctgatcaacaatttattagacgacataaaaaggaagaaaaggttacaacttttctttctcaagttacaagagaacaaaacccctcacaatctttaacagagaaatgaatgcctttaagccgaaaactttcccagtgagcactggccaatggattttacgcccaagaaaactttattggagaagcaggaaatcaagttctttgtttttacttttcaaatccaaacaaatcaagattcgcaaggcggcacaggttaaacgcctcaagctgcttttggtacattctcagggagcgtgagatcatcgagtactgaatcatattctgtatcgcgagcgttcttcttgtttagaagcttcttgaactcagcctcgtccaagttctttgcgttctctgtggcgtgagcttgagctaagttggagtactccacagccgaactggagaagaagactctttcttcttctgtcaccttcctcagaaatttagctgggttgcctccccaaacctgcaaggaaaaccagaattgtaatttcaccagagcttaagcgaataacaaacgtttgagaaggtcaacatataagagcgtggctaagaacctcgccagagggaattctagtgttctgcctaacaagagctcctgaagcaaccatggcatgtttttcaacatgagctccatccaagacagttgcacttgtaccaatataggcctcatcctcgacagtgcagccatgtaaaacagcactatgacctgctccaaattcaatttgctttatccattaccctgactttaatattcacacttcaattttatgacagcaaatgtattgagatttaccaatggtgacattgtctccaatgacagtaggtaagaccttcccacttaagtttgattttgccacatgcacaagagcgttgtcctgaatattggtcccagctccaacactaatgctgttagcatctcctgcagagtcggtcattaaatcaaagggtatgtctgaactaaagagtgcctatcctctcaatgaaagcacatttgaatcaacaatgtcaaatactccagcagcttacctctcaagacacatccataccaaatggaagaacctcttcccacatggacatcaccagagagagaagcgttaggagccacaaaagcccccttatccacattaggggttttgtcaaaaacattcatgagtgtgcggtgccttgatactggaacaaaaaaagagtttcagaagatagacaagtgaaccacccatcatagcacaggctaacacataacacacttgtctaagtgaagaagatttcaactaggataataactagccaaatacagagaacataagaggaacttgtaagagaaaattaacgagaatctctcttcgcaaccacagaaatggataccgtcactagcaaaatgaagaacatttgatcttaagctctaaggtttctaatcaaaaatgccataatcaatcatcaacataagaggaaacgcatcaatcaaaactatgacctgattccagagaaatacacaaacatttcgaagacccgacgagtaatgaaacaaaaaaaaatcatcaccaggattcgaatggaactaagagaagacaaggcgatccaaaagacatacgctgttctcggaaatgatttttcccttggaggcgacaaccgagccgatcaagtgcttgaccagtttcacggatccagaatcctacgctgtagaatgctttacccattgttcccatcgtgttcttcttcttcttccacacgagagatcgatttgcgttttatcaatgaaatcgaaaaggggtttttcgccggagccagaggaagaggagagagtgcagtctttgacgactcatccccatttgttggttttgtgctcaattttcggtcggaccgttattatccggttcatgttatttcaggttgctgttggtaaaattaggaggtaaatttatggtgattatggtaattcttcgccacgtcactttatccttttaagtctcgaacaaacggcacacactttggcgtccactgagaattgagaatatagttatcatcaacatcaaccaaagaagaaccttatctctcaagaggtctctctgttttatcgaatgaactacaatgaatgtgatctcatgctccttctcattggaacataatctctacgagacaatgtcttgtctccagagatgctcaaagcaagaagaactgaagcaaatccacgctcgcatgctgaaaactggcttgatgcaggattcttatgtaatcacaaagtttctttctttctgcatttcttcaacgtcttccgactttttgccttatgcccagattgtgtttga

SEQ ID NO: 27173 - DNA, 3897 bp, Arabidopsis thaliana landsberg
  unsure (1)..(3897): unsure at all n locations
aagatagcacgcgccagaagcaaaatgcggtaaacgaatcagaacatcaaattcaacagtgtgctactacaagtaccaaaaggaatgaagaggagaaaactgatgacagtttggatgtaacctcttctacagttaagactacccaacacacaagacgactcagtgtgcaggataggattaacctctttgaaaacaaacagaaggaaaactcaccctctgggggaagcaaacctgtagctgttactaaatccacagagctgaggagactctcctcagatgtttcttcctctgagaaacctatcctgagaagaagcagtattgtgagtgacatgagcactgatttggcatcagaaaagaagttggagagtttcccggaggatccgtcttcgacttcttcgtctcttcctcataccatagctcaacctaatttcaatgaaagcgttaaaaaggacgatgaagtcaaatatgagctgaagagtgactccgaaaaagttggtgatgaagaagcttctcgagacagagttgagagttccaaaactgtcactgaaacgaggttggtttcaggagttgaagcaacgtcttatgttcagtccagatcagtcattgatccgaatgtgtcttctgcttcacaaaaccagactgagagacatgtcgataggctacagaatgtcatgagtgatgctaaatccagacagagagaggagggttatgaacacaaagccaacaatgtatcacaatcatcagccatgtttccttctcgccatacacgatctcagtcagctcatatagaagctagttttaagggggatgtggcttctcaaccgcagtctagatactcttttggcaggatcaagaagaaagaaggtggttccatcagacgaacaaccggtgttacctcagaaaccacaatttaatgtgagggnatggtcctgacgatgggggaggggaggccaggttagagctaacagtagtaggtttccacttgcatcggtagatcaaatacagaggacaagactgtcaaaggaaaatccgggggctaatgatgagttgaaattgaaggcgaatgagcttgaaaagctttttgctgagcatcaactccgggttccaggggatcaatcaagttcctccagacgtggtaagtcgagtgaaaaccaagttgcacacaaagagccatctcattctatagcagctacagaaaaaagactttctcttggtggcggttctgctgatttctcaaagcttatgactcccttagttggtgacaaagacaaaggggatgcattgcgacggaatttatcggaccttagtcttacggatgattctaaaggaaagttttatgagaagtatatgaagaaaagggatgccaaactgagagaagaatggagtttgaaaaaaggtgagaaggaaacaaaactgaagtctatgcaagaggctcttgagcaaagtagaaccgagatgaaagctaagctctccccttcgtcttctgagagaaaagatttgctttcaagtactcgtcagcgtgcagagaaattcaggtcttttaactctcggtcaagtatgaaaaagtaccaggtaacttagcattagatccattagaaatgttccgattgctaagacttgttattgatgatactgtctttttggcacatcctataaactcatttcagagcgaagaagatgaagatatctctgaacagaaacctcgggcaaaagataaagcagccagtggacaacaatctgttggcagcatttcttctcggagctcccaagctagaaagcttcaacccaacaggaacatgtcttcttctattactccgcggagtgcagcatcggttccaaaaccatcaggtaaagtttcaaacacctcttctgggaggcgaagatcagacaagtcgctcgcacaatctgttccaaatttttctgaacttataaaggaaaacacgaaaccatcttctttagctgtcaaaactactatgcgatcacaggtgaaaagtagtggtcgcaccaagaatatcaaggaagatacacttctccaaagacctcgatcattaaggaaaagctcctctgggaacatagactttacggaactctccactctctgctctgatgatatgatggtctctctaagagtggactctgatatatccgagactctgagaaatgaagaatatgatgaacctgaagctgaaccagaagaagtcttggagaatgctgttagagaagaagaggaagtggaagaattggaaacattggtgtttgaggatggaaatccaatgctaagcgaagcttatgagaaagttgatcattcaggagaagagaattgtagtttcttacccgctactgtgcctacgacattgcttgcctcgttaatggactcacctggagaaagtcctctttcttggaatgcaaacctgcaacactcattcagctatcctcacgagcactcgtcagatgttgatgcttctgtggattctcccacgggacgccctgcttcgtggagttctcggatgagaaagaaatggggaacggctcaaagtcctgttaccgttgctgctgctaataatatgtctcagtatcagtcaaagaaggatttaagtaaagggtttaaacggttgctaaagtttggaagaaaaagccgcggagcggaaagcttgatgatggattgggtatctgtaacgacttctgaaggagatgatgaggttgaagataggagagactttgcggatagatcatcagaggatttaagaaagtcgagaatgggatctctacaaaatcatctctctgaggatggattcaatgagagtgagttccctgaacaaggtaatactaatagtattgctttcttcctctctaagtttaatgctatcgcgagttcttacatatttagttgatattgtctttcttcttcaagcttctaacaccgagctgaaagatgatcatcaaatgtctggaagcaactttaaaggtcaaaaacttgtttttttctttttcttttcatgcatattactcatgcagaatgcaagattctccatcattcttccttgaaatgaatcgtattatttcttcttttacagcgcaaaagtcattcttctcgctctccacattccgcggcaaaggaaatgattcgaagccaagatagagagcaaacaaagaaagaagaaacttggatgtggatcaagttgcgtgagtaaagagagaaaagagacagattctatcgcagactcaggcagacttcaaagacggtattttttcccgatgaactggctggtaacttcttcgatggtgtgtgtacattttgtttagtgaacaagaattgattaatccgattttctgtaactacattgtgattttggcaattttgaaaaatcctatttgtttttggccttcctttacaaatatattgatgcacattcacaaatattcaagagcatctggctgggcaacgaaatctctctttatttcccccacaaatcatatagctgaaattgtagtgtgcatatcaaattttagttcccatgtttacaaggtagcagtggcaaatcacaacaattgaacaaaacagatatattaattattaagcttaaaataaatctccaaatagccttgaagcagacagtggttatatcaacaacctaatgatagtggcacttaatttcactagcagagcacaacagattctttactttttctctacaggctttggtcatgaatctaaatttaatttcaaaagcttaatgtacaagcaaaacttaagacggtaaactaaaaactctttctatgctctgccctaatgtagataacaactcatgttgtgaagcaaagggttcctgaagataaataatgtctacccaaatcatagttttctgatcaaaattattaccagcagaggttgttttg

SEQ ID NO: 27174 - DNA, 770 bp, Arabidopsis thaliana landsberg
aaaaacaataccagataatgttttgtgtctatcttcttcacatgcaattttaaattaaattagtatattgttacaaacgggagagaaacaggaaaatgacgggagaccttgttaaacgagagaaacaaaacgtcagcatgttagttgagctctgtcaccatatatttatgcatatcttttggaactcttcgtatatatcacaagcatcaataatatttttttctatcttaactcatttttatttatattaaaaccgtgtaaggaaatcgccagaaattgcagacctgtttcgtccttaattgcggatctcatcaataggttaagtagtgacaacttgttgcgaggataatagtagtgatggttttcgaagatgagttatcccaaaaaaagaaaacaattgacgtggtgataataagtgatcaataatgtatgtaaacatatgaatggtgagaaacgtaaatgtttattttcctagtaatagataagatacttctagtttagagtggtccactactgtctctttaacaaaggcatgatgaaaaaaaagttcctacttgcaatttcatgtttgtttaattttagtatgactcaaaacttgaattattgaccaataatctatttgatggttcgttttacttttattattttttgttgaaagaacaaatttgagagaaaaaagcttagttaaaagttacttttgactgagcgttcgatgctttttcctctaaaccacttggaactcatcaaactcgtatataattgcttatata

SEQ ID NO: 27175 - DNA, 1709 bp, Arabidopsis thaliana landsberg
tacagaaaaagcacagtcagtcctctctttaaaaaatttacacttgaaacgacgttgtatcttaccaaccttcacgatctccggcgggaactaaaacggcatagtttcgccgtcttttgtggttaaaattttcacaaagacggtgaagttttttttcttcctttctttgatttgtctgtctcttctcttctcccgagacacttcatctaaaaaacacacccccactgttttcttgttttgttctctctcgatttcgcgagaaaaaaacaccagctcaaaattacgcttggctcgagactttgaagatcatcggtttctgtttctgttggatatttcggggaagctttgggaggagaggatctcacgtttttgttcgtttatggcgtctgtgtgagacatagtggtggttctagcttttaggtttttggtgtgtgtgttcgtgttatgttaattgctgtttgtgtcgaagaagaggaagtaataaattagctcaaaatgcatttcactaagcttgatgactctcccatgttccgcaaacaggtctgtttctactacatatctttggttcctgtctatgtgtgcttgtcttgatgtgtccagtcttttagtgtcgtaggttaaaattgggtcatattaggcgagatttgttcttcaaaagttgtcaacagatactaattttggagccattaggatgtgttgtgtctggaattttgaatgtccaccgacatttatattccaaaatgtgagtggaacttcactggaaggttcgaattaatgtgtcactaagaaattggtttatctggacggcctattcacgctttaacttgttgctccatgaaatgtgaaatgacttatgatccagtgcacttgtttgggtctctgattcgtgtgtttaggatacatttgtgtccacttagctactactttcatgctcactggtttagtaggacttctgctatctaactcaacttaaatgctaaggaagttcctagtgtagctcaaattctgtccaaaaactgctctgttcgcctgaagttgatgattcttttgcccctatatagagtgcctgaatcactcaatctttggggttatccatagttgcagtttcttccataattggattgtgtctttactgttttctttgcgtttatgtatttttccttccgcagctgcgttcttacattgatatctttttcttaaatagttacaaagcatggaggagagcgcagaaatattgcgggaaagaagtctcaagttttacaaaggatgccggaaatacacgtatgctagttcaaattttcacagctaattaggattgtagctctacatttagagttttcttctggctgaaacatgtatcttttaacagcgatagattattctttctttttacagtgaagcactagcctaggcatacgatggggacattgctttagcaagtgcacttgaaccatttggtgaagcccataatgatccaataagtgtggcttttggaggtatgaccgattatatggaaactcgcagtagcatattgtctgtttattcccatactctttgcagttttcatctcagattcattggcatttaccattttagaattcataatttcgtttttaagcactgaatactgatagtgtccataaattgtgaggcaagttgttgttcccgctctttctattcgctttctctttgctagggatgcttagatt

SEQ ID NO: 27176 - DNA, 1123 bp, Arabidopsis thaliana landsberg
caaccgtttttgaaatcaactaaaaccgaaaaacaccaattcaaaacaaaacaaaacaaaaattcagaacagggtttattgtatataaccaaactaaattctcattctgttgtaaattttattaaaccggaaaaccaaatcggacatatatgggcctaaaatgttgttgggtcaggccgaattctagacagttctgttctagttttttctcctttgtcgtaatcaggtggacgaaacgaaaaccctcgggattcctctgcttctgtctcgtccgtcgtcgtcaatttctctgcatcagagattccggtgtccttcttcctttcactcgcgtataacctcttttccttgacgttgtctccgtgagctctctgtgctttgactgcaaccatgtcgactattatgcagaagatcaaagaaattgaagatgaggtaattattcaatcctctctgattcttcacctcttctcttcaattttggatgcatagaactgtgaatccgaaatatctattctgaatcaaagaaatgatttttcaatctgggtggactcacaagtacgaggttttttttgtttatgtggcagatggctaaaacacagaagaataaagctacttctcatcatctgggtttgttaaaggtacattttttctcctctttaggtcgttttttgtagctttgagagtgaggttgattggttcaggtgtttttgcttatcaaatgcaaatttggttgattggtttatatctgttttgatacttgataaaagctatcatgggatgccatccagtaagcaagctcattaacaaatatttcaacttttggtctgaaatcgtttatgttttatacgaactcccaaatcattgaataagtccaaagctgagatattttatttacggcatgagcttttgtgaagttccttggatcaaacaactactaggcaggcattatatattattctgtatagatcttagaattagggactcattcctgcaccattagcttctcgtaacacttcactggtccattttgcaggccaagcttgcttgctttcgagggaccttcttgcacctgctaccaaaggtggcggtggtggtgcttgacaacgctttgatgtgactaaaagtg

SEQ ID NO: 27177 - DNA, 952 bp, Arabidopsis thaliana landsberg
acgctatagctttttcgagaaggtagcaatagttcattatgcttggagatgtgtcgttttgttcgttcgcgaatgaatttgctgatgcattatggtttgtactgcagcacttctggatgtccatttggtgacaattgccacttcttgcactatgtgcccggtgggtacaatgctgcagcgcagatgacaaatctccgaccaccggtttctcaagtttccagaaatatgcaaggatctggtggtcccggcggcagattctcagggagaggagatccaggatcaggccctgtttcaatctttggtgcttctacttccaagatcagtgtagatgcttctttagccggtgccatcattggaaaaggtggaatccattccaaacagatatgccgtgaaacaggagcaaaattatcgattaaagatcatgaaagagacccaaacttgaagattatcgagctggaaggaacatttgaacagatcaatgtagcgagtgggatggtgagagagcttatagggaggcttggatcagtgaagaaacctcaagggattggtggtcctgaagggaaaccacatcctgggagcaactacaaaaccaagatctgtgataggtactctaaagggaactgtacatatggagatagatgccattttgctcatggtgaatctgagctgcgcaggtcaggaatcgcttagttatgtctttagactcttgagaacagattatgcattgttagctccattatcattgtgactttttgctctctctttttgttttatcaatttgttttatgcgactcgctttgaaaactttagcccattctgtattgagctctgaagattcgacgagttctgtaagttaccgatcacagttaaaagacttaatatgttaaaacccttatattacagctacatactttttttgtcttaactcttaagatatcatgcacaataatat

SEQ ID NO: 27178 - DNA, 1589 bp, Arabidopsis thaliana landsberg
gattgagttagcagagttaatacgaaccaaacacaatcaagtaatccaattctacaagacatatatggaaaagacccaacaggttcataaactgtaataacgaaatctagaaaccctatccctatataagaacgtacctccatgtccggccgcgataatcgatcagatgatgatttcccacccgaatccgggaaatcgagcaaaaccctagaaagatgatcatagatcaaacaaggagatttgatacataatatatagaaaagtaataagaaactcagctaaacaatcatcggaactaaaaaaaaaaaggataccgaatgcgatcaacaggcatcgatcttttttcgtatatatatatagagggaagcaaaacccaaaatcctagtcggatttagatttcggagagatcctacggttgctatttgtttaagtctaaatcaatcgacggtccagatgaaacacaaagtagaaaaggcggttgatgattaaaaaaggcggttaatatggttgcgcgtgataagttggcaagattcacctatgctacagagccacgtgtcctaatttctcgttatgaattaactataggatcctactaatgtgtttaagtttaaccatagtctaactatcttttaactatttatcatgactaaaccaatgggataacaacccaaaattaaataaatttggtagctatttttctccacaatgttcaacgaaaacgctatttatgcattttcatttatttgttctcagagattaatcgattatttaaagttattttttcagtatttaatatttaatcttatatacaataaattttcttcatgacctttctttcatcttcacaacacaacacactgaagattgggactctgacttaacaaagaggttcaagtgttcaaccctcacctctttcattttttacaccgtttttcttctatatattcattatttagtggcccatacaattatttttgcttgtaacacatccaaaaaaataggattcgaagaaaagttcgtcgggtaagagcaaatattgtccattatactttattagtagtggggaattgggcagtctttcctcagccacaatttatcatcaaaatttgctgagtaatctccctgagggaaaagtcttcttctttttctttctaagtgtgacactagtgcttaattaactgctactaagacattaagaagtattaagagtaagagataatgtaatttttgggagggactaaaatgaaacttgcaactaaaaggttgcttgcgtttattatcttatagtatatatatattaaaacaatggagttgacttttgagcttgtgctatcagatggctgatttattcgcgggcgaaaactgtttccgacacaatacccaaacttttcttatgaaattctgagatatctgttaattgctctgttacttttgttgcaagtaaccggaacttttttacttcactcgcaagtttgctggtttagcaaggaacatggtctgcgccaacatgacaagcaacatcatgaggtgcgacaacaattactccttctcgattcttttatctcttctgcttatactcatccctgatt

SEQ ID NO: 27179 - DNA, 1273 bp, Arabidopsis thaliana landsberg
gctaatcatatcagagtttgatatgatcattccaactttttttcttgtcctcgtaacttcaagaacgtgatcctctctcaagtgcttgattaattttatcttaatcaaggaacagtgcagtgtctgcgatatgaaactgtctctgttgcttaatatgagttggattgtgatggtatgttctgtctgatgataatgttggtcgaaagcacatggcattttttttgtttattggtggccccaaatgattgttacagccgttaagttctttggcacaattcaattagtgaatcaccaatctcaaatctgcacatggatctgttcccgttggttcctctctaacgactgtttttgtaataacatttgctcttaataacgcttcaatggtaggaacacaacacatccctctctatggattcgagattcttagaaaaatttatcttcattttttttctctacaaaatgttgcacatcagtcactactgatctttcttacatttatgttgttacatttcatgaaaaagtgttcttagacataaagaaagaaaacaaatgtgtttattgaacgatggagatggatttgttaccatcatgatgttttacttgatactgtataatgacttgagttgctgactgatcaacctgctgctgtgaatagctgattgaagctctaggttatcagaccaccattgttctaacccgtgcgcctcgtgaaacttctgtttccctttcgacatcacgaaaagctttgctgctgcttgaaaattagtgtttacaacagggctattgttctctttgttgttcatttccctcttctctgctactccatcctggtcagtgtagtggcaacaaatatagtcgctatcgttcacatatagatgaggcacccattttcttaaatccacagtaggtttctgattcgacccgtagaaactcggtacccagttcctgaaccctgatgaaacattgctaggagaaacctgaccttcgttactattctgtatcagaggctcgtttttgggaggaagcattgacatgagtcttttccaagcaacaccagctttctcgctgatgtttctcaagctcatagcgacagatatagaaggtggattgaacaaatgagcatctacaaataacccttctttagccaaggatttaccaacttgtaaagcaaaaccagctcctaacgaatgccccactacacagacattactgctcccataaatcgaagctactgattgcaacgcctctagagcaacattaaaccgcacaggac

SEQ ID NO: 27180 - DNA, 2069 bp, Arabidopsis thaliana landsberg
  unsure (1)..(2069): unsure at all n locations
actgccatattaaccgagaaaatttcttccagccacctacttcttcagaaacgccaattctatcattctttcagagtccaggtgatccaagttccttcacctacttcttaggcattttctttaaattgctcatgatgatatcttatcaaagcatacttggtttgttctcatccaaatttgtattttgatctgtatgtatcaacgcaaaatagttatgtccatgttgtctccgttttattgccactaaccaaaaaatgcatgtttctgtgacaagccaatggcgcttgagcaagtaatgtctgaccgggatagcgaggatgaagtcgatgacgatgttgcagattttgaagatcgccaggtattccatgatttctttctgcgttcattaaatagacaacagaaaatggtatatgatgtaacttgctaatggcttttgaaacttaaaaaagctgcagatgcttgatgactttgtggatgtgaataaagatgaaaagcaattcatgcatctttggaactcgtttgtaagaaaacaaaggtaactacttctcttacacatgaacagacacaaaaagaccttatgtcttacattccatacctgtctaaatgattttgcttatggaactttgagctcaattatgattgttgatgtttcagggttatagcagatggtcatatttcgtgggcatgtgaagcattttcaagattttacgagaaagagttgcaccgttactcatcactcttctggtaatataagtacaccaaacatatacagacacataactacactatcaatcttgtttcgttttctgaaaaaaaaataaaaatttccaggtgttggagattgtttttgattaaactatggaaccatggacttgtcgactcagccaccatcaacaactgcaataccatcctcgagaattgccgtaatagctcagacaccaccaccaccaacaacaacaacagtgtggatcgtcccagtgactcaaacaccaacaacaataacattgtggatcatcccaatgacataaacaacaagaacaatgttgacaacaaggacaataacagcagagacaaagtaattaaataggaaaatctccggcttttatgataccgatttatcggattgtaacttattcttctttcttaaaaaattgtttaggagcaaacaaattttttatatgttagtgtattcaactgattacatttttagttaaaaaaaaaaatggattctgcttataactaaaaactgaaaaaaaagaaaagtttccttaatttttctttttgacttgagaaaaagctcctctagtaaatatgagttatatattaatcaagtacataacataaaaatagtatatattaagtgcaaatagattgaaaacaaatcaagaagaaattaattaagacagagtgattaagcttaaaaccccatttggacttgttctttctcaatgaatccctcacaagcagcaagcttcttcgattttgctttgacaccaccaatcggtgttttcgaatctttcaggtttgtctcgatttcaatctagatcggagtcaagtaataaaagtgattaacctaagtattcccgctctctcgaaagagttgggatttatcagctgatcggaaatcggatttacgtttttgttaaagatgatggttacgtaatggacatagtctggattcatgctctagttgattctcnnnnnnnnnnnnnnnnnnnnnnnnnnntttgtttcaaaggatcacagaatttgatttaaaatttgacaaaattccatcaatttctcatattagggtttatatttcttctagtaactcgaacttgttggaactctgtatactctgtgctatgtagataaagtcttaacattttggtcaactttgtttgatctctaaactagtttgggctctctgttttaaagttttgtgctttcactattacacaggtctcatacaagactacagtctcaagaagcataatatcgtcgactctgttttgagtttctcaacagtggttgaagcttaaggaggttcttatgtgcgttttgatatcatgattgaggttaagcga

SEQ ID NO: 27181 - DNA, 2109 bp, Arabidopsis thaliana landsberg
agtatctaataaaataacgattaatcgattaaccccaaaaaaacaaagttagcgaattgatgatgaaagaattcgaagaaacctctctctctctctctctctgcgatttcagaaaattagggttagggtttgagtaatgggcaaaaaaaaggtaacagaacgatttttccaaaaaaaaatccccagaaggagaagatgatggagcagtgtagtctcctcttctcttctcttctcttctctctctctctctctcctttattttttattcgatgttatatgttctttccatatgtttttttttcgtttggttttggttttacttggtaccgcggatattggaagttactaaattacccttgaagtaaacacaaggaaaaaaacacacttttgtttttctttggttggatgaatctgattggccaaaaagctaatggcaggattgttgacgttgacattagaaaattaccatgtaagatttgatctaatcttttcacaaaaaaaaaaaatatttctttttttaattctcttaaaataggtcaaacaattaaatcatttatttcccctaaattaattttcctgtataaattaaattacacaaaaaagaaagttccgaagagagaaaaacgctaagttatgtggtcaactttcgacttaattttgaatttatattatactataatagatataccattatataaaacatatgtaattgtaagattgcaaataaatgaaaatatttataaaaggattaaaatctctgttttccaaatcagggatacagtatccattttttcttatttcttacataatcttctaattagtatatatgggaaaaaatcaagtcatagatttttttgttgttaaggctaatatataatattaatatatgcataagataaatttgttaacaaatactactagcatatttaacaatattcactttagtcattggatatgataaatagcaatgtatatatggctttatggttattatgagatatgatcgtaaaaatgtggatttgttcaaaactatcttaacaaactactgtatattcatactcaccaaaaactactgtatattcataatagtcgttggttgctttttaataatcaaattgatacatagtctgtaaatgttaacattatcacacgatttacagtttatagaatacagttttaacttttaactatggacaaacgatgcattatcatatgatgatatactaaacaatgctatcagagtgattttagtatatttaacaatgattaatgggtgtattttcaaatccaatactaaaaattatatctaagactcgaaccaatattggaattttagaataaaatgacgaaaaaatgaaagattcattgtctcggtcgtgtaaaagtgtcgagcgttggccacttgccgaggcaggttatcaatgtggaacccatttaatttcctttagaatattcggcgttcaacattacagccaaattcccttttggttcggtttatctcggtttaactacctcattattgaagagaaaaaagacgagaatttgcaaagatagtaagatgcgtatgaagagcatatatttcctgaaaaaatccctatagtgtcgttatgatacaaaaaaaatactattggcatgtgttttggatggggcttacaaatctacacaagtggaagtaatatgaacacaaatctgaaaaaagaccatacatctactgttttggatatttggtttggggaggagttacttttggagatggtttggtttgttttgtgtagctctgaggaattgttatgagtctttattccagctgccattgctggagctaccgctgctgttttgtttgttccggcaacagttgtgtttgtctcttcgatatcataacctgcgttaagagatattcacagatcataagttagaaaacagagggttttagtgatatataacacacgtaagaggaaacttacagtcaaactttttccaagctaagacgagtttctccctgtcgaatactacacgatacccggtcatgtagttttctgtttcattaagagtaaacaatgtcattatttagcggatgttccatgattgataggaagaaaaactgatctt

SEQ ID NO: 27182 - DNA, 717 bp, Arabidopsis thaliana landsberg
  unsure (1)..(717): unsure at all n locations
gaatctaattctttctcactcattgccactggcagcggagatctgttttcacattctcgattaatgaaatatctttctggtgggaaaagaatgcgcgaagagtctttggatcattctcttgttccctgtccacctctttcagatgattcagatgaaccactcttccgtgtcgttagtactggagcaactgtaactcttagctcaagcgncagcttaatatatcattactgctcaaggcttccttcagatgagttagtctaataccagcttcatcagttagttttcctttattcaattttttgtttctttacttctttctgatttttgtttctttttgtcttctggaaaaggtacttcaaaccagcccctagatttgatgtaaacaaggatcaggggagttgcaccctttaccttcctaagagttgcccagtaaaagaagttaaagctgaagcaaataataaagtgttaaaacaagctgtctgtcttaaagcttgcattcaactgcacaaagttggagctctaagtgatcatcttgtgcctgacatggttgtggcggaaactgtctcacaaaaactcggtaatcttctgcattttcatatgtaaatttggctctaaataaatcacttatctatgaggttcgagtttgcagagaaaatccaatataacacagagcagccatgttacttccccccagagctagtctcccagttttcagca

SEQ ID NO: 27183 - DNA, 1565 bp, Arabidopsis thaliana landsberg
ctgtaatgtggcaatacagctagcagcggtggcagcattatgtgtgcaatacgaatctgagtttagaccaaatatgagtatagttgtaaaagctttgcagcctctcctgaaacctccagcagcagctccagcaccagtaccggaatcctgagtttgtgcaccttttaaataccagccatcttcttcgtgcaatagagttgggttctttgttcatacaaagtgagaattatactctgatttgggaaaaacatagacatgatcttactattagttttcattttggtgttaaagaagagtgcttaatatttctcatttgttatgtgaggtattggaaacaggctttttttacttgattggcgtggagaacaaacatgttttgcatttggtgtcttttttttttgttctttttttgttctccttttctgaatatattgacaagctctgtttaagggtttctgaatccaccatttgaaattgttattctttttaacctttacacagtcaacagagggcgtaacaagttatgcattatattcaacgtattcaaccccatcaaagaaatatctcgttagttctctttgatgcttgcaaaaaaaaacaaaaacaaaaaacagttggtccatttaatatgttttcattcttgttttctttttgtccttcatgatcaagtttattaatagatcaatgatctatctaaattggacgaagccaaagatatttcaatgtgataggaaaataaagatgataacaaggattggtaagatatcagtctccttccatgcaccatttgtagaacacttgtagccatgaaatatcaggtcttgtgcaatggagcgttgttcaacgttttccactgtcaatttttgcaccctgtggatttttttcaaattgttgcttgacattccgcaatctgaaaaccctcatgaagtcatgatgtggatcggactattgtccattcattaaatattttattgttacgtgcctttaaaatcttataattacgtgtggactttttgtgtttttaaaatcttaattagaaagtacaatgtatgtttatatccttattgtctaattaatgtgttttatttgattaatattatatatataaccaaaaaataacatatatgaaattccgtcatatttataaaagtttcataactaatttgtgaaaatgattttgtaattacatagtgatgtattttatcagactaattaacctctaacagcatcttttctataaaaaaaaaacatgtttatagattgtagaatatgcttattttctaaaatgaaggattttattatatctcacaatgcttcttattaattaagtgcataacaaggtaaaagataaaaagagaaccattttaaataacggaagatggaaatgcaatgagagggaactttcggcaaacatggagaccaaaagcttcagttagatcaggttgatccccatttggtccagcctcggccctgcagtccaatcggccttcaagattgccccctgtcccctctaccaaacccaaagcaagaaatatcacaggacaaatccttctccctgatccgaa

SEQ ID NO: 27184 - DNA, 1299 bp, Arabidopsis thaliana landsberg
atcccgttcgctgaaattaaacattcttttttaaattttttgtttaaataatatttttattaaaaaatttataattcaaataaatttaaaaggtgtctttcaaatagttatttgattttttatagatttcacatctaaaatatttctctatatgtaacatatagttttgtattttataaatattataaacgtttttcccttaaatattataaatgttttataaactttaaataattacaatatttaccttttaataaaatataatattaataatcatttaaataattatgtgtagctaattttaagggatttgatttaaagtttgttgtttggattaaatttgaatgaataatgtgattgatatattaaattaagaattaaaaatcaaatcaaataattaaggaaaaaagaattaatgccaatcgcatgccattgtaaataagtgttaagtagatgatttatttgctaaaatgattgaaaaatgtatatatagatagctttttaggtggtggcatagacgtggatgaatgatcctagaaaaaatatcaaaagtgaaggagaagcaaaggccataaggaaagcagagtggggacagacaagagcatgactagtggtgtaaggaatctatttaacttagcaaccacttttttttttttttacccgcattttttactcaaaaagtgtggtaatttctttgtcaaaagtgttcacactgcgctggttaggccagatcgctgagcgagcaaaatgcggggagaaaagaagggagaagaacctgaacacccggtgaatcgaaattcatgactcggatcttagcccccacgtctccgcggactgtgagctccactcggtcgtttaaggaagcatctctgacgagatcggcggcgtgggcttgcataagattgactctgtcgacggagatggtggcctcaacgttcttcgtactgtgcgcatcctggtagaatccaggcaccgtcgccctccccagtggcatgcctttgtacatgaccgtgaagctggactcaccgtacctgattccgaccttgtttgggttgacggcggtgaatagcatcctgatggtgagggagagggaggctgtggttggatccagaacagcgcttgggggggagatccccatgtacaccactgtcacttgttgcatatcgaactgcgggttttagggcttcaccgcctgtattacgatgagcgccaccgccagtaccagcatctccagtaactcgaacatcaagaccaagctgtagtaacatcccttcatcgacgccgactacgacgatgagt

SEQ ID NO: 27185 - DNA, 1210 bp, Arabidopsis thaliana landsberg
tggctcaacttcgaccatccaggcaaatacccgcttctcgtcgatccggtgatccgagaaagccgggtaaagaaggtgctagtggacggggggagcagcatcaacgtcactttcccccggacactctaaggcttgggagttcacctcaaagagctccgcaagtcggacacccctttcttcggcatcgtgccgacggaaggggaatacccgctgggccacatctacatgccggtcaccttcggaactccggagaactaccgaaccgagttcctgaggttcgaggtggcgaacttcgactgcgggtacaacgccatcatcgggaggccagggctggctaaattcatggccattccgcactatacatacatgatactgaagatgccaggaccgcaaggaatcataactgtgcgcgccgacttccaaggcgccgcagagtgtttccgagtggccatccaagcagccctcaccaccaagccgtcggtggtttcttcgacactggcgaactctaagcctgaagaggacctcgcagtaccggcgaatgaagctcaggccgtgacttctatgcgaccgactgaagaaaccaagaggatcaacctggggttcgctgatgaacgcaagactgccatcatcagctccagcttggacgacaaataggaaagcgcgctcgtccattttctgcaagataaccgagatgtattcgcatggatacctgcggatatgcctgggagtcccaagagaactggtcgagcacaaactgaaggtctatccccaggcaaggccgatttggcaaaagctacgtcgtttcacgcccgacaagagagaggccattcgcgccgagttagctcgcttggtcgcggctggatttattagagaggtgttacaccccgagtggttagccaaccctgttcttgtactcaaaaagaataaagtggattggcgcatgtgtgtcgactatactgatctcaacaaacactgtccgaagatcccttcgggctcccaaggatagatcaggtggtggactccactgccagatgttctgtgctgtctttcttggattgctattccggataccatcagattagtttggcgaaggaagacgaggaaaaaacagcgttcatcactccgtttggtgctttctgttatactccatgccgttcggctcaaaaacgctggacgacttatcagagaccattcaaactgcttagctgag

SEQ ID NO: 27186 - DNA, 1063 bp, Arabidopsis thaliana landsberg
taccagattgatcgtcagagccatcttcttcttcttcttcttctttaacctcagaactctcatcatccttatcaattaaaacatcctcgcttttaatctcatctacctcctcactccctacgacaccatctttctccgatctctcactttcgagaaccctagcgtcatttgtaaccgcagaatctagctccataggtgaagaagcttcaacatcatcatcaatggcttcgtgaacatccccgctcgaatcaactacagtatcatctggagttaccttaggatcctgaatcgaatccgtttgttgaacaatcacagcatcctcgttcatcaccgggattaatttagttttgtacattacaaatcgataagaaccctagcaacaacaacaacaacgatcctccgatgagagattatccgaatttggtaacaacaacaacaacaacaacaacggattattgttataaaaaaaaaaagctaatcgagagaaagacaataaattagatctactgattactattgaattgggcttacccggcccatataaatatttataagcccgtttaaggaaccgacgtcgtatgatccaaaaagacctgaaaacaatcgctccttcttcctcaccttcaagcgccgtcttcttctttgttttttgctctcggctgatctctgtattgggtacgtttcttatctcgatttcagtgttcatttgttttttttgtcttttcttatgtagctatgagacaggatccagaacgatgcaatagatattagagagccttcaggaaaattttgccatttttctccatttcacctgttgttgggttctagattaaataaaactagagtatagttaataatttctataggcatggttttagatttacattatagtgggagtgatgattcaaagttttagtctttgaacatttggccatggtagttcgttgacttaatactttgtgtagggttaacaaaaaacctacttttagatccaaagactcagattttttacatttatttatcgacttaaagttggaatgtgttaaagactgatagctctctt

SEQ ID NO: 27187 - DNA, 1389 bp, Arabidopsis thaliana landsberg
ccatgagaaactaagtatcattaggaacactaatttgtcccgagtagaacaatgaagtgagagagacagcttactctaagaacaaggtatgcatttccagagtggaattttccaaaagaagacttagggatagaaataagctgtttattataaacacaccaaatctccaagccactatacccaaacaaaaatggtttaaacacataatgagaaacaaaaaaaaaatgtccatggattctaataaacaagtatataccttttggttccaacaccttgaaacgctgaatcaatgtctttacttagcctagacattgtttgctttcatcttcctcaaaatccaacaacagtgacgcttaataaaccaatcctgcaatttcataaaccaaagagtagagagcaaacattaaatcaccaacaaacaatgttgttaccagagataaatttgcatttacgttttcttaagttgctgcatatgcaatcaatcttctcagattttcaattaatttttcaccgagaaaacaactttcccaatcccaaccacaattcaacccccagaaagaaaaaaaaaactcaaatcagttaaaatctccaaacaatcgaaaacaacaaaagaggaattagaatcaattgtgaagatgaatgttaaatgcagaatactcacagggatcaggcatacgaaggagaagaaaaatagcgattcaattgtgagagagaggaggagtttcgcaaaaagcaataaaggaagagagtgtgtgtgccaaacggatgaagaaaataattattattagtctgcaacagcatgtgggtcccaccaaatttcaaagaaataaaaaggcgcctttttgtcagaatttttgttggatttgcttctttaactttcagctttaaacgacgccgtaacacaaggtcaatgttatgtcatgttcatatataatcacaatctcatcatttctttgtttcatcattttatcttatattatatagatttatatctaaatgtacatatatgttttcttatttggctaagataaaacttcttctattaatgtcttctctaaagttttgttgagaaagtaaaagtttatatctataattgcattcaaagaaattcataattgatttagaaaagaaaagaaaaaaaatcaatcaaaatttaatgtatataatgtaaagtgaagacacatgtatgtgtattctataacactacatttttttttattagtcccacacggcaaaatgatagtggcatgtgactatctttaggacattggtaaaaataactggtaactagtctttcatgctaaattaagtatacatattttggttaacgaactgagttggaaagaaaaaaagggttaaacgttctctcaagtcataaatttaacaaag

SEQ ID NO: 27188 - DNA, 982 bp, Arabidopsis thaliana landsberg
gacattttcttgacatccacaagttatggaatcattctaaacatatctattacctaataatgttacaggtatcttaaaaatctcctaacccaatattcagctaagattattgaatacaactaaaggtatattattatacacaaaatctgttatgcataaattgaatatatgggtatattaataactcaaaattggttttattatattggctcaactatttgggctatttaaaatctcatcttaataacataattggaagaaaaccaaaattaagatgaaatcttgtaaacttttataaatgatctgaatataatttactaacataatattcaaagttaagaacttgttgatatatgtggtcaactataaaacaccacgtttgaaattcataaggtatagttgaactttcatagattttctctatcaataatgctattcgaaacgtcatgtatgtgtgttttctagatttgaacaagaagaaacggtcttgtctctttcgttagacggtcatgtctcttcgggaacatccgattaaaaaaaaagttacacgcgttgacttttattacaaaaatggcagtaaatctggcagtaactgcgtaaagtaaaaataatgtaaataataatcttcaccggaagacaaatcttttgatctgactttcgtctctccaaatctctctcgtctcgtttcttcagaggctatggggatctccttaagcaagcgtcgacgagacaacaacaaccaccaccaccatccacaccacaatccgccgtactattactccgatcctccaccacaacagccgtcgcctcaaaacgagtatagctactctcacaattaccccgtttcaactccacagctctctcttcctccaccaccggctcagccaccgactttttctcagcctcctccgtcgcagattagttacctaccgtacggtcaaaactaccatcaaaaccaatactacccgcaacaagctcctcc

SEQ ID NO: 27189 - DNA, 1550 bp, Arabidopsis thaliana landsberg
  unsure (1)..(1550): unsure at all n locations
agaaatggcgcataacatcgatactcgatgagtataagcgatttgcagcggctaaagctagagtttcggatcaaaggttcttggagtcattcgatgtatcaggcttgaagcacactccaacgtgtttttcttgctccaataggtaaaataaaaacgagataatcaaagaagatttgaccaatccgtcattcccttttttccatagttgaataacaaaattaaaggaggagaaaaatcacattcttctggtttttgttttcttttctttttctcctgaatcaaataataactcgataataattggaagaagaggaatagatatctttttcttttgattcttttgtaatctaataatgtattaatggatctatgtcctcgagccagacagtgtaagcatgtagctagatacataattctataaattaacgcaacaaataaaaaaacaacagtttagtttaatacgagatttattcaagtgcaggattagtattctcatcatgatgataatgtgaatcgatcactatactaaactgaaaattaagactaactggtttcgtaaaccgatgacacatatacgaccaaacctctccttgatgagtcacatccgagttaactcgagtccactcattcttctcaacatttccgataggccactggccacatcaggttaacgtgagtcacaataccagtctgttcagcttcttctgatcaatcccgtgatagtgaataattgatcagaattaaaagaaacatcaaagtcgagtaacatcaaagtcgagtaacgagttctaattttggttaccaaatgtcattggcaagtgaaccaaaatttcgatgtctattgtatcaattgtgcattggtgtgttaattgttcactggttttcgtcatcaaccaactcacattgttatctgaagtcgtttccatacataatctataattacattctttacaaaatataaaaatgctctcttttttgttggtgttgttgttataccaaaaactcaccaattctgaagatggaagatccactaggagatttgcaagaagaggggggagtgtgtgttttctttctttcttatatacatcatttggctgagttgggagttgggacaatgtttcgtggtataaaacctatctatctatacactaacctatcatattctctggcaagaaaaaagtaatcaaaagaatttaagttttgacttctatgcaaggtgcaatttccttctcgtttcgtctccctgcgaaaaaatgatcaaaaaccggtatgagaatcacaaatacacaatactgatttccataagagaacattgatgacattgagagaaaacttactgtacgttgattattcctaacagatttgccatgtcttgagtccatagattctggtctcgtggttcgtccatgtactctctgcataaactcttgtatgtgattatatgtactgcaaacagaaaccacataaatcacanaaaatatatgtcagaaattgtcatatagaaaactggtagacatgtgtaagaaaacacttatacctaagacgatgtc

SEQ ID NO: 27190 - DNA, 1380 bp, Arabidopsis thaliana landsberg
  unsure (1)..(1380): unsure at all n locations
tatgttatactcacactttctttatttcgtgtaaaacaaaacttatgtctaattttcttatcggttactttgaccaaatctacgtgaaataaaacttggagagttttttctgcgattaaacgttatatacaacactctttttaaataatactaggagttatgaaaactgtattagatctcattgtacttgacataatcagtttagaattaaaaaaaacttaatttaaaacaaaaagaaaatatgataataattacttttgatgcttagatccgcaggatccacttagaaaaagaaaagatacttaggacatgaacaaataattaagtggtggnnnnnnnnnnnnnnnnnnnnnnnnnnnnnnnnnnnnnggtaatcttgtatgttatacattatttcacatcttacctatagccgttttatcaaaatatagcagaagttattttattttttaaatatttttttgtttgatatattttcttattcagaattatctttgttttcaaacttaattatttatttttgctgttgnttcgcgtttgaagcaattcaattacgagttntaacaaaaacaaaaaagaagacgttcgaanaactatcagatttgaaatgaaaatgacaaatcttttaaagttaaagttgagtgtattttgttcggtagtacgtgaattggcagtaaagtctactgattaagtcaaaactttcatatgaaactttgatgttaagtgatataatcgaagaaagcatcacaaaaaaaaacaaaagtatccttgggataattatttatatacaacgcacgagtaattcaaaagctacagtgaggagctataaccaatagtctcacttaccacatgggaagttacataatcaaagctcatggatttcaaatttaggatatatacagtatgttctattgtatatgtattggactaatgcgttaaagctgttatagtgtgagaaggacgtaacgagaggtcttcgtggacctaataataataacgttttacggttttatccaaagaccaaaaagctactagatctacgattcaaaccaacacgcataaagatgaaaattaaattttaaaaacagatctataatcaacatgtcatgtttggttggtctatttttttcaagtttttgaacactcccaactttccctccactcctttagtttaccacaatacccaatctatctaaacatgtaaccaccaaactccaaataatttgcatggcatgtttgagtaatgtgatccatgaatttgcttcttttgtaacaacaacaaaaatgtctcgtggaatatatgtttgtgccattcggatgaaaaatgaattgaacgatgaaaagggctgaagaacaacaaaaggttcgattaccaaatat

SEQ ID NO: 27191 - DNA, 1410 bp, Arabidopsis thaliana landsberg
aatacagtcatgttacgatttctaatttagcatctcacaaaacccaatttaattgtgtattggacgatcttgattcctttatgttgttgggtcctttctttttacttgtgctgatttgtcaaaacaatgcaaaattagagcttgaagctgttttgttagaaaactgttcaacttgttatgtataagtcactgattgttaattgttcttgttaccttctaggtttttctctgaatccaaatgctcgttgtgtcagtgtttcatttggactgaatcactccaacaaacttcatatttctgctcctagaaccaaaaggatcctaaccattcaatctgcatacaggtatataactttatcttatacaaattattgcttgagatgtcgaaaactgtggttcttgttactccttaatgttttgtgagcatcgtaacattttttagtatactttagttttctattggcaacttatgtttacagagacagtttgcaatgtctaatagcatcaaaacttgcagagatgatgatggttcaggcagcacaggcctattcgtcggagggtttattttgggcggacttatagtcggtgccctcggatgtgtatatgcaccacaggtagtaatctgttacatggtttagtttgatcactcttagagcttgtattcgtttcaatcaagaagttcttgagtggactcgaggagctctgtaaccttctctgtttcactttgactcatcaatgtgtgatgttacttttgtgaattgtatcagatcagcaaggctatagctggagcagaccgaaaggatctcatgaggaagttgcctaaattcatatatgacgaggaaaaagctttggaggtaagttattgctaagcctcttgattcatattttatctcactttttgttgaatttacttatgaacaatgttgtctactgttaatgcagaaaacacgtaaggtactagctgagaaaattgctcagcttaactctgctatcgacgatgtctcctctcagctcaaatcagaagatactccgaatggtgcagctctaagcaccgatgaaatcgaggctacagcctgaaatcatctgtttttaggatttgaaattgaatcatgggagattacttactatgatcccaataattgttttcctttctgtgtaatgttgtacaacttttcgtctactatcttcaaatgactgctttcttccttctttttttttctcgatatcgcggtgttgaaggatatatcacagttatatgcgaaaccagacgttatgaagactatataatatcctgatggaaactatatgacatgaaaagaaggataaaaaaatgagtctcttgagaaacttgtgatcactggctcacagaatcttattcccatatgtattttactacatatagccacatattac

SEQ ID NO: 27192 - DNA, 1321 bp, Arabidopsis thaliana landsberg
tgaaactttggcaactcactgaattagggtttaagagagaaagacaacgaggacaccgagcagaaccaagaccaggattcatagtcggatcataatcaagaatcccacgccgaagcttctcttcgtatacttgtctcgttcccatcctctctttctctccgatcaccgtctctcttctctccgagaatgttccttctccaccgttgctacgccataactgaagcttacaactaataaactactgggccttatgggctttcttattctggcccaaataaagacactacgtcatcgtcatcgtcttcccaaattgagatgccctacaaaattcacactactatcttcttcttcttcgatttagcacagaagctgcagttttatcaatgttctccctttcgtttccatcttcttcttctgcccttttaccttctctcgttgctttcgattcttcgcgtcgtctctctttgcaaccaaagaagttaaatcgtcttcaaagtcacttattttcacctcaacatctctcattctctcagtctaatgtctctcgttacagagcgttttgtgtttcttcaagctctcctccagagggaacagtctccgtagtcgatttccatgagaaagattggtcctttctcgaatctatggaaattgactccactgaacatactcagaagattgagaggatcataaaggctggagaattatccgaatcttcgagggttttggtttcaattagctccgaaacattcgttgatcgtttggtagaatcttcaccttctcagcttttgctcattgtccatgactccctttttacgttagcctgtatcaaagagaagtacgacaaagtcaaatgttggcaaggagaaatgatctatgtcccggagaaatggtctccattagacgctgtgtttctctactttcttccagctttgccttttgacctcgacgaactgttcaagacactctctcaacgttgttcctcaggtactatgttctgacttttcttcactcactatgtctcaggctaacacttgttggagtcttagttgctaacactagtctaatgcttgggacaggtgcaagagtagtaatcagtcacccgcaaggtacactaggcttggagcagcaaaggaaagagttttcagatgtggtcgtctctgatttacctgatgagtccacattgagtaatgttgctgagaagcattcatttgagctaacccagtttgttgatgagcaaggcctttatctcgctgttctgaaatcctctaaacaatagtagattatgtcaagagaacatctgttgtatgagattatatttttg

SEQ ID NO: 27193 - DNA, 1599 bp, Arabidopsis thaliana landsberg
  unsure (1)..(1599): unsure at all n locations
gagatcatcgattttggatttaagactttctatgtacgaaactgcgtcggataaaagtgacgctttgtccattcgtgacacttttggtacgctggcacgtagagcgtaaaaccggtggtttagcttctctctccgttgcttctccgcttccacgtgggacaaaaccgccggatgatgtttctctttcgtcgccgcagctaccattgtcgtctcaagtttcctcctccgttttctttccgatccgaattgctgatttccgatttccgagtgatctgataccggcggtttagagtaagaaccggtttggttagtnnnnnnnnnnnnnnnnnnnnnnnnnnnnnnnnncttgactcggtttataaagttccggttatgtataattgattcagatgaaccaagttcgataatgccattgttgatgggtatggagaccaatgtgtgtaccccgtgaaaaccggcttctttagccctctcgtagttgctaaaccggagctcgtcgggaccggttaaccaaaccaaagattcatcggatacttcctttctcggcgatctatcttcaccgtaaaacgatgcggcatagaacaactccagatcatctccaccgtccatcatcagctcacactcgatgctgtttgttgtatacttaagaaagaaacaaaaacaaaaaatcaagggtaaggaaaattatattattttcttaatagaacttttttaagaagttgatttaaagaaattttggatattttgattagataacataagaggcaaagaaaaatgaacattttcttgggaattgttgttcttgtttccacagaaatgaccatcaacccaaaccaagtaagaccggtccgattgatcatcaaacatcttttgccaaaaaatgacataagcccatcggtccggtgaggtttccacgacaaaccggagtttttgttgaagtactaaatccggaggagaagaggacactatggctgcaggagtttgttgtgtaaaagagagcaaagaagaggacaatgatggagagaaagtaagattatacatttctttccagtgatcccgaccaaagagaatttagagggttagagaagacaagtggaaaaggatgaataagattctaaattaatagagaagacgatattatagtagtaatatcaaattttcattaatgattttcgtgaattaaagtttatgataaatattccaatagtagtaagttagtcacgtgaaaactgaactgttttcctactttaacgttataagaacaacaatttatcgtatagtggtccaactttgatgaaatagacaatatatcattctttgccaaaaaaaaaaaaaaaaaagacaatatatcattttgatttatattgaatgatggttcaaacgaaaacttattttgacaaatttgaaaagaaaaaaaaaacatgagagctacaacaaatggatatacgtgactttataaatttcataaaggaaatgatttattcaaattgcaggtaagcattgatcgaagttgagttacatataaaacactaaggagttattacttattagaagcgatcaatgatcctcatagcagcgttagagagttgggcatagata

SEQ ID NO: 27194 - DNA, 1399 bp, Arabidopsis thaliana landsberg
atgcagaacacaaacttttgaatcataactaacactacatctttcaatggatagcttcttcaccggttgtgtgtgacacagtgactaaattctgacattgttcaacaaaacgatttgactcctgttaacaaaaacaaggcactaagggaatttcaaactactacagttcccaaacttcctagacaatctttaagaaactctgatcaagttagttgcatcaacgaaagtattaattttgcatcaccaaaatcaaagtaaacgcaggaattgagagcgattagagattataccgtcatagctagtggaatcaaacgtctgctcaagtttccgacgcatgtcgtaagcacgcgacgaaacttgccttacaaactcatcggaagtcccagggatcgtaccatccaagtgaagcgccttctcaacttcctcgctctcttcttcatcgccaccaagcttatctgatcctcctcctccgccgccggtcgatttacagctaacgaagtgtcttcttctagaaatcgaaatccgtctcccggagctggacaagccgaaaaggtaagaagaacggcgtgaaggaagacgaatcaacactgatcgtgaagttgaaacggggatcgtagtagtggtggccggaggaagaattatggaaggagaaatagatgttagcgattccattgaaacttccttctctttctaattcactgtttatctttcccttcttagaaaatcaaacgatcctttcttaattttctcgggaaaagagaaaattctcgacgtgacgtaaacgactcaacaagaagaaaagaaaaaaactcgtggaggcaaaatttaacaactctcctgaatctactgatatttttcctttggtgggttccacacatgttcaagaccttctacctcgttccaaaggtccgtgattaacaaagtcgtaattaagaagcttgcttaattaatacgagtctctgaattagaaagacttatatattacaaaaaaaaacgtagagaggtgttacataagaagctttcactttcacagtacttatatggatattcgaaagaaactcacctaatgatctcacttgtaaggtcacgaaccagttgtgttttcaggagaagataagccattcgatacggtttcatcatcaccaagttgtgaggattcttgatcagggaatagctccagtcgcatagacggtgcaatgttattcacatgaagccatgttagctcccataagctatctccaccaagagcacttctttgcaatagcacgcctttcgtcttcatcaccagcaatatgtttttgagaagctctggtactgattcttgtagctggtcgctttttttgcctcttactttcactttcatgtatttctccattcgagttagaacaccgagccatag

SEQ ID NO: 27195 - DNA, 781 bp, Arabidopsis thaliana landsberg
tttgctatttcaattttgaccggttttggtgtccaaacacggtttaacagaccaagaaaccaaacttgttttaagaaagaatacacaccaaagaaatgttgcaaagaaggcataataaaaaagagtgttagttgattagtagattggtcacaaactttgtctgattgctaaacaatataaaaactcttatgaatttatttagaacttatttttcagattcaaagaggtaaaaaatgtcgttgtgtttggttatagcttgtatggtaacatcatggatcttcttacaccgatggggacaaagaaacaagagtggtccaaagacttggcctttggttggagcagcgatcgaacagttaactaattttgatcgaatgcatgattggctcgttgagtatctttataactcaagaacagtagtggttccaatgccattcactacttatacatacatagctgatcccatcaacgttgaatatgtcctgaaaaccaacttctccaattaccccaaggtgaaaaaagctctttatatcaatatcatgtatatgttttgttgtgactttgattttttgttgtatatcagggagagacttatcattcttatatggaagtattgttgggagatgggattttcaattctgatggagagctttggaggaaacagagaaaaaccgcgagtttcgaatttgcttccaagaatcttagagattttagtactgtagtgtttaaagagtatagtcttaaactcttcactatcctttcccaagcatctttcaaagagcac

SEQ ID NO: 27196 - DNA, 2030 bp, Arabidopsis thaliana landsberg
  unsure (1)..(2030): unsure at all n locations
gtaattttacatatagacatgtgattggggttgtatgtttaggttctggggcaatatggagggcaaaagcagcggaccggcgggtgaggcagacgcaggtgaagaagtggagagaaggaaagaagttcagagtcgaggtaatgaacaaatgtcccatgtgtccaatcatcaaccttcgtctgaaatgtcaaggatttcctcagtcgcttgtggaccccacgctcctccgtgttctctcctcttccgccggaaactgtgtggttaacgatggcttgccactgagtccaatgcagactctctccttcaactactccaacacacaccagtttgctctgcgacctctttcttggtcttttcagtgcgagtaaatcaataaattagttaaatcaataaatggtcatcatcaatctgctgggtttcttcgtattatctatatatcagacctttttctttaccattttagcaaaatgttgaatctatgtacaaaagataaactataaggagtctctaaaggaggaaaagagtcatgaggagaagtaaagaaaatagaagacacagagaggtatccaaaggtaatgcagaagagataaaatgtgagcctactagatgaactgttcctgtgccttcgtcttttacttttatgcttgatgagcctgcaaagacagataaaacaaagataaaatagtttcaaattcgaaatctttcccactcacaatgagacatgaatcgtttgagtgtatgaatatagcacttacagttgtattcagtccacccaatgagctgattttcgagatcgtagagaacaagcttgtttgaaagcaccaaatctgcaaaagagaatgtaagatattgtgggcattggattaaatcacacggggttcattgtcactgacagcaagagaacacaatgggctttttccacaaactgaattgcatgcaattaaactttgtcactaagtcatgcttttgtataatgtgactgcaaactatgtatccaatttaaggtacctcccaaannnnnnnnnnnnnnnnnnnnnnnnnnnnnnnnnnnnnnnnnttgccaaccaatgcaccacattccttcctgtgaaattttggggttatgagtttggtatgcaatggatagaaagattgagggtaaaatcaggttgcaacaagaatattacaagagccaaaaatcaaccataaaggctgaagatgcttacatgagggaacagatagtcatgaggataaaccctgaggaaaaccgagttctcgaaatggaaagtgacattcggaaacccctcatcaactctgcagcaaaggtaagatgtggttttcataagaaaactattgtgtgatacgttgacatcacaatgagcagttgcgtacatgcaaaccatccacaatgatgtccaacggtattcttggcagatgcctatttgaaaattttgtagtgtaaatcattaaatgaagacgtataactaacctgccagagtactgaaagcatttataatctttatccactatgtgaacttttagagcaggctcctgcgaggttatctaataaaagaaccagatttatgagaccctgcagttcaatttcttaaaggaactggatattttcttgaactgtaccttcttcaccaatggttcatagattatctctggaagataggccaaggttgtaccactgtcaattatcgctccttttctatctccaggttgaaataaatcggctgggatagttagaaactcctgaccaacttgaactgctgtcatattgacattgtaatgtggtctgcaattgaaaacaaaaaaagtcggttaacaaaaaagagctagagaaagaacacattcaccatttcagacgaagctttcatgtaaagtacactaatgttattttctttctctaaataagaactgcaagaagtttcactctactatttgtaacatagtggctgcctctaccagtatatcattgagcttcttatgattgtatttgaagtataaaaggaaaaacattataaaaggaaaacaatgttgacgta

SEQ ID NO: 27197 - DNA, 1583 bp, Arabidopsis thaliana landsberg
ctaaatagcgttgtttaaatcaattataactgaacattcaacgaattcgttaaatttctttaaaatgaagtacattttaagaaagagtttgttttaatcatttgttcaatcacataaacttagcttccttatcataaagaagtaaaacaatttcattaatattaaaccgatatagcaattattacgtatcaattttatttttatctgttatatagtaattttatagataatttatttacaaaactatcatatcattgaaaaattaccaaattaaatttgtagttaaaaaatatagatttttctataggtcacaaacattgaatatgttaacttttttttgtccaaaaacctaatataaaatccttgaaatataaagtctaggctcggtacctggttcggaaccggacgttagggtagtttatagcgtcatcgatccacgagatgcatcaaacataaaatctgaaccgttgatgaactctattacagcaatgaaatcggacggtaatgattcatcctaagcctgacgtggcattaaattgtatttaaaatctggctttgcgtccgaatccttgaatttctctctcctaaaaaacgctatcaaaaagaaaaacaaaagctatttgttctgttttgtaagaaaaaaagtagacagaggagaaaaaaaactcagtgccgagtcttgtgatactctgaggtgagattccgaagtcttctgctttagaaccctgtggatactctgcttaaatctttgtgagcttttatgttttgagctttgtttgaattcgcatgttcttttggttcttctttgtgtttgtttaaagttgcgatgagaagttagggtttctcatgcgcttcttttatttgtgaatttcgatgttttgattatttattgtctttttgatatctgatgctattaagttgttgacaaaatgcatgaatttgacgttgattgacttgatttcgagagattcaagatgggtttgtgttttgtctgaatctgtgtggtgtaagctctggagatttgtctgaatgaaagggtgttttttggtttcatttgtccatctggatctttgttctactgaatgtataagaagcgaggataaatgatgaaccttcgagattttggtttcttagtgacttacgcgaaatttccatttagttcttcttctgcagatctaaagtgggattaagtgataattatggatcaataatgagatctaaattagatttgtcttattgctgactagccaagttttagatgttgttttcctggaattagctttttttcgcatatatgctaagtgtgaattcaatgcgttttacatgttctttatgtcaagttgttcaatttctttatagagagcattaatttctgctatcgtagctatattaatcctctgaactgatttcttattcacagccacaataagcgttttaggtggaaggatctactgaactggtttgtaatatgggggaagatacaaaggcaaccattgagcctaccgcaaacaagactacttctcttgaaaagccatcataagctatggctgttaaggagaatgctgggggtaaggaaacacatg

SEQ ID NO: 27198 - DNA, 1125 bp, Arabidopsis thaliana landsberg
  unsure (1)..(1125): unsure at all n locations
gaagagaaaatatggtagggactagatctttccggacaaaagtaattgcctttttacaccggcagtgatgttgtatccataagatgatcatatttcattaattcttgtattagtaaaatgcgaataaaaactctttgaagtaaggtagagagtgacatatcttagagactaatgatatataggtagtagagacaactattggtgtggcctatgagggttcagatttggtaaaactctttgaagaaaggagagagcgacatatcttagagaccaatgatatatatatagagagaaaacatcttgaaaccatagaaaaagttgttgttcatgcctacattgatacacattcgccggacaagtgacagtttgaaagttgaaaacaaagacnnnnnnnnnnnnnnnnnnnnnnnnnnnnagtggtcatgcactctgtgttaggagtcttcaaaatggtgatcagtttcgtcaaagatctcctcctgcaaccacaagccaagcaataattaatccgtgaaaaagaatttttgtttttaacttatataagattccttacctgcagaagttcttcaatttcattctccatcgtaatgattccgactgcttcttcttcctcagcaagtttaggcagcggattgccattcaattgcaggatgtctgcatcattgtcttttgaccacttcttgctctttgaccctcctttaaacgaacttgctcgattcggaaagctcttccacttttgaagcgatctttttgtccttaacattctctcctgaggagtaggagttccctcactatccacatccactcgggcttccttaacactccctattagaaaccaaagcaaagattctcaatacttgtaactcagcaagacattgttttgtcgattaatgaagcagtttaccatttttagaaggtaatgggtggattttgtcacactgtcttacaacaacagccatgtggctgagtcctttctggaattcgttcaatatgtcatataaaggcatgatttctggaactctaaaacaaagcaagaaatcagcttttgaagcacattcgagtggggcttaggttacttagatttggaaagttcaccttggaatcctatttatcgcgacattggtg

SEQ ID NO: 27199 - DNA, 1818 bp, Arabidopsis thaliana landsberg
ttccaggtcttgttcaaattgcctaagagtttatgtaagaatttgacttctgtgatgatgaaattttggtggaacagtgttcaaaggaaaatccattgtattagttggcaaaggttaacattacctaaggaacagagagggtttggtttcatagatcggcaatgtttcaacaaggccttattggctaaacaagcttgaagactcttgcatgagaaagaaagtctgttttgcagagtttttaagagccgatatttctctaagtctgatttcattaatgctaccaaaggctctagaccttcatatgcttggaatagtattttatttggtagataaccacttcaggaaggtttgagaattgtgattgggaatgggaatcatacttctgtttggattgataactggttgaatgatggtcataatcggagaccaatgaatagacagcctctcattgatattaagttgaaagaaagtcaacttattgacccggtgtctagaaattggaatctcaacatgcttagagatctgtttccttggaaggacattcagttgattctcaacacagcccagtggtttataaagaagcctatatttgttgggatcagtcgaataatggtctttattcggttaagtctgggaatgattttataagcaacaagactcatttctgttgtatcaagagtctgaggttcatccatctttaaatccattgttagatcctctctgccttcacaagacagttctaagaattaaaatcttcctctagaaagttttaaaaggggcagttgttgttgaaggcagactcagaactagaggaatgattattaagcatggatgctgattgtgtgatgaaacaatcaatcatattttgtttcaatgcccttttgatagacaagtttgggctctttctcatttgtcattttcaggctttgaatttttgggttctgtttatgcaaacataagctctttgtttgatttaccacaaagacatgatattcatcatcggttgagattgttggtccttggattatttggttttttatggaaaatcagaattaaattgttatttgagggtataggatcaatgacagttaatctagtggacaaggcgtttgaggaatgtcatcaatggtgtttggctcaggctcatagtcatgaaaatcataaagttttgccctctcagaaatggattccacctctgccagatgaattgaaatgcaatatcggctttgcttggtctaagaaacatcaactctcaatgaggcatcttgggtggttagagactcacacggtgaggttctgctgcatagtataagatcttttactcaggtactatctctttttgatgctaagatgcaaagttgggaatgggctttagactgtatgtctcatcatcattttgataaattcacattcgcctcatccacctatgacattattcaagctttgcacaaaccaagtgagtggcctaatgttttgggtcatattactgagcttctgcttctcactaaagacaagccaaattagtttctcatgatggaacgtgctcactgtaatagaggcgcttctgacatagcaacaagtgtgatcacaggtttcagattgcaatcttacgtggcaagaggataccctttgtggatgacaatggttttactgcagagagaggtaattagaatggtgattgggatatttttgtgtcttgttagattttttaagtttaatgtttctttagatttgggttttgtttttgcggcttcttttttttagcctttattttattaatgtttaactttaggttattcattttatagttcctttctt

SEQ ID NO: 27200 - DNA, 1226 bp, Arabidopsis thaliana landsberg
attaatttcttatgtaaaataaaataatgttttgtggtttaattggttgtgtattttggaacattttttgtggatgtaccaaagtgaacacactctcctagacgacgacctaacaccgattcacgcaaatcaaatgagagaaaaaaactctctgataagtaaaaaataaaatgttacctaaaatctttcttcaactaacccattttgttccttgaatatatataaagagagacccatcaaagatctcttcacacacacacactccatagaaacactttttcttgtttcacttatgcattttcattttagttttcggctaggcttcgtcttcctaaagagatcagaaaagaacagaaaaaggtcagtatgaataagtttgacctcatttggttccgaatatggattgtttcactaacatatattttcttgttttgttaggaatttgtggaacaagtcatgagacttgtagagcttgacactctgagatatgctttagtaggtttacctggtaccacgggtctttctactgagcagaggaaacgtctaacaattgcggttgagttagtagcaaatccatcaattattttcatggatgaaccaacatctggacttgatgcaagagcagcagcaattgtgatgagaactgttagaaacactgttgatactggaagaacagtggtttgcaccattcatcaacctagcattgacatttttgaggcctttgacgaggtttgacctaattttgcttggattacaagaatagttatgaattgttatcagtcgatgatcttaataacgtctgtaccttttttttttgcttaaccttaaaaatacagctgcttctaatgaaacgaggaggacaggttatatatggtgggaaattgggtacacactcgcaggttctggtagattactttcaggtacttacttgtccctgccttttcctattctgttttgatcttcgcacttacatacttgtgcaccacgttaaatatgacaaaccctaaaccctctacaggggattaacggagtacctccaatctcaagtggttacaatccagcaacttggatgcttgaagtaactacacctgctttggaagagaaatataacatggagtttgcagatttatacaagaaatctgaccagtttaggtaactatcacaatcaaaaaagctacattttcaaaaacataaatcaaaccatatactgtgtattttaacaagaa

SEQ ID NO: 27201 - DNA, 833 bp, Arabidopsis thaliana landsberg
  unsure (1)..(833): unsure at all n locations
gaggatgcttcaaactgcagagatccaaccccataaatccttcctttctttctcggagcaacctgcaaagatcacaaaaactcacaaggacacaacagaaaacaagtgagaaaacaagttcaacacaaaacaaaagaattcaaacacaactagacaacgctaatagtgactatcaagtacacaacacaaccacacttacaatagaaagcaattcaaacacaacactacacaaagtatttttaataagctgtcaagatttcagacaacacaagaagctgtcaagatttcagacaccatacggaacacaataagctgccaagatttcagacaccatacacaacaaaataagctgccaatatttcagacaccatacacaacacaataaactgccaagatttcagacaccatacacaataataagctgccaagaagaatgacaccatacacaacacaataagctgcaggatttcagacaccatacacaacacaaggacttgaaactaaagacacaacaagcacaaaagaaagagcacataaaatttacctcaataaatatcttgttcttggcatgaacagaaagtccacctgatccagtgctctccggattgtcccctgaacccatatgagactcttcctcttcaatcctagatgtcactttcttgtagatctcctctgacttcccatcgatgaagcttccatccgcttttctgtgtgtctcatctagcagctcaaggaaatcaggagtttttttctccagtcttctcacactgaaacacaaagagataaacangatgtcaatatgtaattctagattagtaatggtaagagagaag

SEQ ID NO: 27202 - DNA, 1052 bp, Arabidopsis thaliana landsberg
  unsure (1)..(1052): unsure at all n locations
cggttctgactctcgagcttacaaattcgaggggtcacactttgcgttgcagtcattatgttccctcatcttctcgggaggatactcctctcccctgtgttatatactgtcatggcaataggtacatagatacttgcacatctcttttaggaactaagaactcgtttatgactagttgaataaataagaacttaatccgtttgtttcggaatcttaccagtggatgtagggcagatgcaaatgaggcagttatggttctcctcccatctaatataactgttttcacccttgacttctcggggtcaggcttatctgagggtgattatgtaagccttggctggcatgaggtgtgttttcgggtcttactttctcaaggttcttcgtcttttccttatctaaattttttcttcttaaacttaagctagaaggatgatctcaagactgtggtatcttacctgagaaacagcaatcaagtatcccgtattggactttggggacgatctatgggtgcagttaccaggttacttcttgagctacttttcagtcacacttaaaagtagtattagtagttgtgttgactatagattcaccagctttctaaaggtctatgatctgaaaagtgtgtcaactctccacatttcatcttgttctctccatcatttgatgaagcgggaatataatgtgcagccttctctatggagcagaagatccttcaattgctggaatggtcctagacagtgcattttcaaacttatttgatctgatgatggaactagtggatgtctacaaaatccgacttccgaaattcacagtatgttctcctgctctctttaacctcaactggtattcgtcatagcaatatacacctgaaactggacactgagtttatataacacgaagaatgaaattaatttgattgaacctgctaataaaaatggaaatactaggaatgaggctcatatttccacatggctaanagggtccatattagtctccttatccattacaatcaatggtagcgtattctagatattttcttatgcttgcaatga

SEQ ID NO: 27203 - DNA, 1640 bp, Arabidopsis thaliana landsberg
aaagtcggagaccattggaaggaaacattgggaaggagatggtatttgagaaattcttatcttttttacgccatagctgtttgtttgcttctaacgtgctaacttttggatgtgataaatatccatttgtcatcgaatattatcatgaactcgcacatttcgctcatgtttatcattcctcaacttttattttattttaggatcaaacgaagataacaaagaagaaacagacacaattggtccctaaatctgagggtattacttatcccgacaaggcttcaggtgttgaagttaaagcaagtgttgtcctaactgcaaccaccacgtccttagtggactgtcaacctgcagcagactcgtcctttgaaaggtcaaagcagcaacatgagaaattaaagcgaacttcgagcttaagcaatcctgcagcagaaggaaagaaagtcagaagaaagacagaaccagctctagaagaaactcacctgcccgcagagaaacccctcgttctggccctgaagcggcagacacatctaaaatccaagacacataagcaggtacaggtacatccacagtccaaggcacataaacaggcacaggtacatccaaaggccaagacacagactcctccagacctgaacctgccaagttaggtactacagcttagattttttttctcaaagtctggctctagccttgcctttgtttttcgtagctatagtttcgcttctaatttttgcgcctagtattgattttctagtcgtttcttacgtagaagacgaagtccctctcctcgttacaaattaaaaatgttaagagaagctccaattctttcaatctgttttttttacggaataaaccaacacatgtagcctatttctaaatgggtctaaatttgtcggcggcccaataaggggtcataataaaagaataaaaagccttaaaaaggaattagtatgtatctgaaatcaagctcactggactggacgaccaaaaaaagagcgcaccgaaaattcccgcgttctcttcttaccagttaccacgccgaatcactgacctcaaatccagagcttgacgaatctcgtgctatgcgaatgctactaggttctaatatccatcttcttccgacgattctagggtttcaattttctccgataaccccgtgaagctcttacaaagtcgagaagtgcgtggttaggttttccggcggcgatgaagacgacgcaactgttcaaaggggcaaatgtttttatgtctcggaatctggtgcctcctgaagtcttcgacacacttctcgatgctttcaagcttaacggtgccgaaatcttcctctgctgcgacccatctcggagtggtccctctgatttccatgtcatcgcttctcccgatcatgtgcgaaatgttctttcttatatatccctgcaattgcttatttcgttatataatctgctcttattgccatttttttggggttttacaggagaaatttaaggatcttaaagccaagggttgtaacttaataggcgagatgagaattattttatatttcttgtcacttaataaaccaattgattctgtgtttgtgaattttcttaattggatttatgtttattgcgtggcacggccgcaatgtgcgctcttctgtg

SEQ ID NO: 27204 - DNA, 2449 bp, Arabidopsis thaliana landsberg
tcgtcacctaggagatcgagagaggaaacaaagaaagcaagaatccttattcaaatcaaggacttgacaagttctctgcacttctatctgagctcgatgagaaaagacagagcatttacgcaaagaggctggatcctgatggaccgcctcttgttcggtttgtcttcactagctccggcgagtgcgtccctgtaatgatcaagacaaagagggcaagtcagaagaaggatgttctagatgatttcaaggtcaagaagaaggacgttctagatgatttcaaggtcaagaataaggatgttctagatgatttcaatgtaaagaccgaatcaaaaacagagcaggaaaaagaaataaagcaaacagatttggaaacagagcagaaacagagctgtgtattgaatgagaatctgaagaagatttcaagaccaaaccatttattacccgtgacagtggtgctggttctaatattattggtgtttttcggacggaccgtctcgatcatgtgcacttgtatcgtttggtacttggttccaatgatcaaggaacagagcagaaacagaggatcaacatacgagacgaagaggaggaagaaactaaatattgaaaacagagctgctcctgataaaagtgaaacccggtgacgaaaatcaaaactttttctttttttgtgaatttcttttattcgtttcatctaacattttccttggtttcttttgttctgtcttctctgttttgtccatagttgttaattttgagacagaaagatacgtaaattcttcttctttgtttctcctttctctaatgctagtgaaatgtaaactattcaaactgattatttttgttggtcgtggtaaagtgtttcttgattcatttgtgtacaactttcgtctaattgatgatctgtaaatgaaatttttttagtttggagttttgatttcttgttgtttggacaacctgtactatttctttgtttattatacatgctcacgtttggttttcttttaaggaaatagcacgataaggctggaggatatattatatgatttagattgaaattgaaattaaaaatagtattcaagattttggaaatcgatgattcaccaactcaggtcaatcattcggtttagtgtggagtttggaactagtgtggctaggccggtttgagataaacttaccaaagccaattgggatggttttggtatagtcagaatagataatgatattaaattttggtccgcggatttgattttgtttcggtaccgtcgttcttttggtattctcgctcttcgccattattgataaattgaattgaaccgttcaaacccggtttactggctaaaacggttctttctttcaattcaaacggttctttctttcaattcaactatacaagtaacactgccacgtcaactcgaaaaaatgggactatggattgtagtttacacaaagaccaatttcagttttatttgcttgtaatgagactatggattatagtctttttatttttcttagagatttgagatgggttttgaacttttgatgatctctttatggaaagcgacaaataattaataacatcatgtgaaaagccaaaaaaaaaagtttgatgaaatttcctatgctaaacgacagaatattataatggttaattgatctgcatttcttttagcaagcttaaaccgcatgcatacacaatggcattagcagtaaaattatgacaatatggttacaaacccctatcaatcatatgctttcccggttttattaaatttggaaaatgtagtttaatgtattaaaaaatcgttaattaatgggtgtgggccaaactaataatgatacatatataatcaaagattttggattaaaagaacagttattttgaacgaagaccaaaaatgagtaacgtgggtgtgacagtacgagatcgagagcggcttattcgtacggtaaagcttaaaaaggaaattggttattatcctttggtagccaagacaaaaaaaaatgaaccagctggtttcaattacgtggcagattttgtttttgtttacatcactcgctttctcattcgttcaggttcattgcagacttccctcaccgccggtatcttgtctcttcttctctctcaaatcacatatcttcctttttgttttgttttttttgattaacttattgtttgttttccccagttgatggagagaatgaacatgagcgaagaggaggagcaatgcaaaagaaaccaagaggcattcaagagattcttcgagcaaatccccaggactgcggtgataggcatgctttccttcttcctccacggccagatgagtaagttcgagaaagctccaagcaagcctctttccaatgctttcgccttcgcctccgtgggctacgttgtgttgcaggtcgcacacggctttgctcgagctaatcgtccttcatctttcgctttcga

SEQ ID NO: 27205 - DNA, 1613 bp, Arabidopsis thaliana landsberg
gacttatgggcaacggccaaaactactaaataatcactccaaagtttcaacgggagattcaaagaatagatcaacgtacacgagtctcatagcactacgacgctaattacgtaagggaagacaagggaaagaagagatcaatgtactacattggagtctcgacaccactttctaattaaaattatagtttggtttttttctattctcttttttcttttctttttctaaaactgttggtttctaaattatttatgctgctttcttattttttttataagatagttactttttttgggaaatttcacaaaaaaatcgtttttgtcataattgtatgaatataataaaccttatttttttattaattgatcttgattatgctttcctaagtataacaaaaatatattatttcactttcttctttatttgttgataacaatgatgttgacgattgacataatttacaataaattataaatttagacgacataatttactcataatttacaataaataataaatttagacggcaaaaataaaaacataaatgtggcaagaaggccttaatgtgttataaagcccatgctagtacccttacacgaatacaaactaaacccaattaaaaaagtatctcatttgagatagtagcctatttaggatagatagagaaggggaaaactttacagctgaaaaactaaggagataattaggagaaattttgaaggcattaattttattttttaagttctgaaaattaatatttagtcaatgggaaaaatatcgtttaatactcaaactttctgtcatttaataggtgaacttcgtatatggttatttaatatatgtacaaatcgttgaccggctatttcacacaaacttaatcgttgaccagtccaaaatccacaaaacgttagttggcattaacagatccaataatagttgttaactagtctttgttaatttccaatacgatgtcgtttcaccataatcaaaacaggaaaatgtcatttaatactccaattttcaaattatggctgttttatacatcttcacatatagctattttatagatgaactaaacgttaaccagccgtttaagacatgataatgcattaaccatgccgaaaagacatatcactatttaggcctaaacattaagatttcaatttagattcgcttcggatttagataattcgggtatgagagtttattattcgttaggagtttataactattcaaataccatttagaaccataacaaaacaatcaaaaacgctattctaaactactatgaatactctcatctaaaacactatgtagggcccgaatgaatattaatattttaaaccaaaagagtcttagctcaaccaaaacgaacagtatctgtatacaataccctaatggataccgaactctagatacaaaagaacagataaccgaatgaacccgatcggataaccgcgcgcccataactaaatattattattagacatgcaaagcttctttagcaaacaaaaccacacgttgatgctattatgccttgcgaatttattggatttaaaccctaaagctcgttagaatgacttaaaattaaccttcacaaacagttacgtctt

SEQ ID NO: 27206 - DNA, 1265 bp, Arabidopsis thaliana landsberg
  unsure (1)..(1265): unsure at all n locations
taacctttttggtagtttcaatttctgggtgtggtgtggtatcctctcctctgcacgatttttaggtttttttctctttttcgattatcacaacaaagaaaaaaaatgcaaacttttttatcagaaagaagaagaggaatgaaaatttggtaatcagaagaagaagcacataagcaatggatgagggagaagaagagaagattcagagacgtacagatttcatgtgacaaaatgttagttatgtaatgaaaatttggaaagatatgacttttttttttttttttggaaattaatagaataaaagtttggtgctaaataatcttctctgacaattttatttaagtgttagattttgcaggacgtcacttgtcttagtggtggtcttggtgctgtcctttaggctctagctatggtaataacttcatactaaagacaactgtcaccgtaagaataatttgagatttttcaattgagatgttagacttctttaacttcataattaccaattttcaataactgtatatcatgtcgttagctattcatagaagcacatattatatgaatgtcaaaagtcttcactcttttggttaagaaatcaaaattcaaagaggcagagacaaattattgttacattcttaaaattaatttgcttcagaaattaagagtataatatcaataaatggaaccaaaattcaaaacaatattttactaagaaattgcaccaaaatttagatattattttacagccaaagaagtaaatattaccaaatttacaacgcatggaagcttggaaaatgaggaaactactcaatattaaataaacaacaaagctaactaacttcattagcgaccatgaaaaaagatacaagtcaaaattgagaacaagaaaagaaccaaattattaggatttattgaaatgaagatgaataatatgggaactacaaatattcctacaactcaacggaccgttaaatttcatccattggtctgttatatcctcagcgatcttaacggcgtcataggctgttcccgaaagtcctcttctcgtgaaacccaccgtgtatagtcccttctctcctttccatccgttaggaaacggcgtttttggcattccttcttttgtgaaaaaactattctcctggaaaattcaaaagatgatcatatatattatttttaatttcttaaacaaaactataaagatatgaggggagatgagacanagaacataagaaaaaacaaacgagctttttagtagcttttatata

SEQ ID NO: 27207 - DNA, 5263 bp, Arabidopsis thaliana landsberg
acacaaaacgatattgcatgtaagattttttctcataatgttatgatgatatttacggggcttggtgagacataatcaaccaatttacatcttgtcaatataagcactaggtaacaatttttgaataatcaatacatctttatataagtttacttttggggaacaacaaaaattcacaccatcccaagagtttccaaaacgatgtcgttacactctccctccctacgctcctctctatattatagaccgaaacaaaactaattcctctctgcaataaaaatctttcctttctccactctaatggccgcaacggtcattttcttccttcacttctccgccgtcttcttctccagattctaccacacctccgccgtctcgtcagagactcaagcactcacatctttcaaactctctctccacgaccctctaggagctctcgagtcctggaatcaatcatctccatcagctccatgcgactggcacggtgtttcttgcttctccggccgtgtccgtgagcttagtcttcctcggctccacctcaccggccacctcaggcctcgactcggggagctgactcagctccgtaaactaagtgtgcacaccaacgacatgaacggcgccgttccttcgtgtctctctcgatgcgtcttgctcagagctctttatgtacactacaactccttctgcggcgattttccagcggagatactgaatctacgaaacctgcagggcctgaacgctgctcacaactcactcaccggaaatctatccgacgacacagactcgaagagcctacgtgacgtcgattggtctggcaacgcaatatccggaaagatcccggcgaatctctgagcggattcatctctccagctcatcaacctctcgttcaaccacttctccggtgagatcccgtctacattgggacaactacaagacctcgagtatctctggctagactcaaaccaattacaaggcacaataccatccgcattagccaactgttcatcgcttatacacttcagcgtaaccggaaatcacctcaccggtttaattccggttactttaggcacgattcgaagcctgcaggtgatttcattatcggagaattcatttaccggtacagttccggttagtcttctatgtggttattcaggttacaattcctccatgcgaatcattcaattgggagttaataacttcacgggaatagctaagccgtcaaatgcagcttgcgtgaaccctaatttggagattctcgacattcacgagaatcgcattaatggcgattttcccgcgtggttgactgatttgacctctttagtggttttggatatttctggaaacggtttctccggtggtgttccggctaaagttgggaacttgatggcgcttcaggagctgagagtagctaacaattcacttgttggagaaattccgacgagtatccgtaattgcaaatcgttaagagtcgttgatttcgaaggaaacaagttctcgggtcagattccgggttttctaagtcagttacggagcctgacaacgatatctcttggaagaaacgggttctcgggtcggattccatcggatcttctcagcttgtacggactcgagacattgaatctcaatgaaaatcatctcaccggagcaataccgtcggagataacaaagctagctaatcttaccatccttaatctcagtttcaacagattctccggcgaagttccgtccaatgtgggtgatctgaaaagcttgagtgttctcaacataagtggatgcgggttaacgggtcggataccggttagcattagcggattaatgaagcttcaggttttggatataagtaaacagagaatctctggtcagttaccagtcgaactatttggtttaccggatcttcaagtggttgctcttggaaacaacttgctcggcggcgtcgtaccggaaggtttcagcagcttggttagtcttaagtacttaaatctcagttccaacttattctccggacatatcccaaagaactatggatttctcaagtcattacaagtgctttcgttgtctcacaatcgaatatccggtacaatcccgccggagattgggaattgttccagtcttgaggttcttgagcttggttctaatagtttaaagggtcacattccggtttacgtttccaagttgtctcttttgaagaagcttgatttgagtcacaacagtttaacagggagtattccggatcagatttctaaggattcttctctagaatctctcctgcttaattcgaattctctatcgggtcgaataccggaatctttatcaagattgacgaatctaaccgcgttggatctttcgtcgaacagattgaattccactataccatcaagtctctctcggcttcgtttcttgaactatttcaacttatcaagaaacagtttggaaggggagattccagaagctctagctgcgcgtttcactaacccgaccgtctttgtcaagaacccgggactctgcggtaaaccgcttggtatagaatgtccaaacgttcgaaggagaagaagaagaaagctaattctactagtgacactagcagtggctggagctttgttgctgttactctgttgttgtggttatgtgttcagtttatggaaatggcggaacaaactaagattgggcttgagtcgggacaagaaagggaccccctcacgtacatctagagcgagttctggtgggacaagaggagaagacatcaatggtggacctaaacttgtgatgttcaacaacaagatcacgttagctgaaaccttagaagccacaagacaatttgacgaagagaacgtattgagcagaggaaggtatgggttggtcttcaaggcgacgtttagagatgggatggttctatcggttcgtagactaatggatggtgcttcgataaccgatgcaacgttccgtaaccaagctgaggctttaggtagagtgaagcacaagaacatcacggtcttgagaggttattactgcggaccacctgatctaagacttcttgtttacgactacatgcccaacggaaacctcgctacgcttttgcaagaagcctctcaccaagacggacatgtcttgaactggccaatgcgtcatctcattgctcttggaatcgctagaggactgtccttcttgcattctttatcaatcattcacggcgatcttaaaccgcaaaacgtactcttcgacgctgactttgaagcgcatttgtcagaattcgggttagatagattgacagcgttgactccagctgaagaaccatccacttcatccactcccgtcgggtctttaggctacattgcaccggaagcgggtttaacgggtgaaacaagtaaagagagcgacgtgtacagcttcgggatcgtgttgttagagatcttaacggggaaaaaggcagtgatgtttacagaggatgaagatatagtgaaatgggtgaagagacagttacaaaaaggtcagatcgttgagttgcttgaaccgggtttgttggagcttgacccggaaagttcggagtgggaagagttcttgttagggatcaaagttgggttgttgtgtactggaggagacgtcgttgatcgtccgtctatggctgatgttgttttcatgctcgaagggtgtagagtcggtccggcgatttccttgtccgccgatcctacttcacctacttctcccgccgcaaccgccgtttcttgaaattgctgttttcttattacaatcattttatttctttttcctttattttttttcctttgtggataatttatgttgactttcattgtgttgtatcttgtcacgggtacgacaatcaaattttaagttgccaaatttattgaatttcccacggtggaatgaacaatcacttcaatgtgttgttgttaacttgttatcttgggttttagaacaattttttccgggttctcgttcaacaaaaaatcatattataacgaatatatatttgtcgggtccagcatattattattagtcatgtagactaaaatagtgtgttgacgttgaggtttagaccctatggcgccgttatggtaagcattgcgtaaactatctaccgagctttagtagacaatgttccgtgatttggtcagtggggttaatacttaatagtagatgtgtggggttttcaacattgtcgttgttctgttttagttcccgccaaatacgttaggacaagtgggtgtgtgacacgtgttggtcttcatagggagatgaaagtagccgttgatattatttattggatttttgtgtttggggaaaagtgaagttaagccgtcagaggacgaaaagcttttttaagcagagcctgttgttgtctgaaaccccaatccacgttggatttcttactgtttagccagtgtactttgtttctttggccttttttattaattattacttctctttcatttatttaacttttaatgtttggttggtgtgtatattaatggagaactccgcctatattattctttggattccttttataaactccaagtccaaagaatacatttcttgaactataaacctttttacgtatattaaaatgaagcctaaccataatgacaacatttatttttccatgaaatagtggaaatacgttggtcatgaagataattaaaacaagaagaagggattggtgtaatcaagaagggaaagagaataaatgcaaaaagaaatgcaaatttgtgtgagagtgtttaattgacgtttggtttggtgtggacgactcataccattattacatgtgtcatcactctcatctttataacaagtcacgacaatgttactgttcttgttttggtatatactcccttgaacccactaccactgtcattgttttctagtacaacaaagtgaatggtaagaacattatttacagtgaaaaacgttagttccttaagtgcaatattcgtttactgaaaaagtgaaaataaatcgagttcattagttcatgggaatacctcaagtagcagagttttaaaatcccatactagtaagaagaagattgtatatagaaggctggttattagagactttagagttgtattgattagtacttaattgaaggatttgtaatgcaaatgagaatgcttttggtaccgagtcatataatttcacccaagttacacaagtgtgtctaataataacagaactcaaactcacgaaaaataactgaaaggagaagctacacatcacatgaaacttctcatatgagacatgatga

SEQ ID NO: 27208 - DNA, 6124 bp, Arabidopsis thaliana landsberg
tgtccctagtgacaccgcgatatcaacccagtctgtaagactcgtttgttcgatagttcggagtaggtttttgtcctctgctgcagtccacggaccgtggttaatcaatggatcttccgagctcatccacctacaatgaggcacaggataagaaaatccactaatatatcaaaataagagagtgatggtatatgtacacccatagatgattaaaagctgatttatcttagtaaccagagttcaaataaaggaggaacttaccgagcttcacattctgcagcagaacggtccttgatatccaacgaatcccagttaattttcggaagaaactgcctaatcatttctggtgtgatctcaagatttccgatcgattcattgatagtgtctatatcatatgtagctccttccaagtcactgttaagaaatatctgtcattcaactctttcgaaaaaattaaaatgagaaaaacctaaactaagtctgcatctgaaaagatcttaagcagcagatttaatgattgcactttaaaagaagatgagtaagtagtacctggaccgttcaattgcttcagaaagcagtatcttttgaacttcttgttttaaaccttttgcgaggtttttgttctcctcagtagaccattttctgcgtttcactgaaattggatatttctctagtgccatcctataattttcaacacaagggttttccgctggacccaacgtcaaaggagatatctttttatcattaccctacaaaaaaaaacacaagggatttaggataagaaacattttccatcacggtcaacagaaaacagctgaagcagtactttttttatcgactacaaaaaaacagcagaggcaggaaaactgggtcaaatgattacctttaagctatcacaaggcccaattccctcggagctatcacaaggcccagatttccgtgttgagattaattcgacacgaggatctttcctctgacagagtgccagtttagtaattctcttgcaagaagcttgaaaatctttgactattctaacatttttcttgtgtttctcgttctgctcgatcgttgcttcaatttctgccaattttcctctaagaaatttctgatatgctctgtttctcctgattgcatcaacaaacgctcgtgcagcttcagggaaacttgaactcgcagctggcatatgaccatcttgtacatcctctgagtctggcacagtgacaactgatttcccgtgatctggaaagctttcacaagtattagatctactcaatatttcgcttgaaggttcattgtccgagttatgtacctgctttttcttcccgtgagaatcattcatgaattttccttccgaatctgcagaaaaatagtaagaaaatgaccacataagcatattttccacttaaaacactggataaaaagacaagcaagcaaaccaaataagaagaactaatgggaattaacgtcagagaccatacaagcaaaccaatatcatcctagcatcatgaattcatcatatcaagaatcaaacataagcacagagagcttctaacttattccatcagggacaatacatattgcataaatagactgttaaaaaccaaataacaagatgaaaaagtctgcatttttcacaccttataacaactagcttccaatagtgaaactgaaggaactcaaattaatcttaccatcagcaaaaaactatcagttgaggcagagtcttcagataaccatagaacgaacattgcaaaggtaacacagaaacattatctaacaaatcagtagctttaacgcaaatagaaaagaaaacaagtataagatttcaaaattgtgctcaccgaaattcttataagcagagaatcgcctacgaatagcacgaagtgtttcaaaggcatcatcttcttcatcgtcagataaaccaattggaggaagggacacatccatggacaatgacaattggctcttaatactccgaatcatctcgaaatcatcttcactctccgaatccgagagcaaggacaaacccatgggaggaccactgcttctacccgcatccttggaagatgctaattggctcttaattgtacgaagcatctcaaagtcatcttcgttttctgaatccgacggtatctctccgccaccgactccttccggttcaattgaaccggtttttgacgcgaattgatcggaattaacgtcagagaccatacatgcgcgtcttaaatcttcgaggtcttcaccgatgtcatcttcttcgtcatcgtcatcatcgtcatcagcttcgtataggctgttccgattcatcgcgatacagaaagagaaatccttctttatgaaaatgaaattgaatcaaatcgaagaatgagagaaacggctccaagccaagggtttatgcctctagaagaagaagacgatgaatgttttcctaatacttaaggttttatttatgtctgaccaatttaacattggcggcatcagtgcaaacgggccgggtctgggtcggatcattataaaacacatagaaaaccagatataaaccggttagcgttgacaaaagaactgatttttacaaaatccgatcatcatttacggttaaagagtcaactcttacaaaagcaacacttaagatttagttcagtggcttggtttaacgatttcttcgtttcggataacccttacagaatcaaccaaaccaaaaccaacactaaccagaacagggattgaagcaaactacacatatcatcatggtcttaaggcattaagctatttacataataatgacggggaatcagcagagcttggtgtcgaagttgagagtaatgcccatgctgaacagctcctgacaaagaagcttagctccataaggaacatagaccctaaccacatggtcggaggatgcgcacactctgcaatatggccctctgatctttcttccactgcttggagtcctctcgatcacattcgcataggtcttgcattttctgcagatgtgcatctgagaagagtcacttagagtgaagagccgctcgtgcagattagcggatgcaccgtgagctattaggcagtctcgctccatttctccaaatcttatcccgccaaacctcttccggtctgcgactggctggcgtgtgagcgggtggactggtccggtgttcctgaacttgactttgtcctctgacatgtggacaagtcgctggtagaaagttgggcccatgaatatcagagagcgcatcatctcacccgatctaccattgtagaccctttcgtttccccatcttgaaaagccggccctaaccacaaatatttaccattggcaatcaacaatgatctaagaaaggttcaacgaatcatacataatcacaaggctcacagcatcaatcctctaactaattatatactgatacatggcttttgagcccattctgtgtatcctctagacgttttgcaggcacaatttaatcaaccagagaacatccaacttcttagtttttttggtcttacagagatatttgcccgtcatataaatcatgctcacttctggtactaggaaacaaaacaaagatccactatgacatgtttcaagtaaggtgctcaaatctagcttagtgccttgtgcagtatattagctcgatttgctggtattatgcatatcatatcagcttttgagccaaagtcccaaagttcaaacatctccaaccaggcaacattattaataattagttcctacccttaatgatatcatccatctgtactccctaggaaccaaatgtcaatctgtattgcatataattcaatattctgttttacgagctaaaaaccaagtgacaatgtgaagaatgtacctgtgaagctgctcggtgatttcagtgacacccggagtggagaaaggagtggcatgacgtgtcaatttggtgtatgcagcagagctaccctccttcttttgtataggacaagcgattcctttggagagagcagcctccaagagttgacctggtgtctgcctagaagggaaagcgtgcgggtttatcacaatatcaggaactatgccttggatcgtgaaaggaaaattctgctgttcctctagatagcctaaaacacccttctggccatgcatactggaaaacttatctccaaggcatggagaacgaacctgcaagatgtaaaagccaatcaatggaacatttgattcatcataagaatgcattctctgaaaaacagctcgattcagtatgatctggaacttacctgtctcagagaaaccgctgcaaaattcttcccttcatcattagaagataataccactttttgcacaattcctctctcagtgtgcttgagctttatactgtgatcagccccagactcggtgcatctgccaatgacaatatcgccagtactcatgttagcaccaatgaaaggaaacccgtcatcttcaaggctgtctactttgccgattttgctgtatgtctttccaaactgaacaagctcatccatcttcttcctcttctccgagtctttagtatcaacctctgctttgtagcttctaatctgctctgaacggaacataccacgttccaatgaagccttgttcatcacaatggagtcctcttggttgtacccgagatgaacattcacagcaacaattgcgttctggccattaaatagaacttctttttcaagacactctgacgccaatgtcttgaaaagtggcttttggggatagaacagctgctgggacagcgtatcgcagcggatgttagggttcgttgatgagaatccgatggcttgttggcaatgcttctgagactggtaaagaactcttttcccatgatcgtgatttgcaaatgggacaattgcacagctcacacccaacaggaatgataggtccaattcgcaatgcgtgtaattctttggttccttcagaagctgtttgattccccatgctgtagtacagtcttcttcttcctcaatcccgatcagctcgagaatcccttggtcaagaagatgcttaaaaggatactgtgtaggtttgtcttgcttcaacttgtggagattttccacaaccaagagaggtcggagtagtctaccagcgtcagtgaaaattctcacctcattgtcatctttatctcgcttgatttccatctgcagataacgttgtgatacatatatgtaaataatattcgacataggatactttctgaagcagaaaaatccaaagcaaataatcaagtagcacaagaatatcaaaatatagcaaaacatttgctgaaacagaagatacctcgagaggtaattcactttggcgccgcctgctttttaactccccgacaaaggattcagaatctgcacataatccaacccagtctccattgagaagaactttgtgtttgccacacaatggtgtgctggtatcattcatcagctcttccattccgcaagtaaagagcatttccaccacagactccaaaccttgagtgctaacaagtccaagaagagacatgttcttcacaagaccacaattttcaccatctggagttgacaaaaagcatactctgccccagtgagaaggatgcctgtggccaacattaaaaacaatgcagccatagttcagtttcccagcacgatttaattgtgtaaccgctcacattgaaaaggaaccaaaatggataatctcaatacatgcatcaggacaacagatagattgaccaagggacaaagaaacaagaaagacagtatcaaagtttcttaatagcagcaacatctatacaaactcaatattataaaccgacgagactctgcagaaactgtgatcgccatcgtatactaaataggttaatatgaatatctttaaaacagtctgaagacatgtaacattgagtaaatgcaaccatatcagttagttaaagtacgtgggatatatttcaatataccaggggaggtggaaattttcacttacggatgtctagcatctccaaccttgccggtataaaggacttgctgtcgcgttctcctcagatcaatcagagtctgcaatggatttgcacgacccaaattagctacaacacctgagaccctttccatcttcctgaaaggatgagaccatgctccagtggagaaggctcta

SEQ ID NO: 27209 - DNA, 405 bp, Arabidopsis thaliana landsberg
caagaattttcagaaatacaccaactagaaacactgaatttcaaaaagtgtctctgcctataaaggagcattccgaagatatctcatctcataaagaccagtgacttgatcagcaacagcccacataatggcttgtcctggaggaatcctcattagcctcggcaataaccctctccataaggccactaatccttcctctgcataaatcgttctaatggcatgaaccatccctttatatctaatcccaccttcactgtctctgctctgagccatcaacctcgttttcaccacatcaaacggtcctgtgcagaacggacctgcggttccagctaaaaaccctgagatcattgactgccatggctgcaagattttaccgtcaccttcgtgtttgttccacaagagtat

SEQ ID NO: 27210 - DNA, 1903 bp, Arabidopsis thaliana landsberg
  unsure (1)..(1903): unsure at all n locations
gtatgcgataatggtataccggagactatttggagagtcttcgagcaacatggcaccttaccgcgatatgaatgtccggtctaggcgacgggcaatgcaggctgaggagtcattaagcagagtctacttgtttctactttgcttcatgtttatgtgtctatttctcttctaattataatatatatgtgtatataatataccaattggaatgagtatgcatatatgtaataacaatttgtatatttttaagagtcttgaatcgttgaaattgtatgatgagcatataataacgtccaaagaaagaaacgacaccaaatggcttcttctttattcgatatatcatgggatgatgtgggaagatgagagcatgggttaaaaaggaggcttatcttcaactcaaatagatttgtgctccaaaaaagctgatagtggcattcgaatgcgacgcaaatggtgttgcttatgtcggattacaatcgtttaaaaccaaaccaacttttaccaaaaaaaagaaaaaaaaaagtgagaatagggggccctagatttgattgataacggcgaatcgaatacgactgttagatgaagaagtagaaacattaatttgcagtacgagtctttctttatacattaaaaatgtttgcaaagaaaattggttaagtgattggagtgagctggtttcattaaaagcatagactagtatgagaggagttcatggccttattggtcgggtccgatcgagacaatccctcattcatgggatcgattttttctatctgcaaaagttttaatttaatttgcctatttccacttcttataggttttaaaaagttcgaatttccttgttggtatctatacagttttaagtcataaatctctagacaggaaaacaagttgagacaaaagaataaattgggcttcaaagtaatcatcagatagtaagaaagtaaatgtaaatttacagtgaactgtaaaatgagagacgaagcccttatttacacaagaggaaatgagtatgtttcctacattacaactccactcggtagaagcgaaccagtttcatcatctgcactctctcctcctgcaccatccacattttgatctctctatttaccaccaagtttgtaacacgacaataaaaaatggatacgaggtgcaataatatttacctgaaccggaatctgttccgtctcctcagcctgctgcggaaaatgaaatccggttgagcaattcttcaatctctccggatttttaacccatgcttttctaccttcactcactttcacctggaacctccatgtctaccacatcgacatatacgttaggttcaaacccgttaagaaaaacgctatttgagtgaatcaaacacatatatacctgagaaagtggaaacgtgtctctctcaatcacagctccttcgatatttatgccagtgccttggcattctggacagaacaccgaaaatatttgccagctcacatcgtttgccaactcattccactttacaccagtctgaccactatgctttgtgcatctcttttttccttttccactcaccatcttgttcccaagtatttcactctcacagaagagaaaccagtgtacgacacacgacacatgaaatagatgaaacgcccccaggaggtttctgctgccacaagcaagatttcccgtcttcatgtttagtattgctgccgcatctttccctggaagcatcttttgtttacagacttcgcatattctttcagaaaaattcggttgttgcctcctcagcttccgtcttacgttctgttcttccgactcttttgctcatgagactatcatcataatcagctattagatctcttgacagtttgaattatgacctgaagaacctnctcagagagtcatactgattacacagaga

SEQ ID NO: 27211 - DNA, 1347 bp, Arabidopsis thaliana landsberg
ttattgtgattgcatcaactttgtattttaacgggttttctcttatgtgtttgaagatgtggtgagtcaacaggtgagagcatcttctccaacttctcgctattactaaccgaagagccagttgaagaacccgatgtcattgatctaggattcacattcggtaatgacaaagaagaaggcgatgatgatgatgataatgatgattcatggatagattgggaggataagcttcattttccacctgaggtgaaagaaatagatatctcaaagcatataagagacttggtgcatttagaaatcaccatcactgcgatatgcgattctgcatgtaaaggaatgtgcttgaaatgtggtgcgaatctgaataagaggaaatgtgattgtggcagagaagagaaggataaaggatatggacctctcggaaatcttagagagcaaatgcaacaaaaagagggactaaggaactaaactcaactcaacgataattgtatgtattttcctttttacatcttcatcttgtcggtgttactgtcataaaactcaaaatcaggtacaataatgttcaaatgtgaatcttaagtagctataacgttttcattatctcattcatatgatttttatttagaatcaatcattacatattcttgtaaatgtgttttttattttgtatatattggaatatgaacagtatcaaaatctttttaagactttgaagtacattgaacagagagattcaaagaataaaaaggtttctacttcttcttaagttcaagtagtcttgaccatctcttatcgacagaagctgtatttgtctgaccaacgtctgcagaagcaattgagaaaacgaaaactctttaatcctttcgaatattttactaacatgtcatgtgaaaataggaaagaaacaaaaccaacagaatgttgcttacagtgcagtgttggttccgatttttcgcaggaatccgagcatatatcctacaatcaaacaacaatataagtgaaacaatcagacttcacaaccaagatttataaagccaagagatgggcataatcgatctaaggttttggccttgtggattccatgaaacttggtaatagtttaaacagagtcttactttagcataagttgtgaggcggatagtgtcttgcacaagggaatcaaggttagcttcatatccacttctgacatatatcacctgccaacagagacttttatttcattccactctttgaaatgcaaaaatatatatatagatcttattatcttctaatggctctcacctaatcatcatctcctccaatttctgtcattgtttaaccttccatttcctctctctatggcaaaat

SEQ ID NO: 27212 - DNA, 1621 bp, Arabidopsis thaliana landsberg
gggaagaaattattaacgcaacttcatcattctctgaagatttaaagatcggaatgggagcttacggggatgtttacaaatgcaatctgcatcatacaatcgccgctgtcaaagttttgcattctgctgaaagtagtctatccaagcaattcgatcaagaggtaaccaatcaaaacataattcttatttgaaatgtttctctgttttcttcaaaaaaactgacatttgtattcaccatttaacctcttagctcgaaatcttgagcaagatcaggcacccgcacttggttcttcttctaggagcatgtcctgatcatggcgctctagtgtatgagtacatggaaaacggtagcttggaagatagactgttccaagtcaacgatagtcaaccaatcccgtggttcgtgcggttaagaatcgcttgggaagtcgcatcagcgcttgttttcctccacaaatcaaaaccaacaccaatcatccaccgcgatcttaagcctgctaacatcttgcttaatcacaactttgtcagcaaagtaggagatgttggtctttccacaatgatccaagctgccgacccattgtcaaccaaattcacaatgtacaagcagacaagccccgtgggaacgttatgctatatcgatcccgaatatcaacgaaccggaaggatatctccaaaatcagacgtgtatgctttcggaatgatcattctgcagcttctcactggtcaacaggctatggcactgacatatacagtagaaacagccatggagaacaacaacgacgatgagttaatacagattcttgatgaaaaagcaggtaactggccaatcgaagaaactaggcaattagctgctttagcactccagtgtacagagctccgttctaaagacaggcctgatttggaagatcagattcttccagtattggaaagcttgaagaaagtagctgataaagcaagaaactcgcttttcgctgcgccaagtcaacctccaagccatttcttctgtccattacttaaggtagtaacttgtttgctacgttatctgtttacttgcaagagatgtgaggttaatttaaagaagaatgttgttatattgcaggatgtgatgaaggagccatgtattgcggctgatgggtacacttatgaccggagagccatagaggagtggatggagaaccaccggacgtctccggttactaattcgccgttacaaaacgtgaaccttttgcccaatcacactctttacgcagccatcgtcgaatggagaaatagaaatcagtgaggcaaaacagagaaaagcgcgctccattttggtgcctctctttgaaactgcgtagcgtttttcggcatagagaaacggcgaggtgttctcaccgcctttttctcttttcgcttgtttgttcttttggaattacctttgtactgcatttggatttattttattcacttttgtggattcggttgaaatgtaaagagttgcatactgtaatatgtaatttggtattaaccgattcataaaccatttcgatctaaatctgattagattctcaaatctccgtgtttgcttttattacagcttctactttaatgcgtctaggttttagatacaaatgaacttttg

SEQ ID NO: 27213 - DNA, 3932 bp, Arabidopsis thaliana landsberg
  unsure (1)..(3932): unsure at all n locations
agggttgagggggttcttttggagagtttggcgctgaagagtgaagatcatgtaaagagagaaacggttattttattagggtttggtgattctttggcctgtgttggttagaaatgcaaaaaacaccatgaaacctattttcccgggataagtaatataagcctaatctacttaggaaataggtaccatgaaggtgaaagttaggaacagagagttgcaacgtccatagagacctgtaacagacacgatgaatacaaacttgcttaattgctgagggccaaaaattttacaattgccaatggataattttagacacagaattgaaaacggaacaaagagagaggatcctgtttaccagaaaccagatgcacggtctatccttcattctaatacagagcaatcatctgattctctcaatgtagccatcctctttgacacaaactgaagttcttcccactttccagcagcctctaaggcattcctcaaaaccacgtggcagctaagctgttggtggtttcctagttctactaattcattgtacaaactaaacgcttcagagtgtctcttatgcttacagagtccttctatgaccgtgttgcatgtgtcgatatctaccatttgacttttttccagacaaaacagaacaagtgtatgtgcatcaagtagttttctattctcgcagaggtaaccaagtaattcctccatcttaaccaaatacccgttatcataaagcaacctaacaatcagaaatgccttctctttctgtgcactactaaaaagcaatctgacaacctgcgttgaaagatcaatgttctgtcttattcgtttttccaacattagcgttaccaagcagaaagactcgttagcaaatttccttttcgcaagttctgcaagtacagaatggaaagtggttgcaacaggaagataagagctccttagcatcctttgtagggtatcgtgagcaagaagagcttcacctatcttcaacagtccatcaatcaataactcgtaagtttcaagatcaggtacaaattcccgcctgagcattagaaccaacagctcataagcaggcttgaatttaccttctctgcagtgacccgttatcaaagtcttgtaagagggcggatcttgcactcctcttttcatcagctgcctgaaaactttctccgcttgttttgttttcccattggcacataagtattcaaacattgggttataagctgcagcgagaggcttgcattcatccttacctaacaatacttccttctcaaataactcattgaacaatgtctcagctctatcaaattcgtttctcatgcacagagtacgaatcaaaacactataagaagctgaatcaggatgcaacttcatattcagcatttcttggaacaccttcatcgctgcatccaaatgaccagcatcgcagtgggctttgatcaaaatattaaaagtgcaggcatctggagcgaaagtggtaaatgcgtcgttccctccaatcaagatatctttgatctcatcatatctgtgagcctcagagagccccttgatcagagtattgtaagtaacagcattgggtttcagccctctactcagcatgtcatgaaacacaagcactgcttcatcaatttcctgcttcatacaatagcctcgcaccagagtagtgtaactaacaacgttgggatgcacatcggttgctttcttcaacattccactcaaaacattatgtgcaatcttgaccttgccggctctgcataacccatcgatgatcgtgttatatgtaacaacgtcaggattgcaatgatacagctccatatccttaaaaatcctaaaggcttcatcgaccatggagttcttacaaaacccatttatcaatgtattgaaagtnnnnnnnnnnnnnnnnnnnnnnnnnnnnnnnnnnnnnnnnnngaacaagtcatgggccattccagttctgccacgcttgagcaaaatggagagaagactgttgaaggtaagaacggaaggggagatgcccatctgcttcatggtctggaacagcttcactgactcctggaagagcccagcgttcccgtagctcctaatcaagctgttgaagtagcgatcctggagcttgacgcagccattagaccttctctcgatggagaacaagaaattgcgagccacattgagattgcgagctcgaccgaggaactctaacatgaggaagaaagactgctctttgtgagaaaaccccttgttggaaacccagtcaaagaaccggagaccatccgcagggaccttgatgagacgcagggtttggagaacggtggttctggagatggtttgggacggatgaagagatgatagtgaagactcgagttcgtccgaccacgggttagagttcacggcacgggccaaggacctggcgagttttgatttggtggacctttcttcattggtaactttggcggctcggagaactggttgagacttggagacaaacaaagcatggagtttaggtacagaagataccattgcagaagaaagttgccgcgaaatatggcggcacacgtccgccgctcctccaccccttccggcggaccaagagaacaaaccctttcttcttcattctataactctctaaggcccaatctaaatgggctcctctttgttctagataactttactttaggcccaattatagaggtggccccgacacaatattttgttttgttttaaactttaaaaaaaaaaggagaagaagcaacagcatataattaagtcctagctattaatcatcatccatagcatatcagtaagtttttgaagatagattgtttgattgcatacagattttaaaataatgttaaaccctgaagtaaacttgtaactgcaccaacacaagacgtggtgtatggatgatctactacattccgtttccctttcattgggaatcaatttgcggactagtttaaaacaatcgcatatgcataatacttgcgcagtaattagggaagaaaggaggtgggggtaatgagtgagaaagtgcaataagtgggtatctctcaaattaagagagagatgttgacaaggcaacaagtttggtgtaacattatcctcctccttttattttgcctttttctctatttttatatatatgcacagtcttttttactcttaataaaatacactgttaattcctcggataccaacggaatcggttgaataaattatggatgttacagtatacacactatgtagggacttcttaatttattttggtatagttagaaagatagcttatcgttagagcgattgagagcttttcattataattaggagttagtttactttaattgtgataactgccttagtagatacataagtacactatcaattgactactttgagtgaattaaaaaagcctcctaacagcgtactatatgtacatcagaataagttgtagtaggagcagcattcctattttcaatattgtacactgtattaaaacaaaaacaaaaaagtagaagacaggattatgcatataaatatatatcccagaaccaaatatgaaaatagaaaatttggttttcgggtttataatttgttttagaaaaaaaaaaaagagagagagagaggggcaaggataatagagacaggagtccgtacggtttcgggggtcaacgtcgatggcagcctttgagcacctaaaaataggggacccacgccattaccaattacaaaacctcactctctcgtctatgctcatgctaaccctactctcttccctgtgctgccacgtgatcaccatccgattaatcgggaccgttcgattaagtagagatagcatcgcgagaggtagagacagaagagagagagagagttggcgaatcatagtaattagctgcctgatggagagtgggtgtacgatagcaagatacgattcggcattc

SEQ ID NO: 27214 - DNA, 1078 bp, Arabidopsis thaliana landsberg
  unsure (1)..(1078): unsure at all n locations
atcgacgctgaggtcacccattcggggattgtttccatgtgaaacttgttgtacgacagatctagagtcaagatgtaattcttcacgttcaaaacagggaatggattggttagaagattgtgagagagattgatattagcaattttagtcagcttggccaaactcttcggcacggctccagagaaccggttcttggagagatccagtgtgtcgagcgccacgaatcttgataaatagctcggtatcgaccccgagagattgttctgacctagctcaaggaacgcaagaaccggcgcgagcgatgcaatcgacggagggagcttcccggagaatctgttgcgtgagagagtgaggattcgaagcttagtcattgatttgaaaatatccgggatggttccagagagacggtttccatcgagattaagattcgaaatgagcttgagattagcaatccctaacggtattgttccggttaagagattaccgccaagatttaggtagtttaaccgagttaaattggatatggaactcggnnnnnnnnnnnnnnnnnnnnnnnntttaacggttaatgtatctaagcggttaagcgcgccgatgttggctggaagaggaccagagagacgtgtattctcgaggtaaacatactttagatgtggtaatctgaataaaaatggtggaaatggtccagtgatgtttttgagattgataaagacgaccccttccaaatgctggagtttggccagtgacggagagattgtgccagagagaaagattccggcatcgtcggactctatgcggatagtgagtacgacgacacggttgccgttagggcaactgacaccgttccaagagcagcaatcagtaccttttttccaagtgcttagaatacctgaaggatctttggttataccgatttaaaagctaatagacccgcctcatcatcaggatgacacgtggctgctgcggtggggtttaaacaccggagaaagatcacggcggtgaaaatgaagaagttgtggaaagaacaagagttcatggtagtgaattttattttttgtagtgaggttgagagaagcaa

SEQ ID NO: 27215 - DNA, 1387 bp, Arabidopsis thaliana landsberg
ctaaattattgaacatgatgcaaaccttctttagtttgtgattttgtgtttcgcatgaacagtgagcctcatttatttaaaacactacacacttgtctattcgccttgtgtcgcgaattatcttctgttaaaatttaactgcctcttttcttggagtacaagccttaaggttgttgtcaagtaaaacttggaatcacggttggagtatatgacgacacatgagtcatcacgggaagaggagagcgacatgttgataatgatattattagaacagtcaggctccagaggaggcaaggatatgactctgtgattcaacatgttggtgatatagacgcaggagggatcattaaaattcacgttgatcgaggagtataatttatgtattatgacgtaatgattgaaaaaaagaaggtttaatataacatgaatgatttagggtaaaaaagagagaggaataagatgttgatcacaactttgacaaacaaaaatgcgaggcacttcctcattgtgttgaacaccaacacaccttgtgtgttgccatacttcacaaatatcacaacacaccattctctctccatcttcttccgttgctccacactcacactctattctcttatccttctttttatcatcatcttcataacatttcgtcacttcaatgttcatcatcattcctacgttcccttctaacaccaatcccttattcccattcaaggccatttcatcgacccttgtgatctctatttgaccacccaccactgactccaccacgacgtctcttagttcccaatagatatctctaaacactctttctgcctctccgtacacttcactcaatgttgcatctttcttcactacaatgcattcttgtggaggaacttttatctcgttgttatgatgatgacatttccacgcgatcgtgcagaatattcctaattcttcccctcgatctaagtgtaacgttttcgccgatgtatctctaatgtagtgatactctttgatgaagtacttagcgtcgaggattgctcttgaagccattccgatttggttcaatatacctcctatggggcctaacactcccttgtagtccatgagaatgtgtttgtaaaaataaaacatgtctttcataacttgacctcttgtgatcttattgtgaccgtttgtcgccatcttccccattgagttttggttttgaagggttatgagttcattgttaccacttggtaacaaatttgatatatctccaaggaatactctagcactttcttcaccggatttagactacgtcggaccaaatagtttccaccacctggttcccaagcgacttcaacacaaaatcaagcaaaccagtgtcccaatgtaatttctactgcatcctcacttcttg

SEQ ID NO: 27216 - DNA, 1575 bp, Arabidopsis thaliana landsberg
  unsure (1)..(1575): unsure at all n locations
aattttttctgaccgatctacatgaagagagaagcaatgaagattcatcaatggaagattgttgcatagaagaggctcaagtcggaaaagatcaaagagtcttcagattcagagaaagtagtgaagagaagagaaaatcctcatcatcaccattatcaccactaacagagtttagggatatggagagtttgacgtattacatgaggcaaaaaaggatgcatcgaagaagaagaagatcatcaacatcaccacattgttgccataatgtagtatacaatgagtttaaagtgacgaaggaagaagaagaggaagaaagacaaagattaacaaccaaacgtgttcattctaagcttcatgaatacgaacaatttttaactcagtttaaaaagaagaaggaagaagaaaacgagagacgaagattatcacccaaagactttgagcctacgcctcctgattacgaccaagtgattactcgctttagagtgctggagaaggaagaagaagaaagacaaagattagcaacaaaacatgttcatcctaagcttcctgattacgaccagattgctactaagtttaaactcctgaaggaggtagaaaaagaaagacgaagattattaaccaaacacagttcatcctaagcttccaggatgagacacgaagattatcaacaccaaaacgaagaagaagaagactataaccaaaccactagggttttttgattcggagtcggaccaactttaaggttggaaagctacgtaaagcttcggctcagtcttttttgaatgaagtcttaattgatgtactatataatcgaaaatgaaaatagtgtatatgagatctttaattttgttaccgtataaaatatgttgattcattttaccaatttgggtatatcttacaaaaaagtttatgttactcgtttttaattaaataagcaatcaaatgacttagtcataaaatttagtgaaaattatccagatttgagtcatggatttataagggaatattataggcgacgtcaaaaatcaaaatcacctaagttgacttattaatttctaaatttttcttcactttatttttaaaaaagaatttcaaactcatcgaaatttgtcaaaataatttcagataaatatataccatatacgtcaacggactataatatcgagattttttccacacttaatattagaaatttcagaaatgaatattataggcaacgacgacgtcaaaaatcaaaatcacctaagttgacttattcttttctaatttttcttcactttattttttaaaaagaattttaaacacatcgaaatttgtcaaaataattccaaataaatatatacaatatacgtcaacgaactataatatcgagattttttccacacaaaataaaagtacgattgtttagtagtttatttacgctctctttttgttattatagntgcttttattggaagcttggaaggcaagttgggtatttttgttttgtttaagcaagattctgcaactctctttgtttgtatctttccaatctttatttactttcgcttgatttctcattntggttttatatat

SEQ ID NO: 27217 - DNA, 2336 bp, Arabidopsis thaliana landsberg
  unsure (1)..(2336): unsure at all n locations
tagtaacagaattattgctttggatcgaggagaaagcatcacagcactgtcgcttagggtttggagtatccataacgttttttggaaacgaattcgagacgtgttgcagagtaatttatatgtggtcttgcttttaattttctggattaataattgctaaaaatacttttaaaattggaccaaaaccacaacgtcacatttttcaaattcgtttaatgatatcgtatgtttgtatttcccaataagaagaaaagaaacaaagaacttccctttggactagactagttcaataagaaatactaacgattaccaaacactaatcacaacaaataatcgacatcaaatcccattcccatgtcatcatcattttctgactcatcttcatccgatacatcgtcagaatcgtcatccgagtcatcttcttcgtccacttcatcgtcctcagcttccatcatctctatcagcctcagctcttcttcatcgcagctaccataacgctttcctgaactgaaattttttgcagacacaaaccccattgtttcaatcaaatgttaatttaaaaaagtctatctagtaagggataaccaagaagaccttgttgatggaaaatccgccacaaatgtgacatctgatctttcttctttcagcctctccagaggaaagctacaattttatggaatatataaccaagggagccgttagctcgattacaatgctaagtatctaaataagaaaatgaaggatcaatcggttactttggtttgttacatctcttgcccctgtctgaagaagctaatccactgttacttgaaacatcctattagagtaaaccaagaagaagacgattaagtgtaatccaagctatatctttcatttacagagtttgtcataattccgttagaacttacaatttgccgaatggatttgaagttccctgtgagtagtgagttacagaattccaatacttctttctgaaatatcgaggtcagtgagtgtcagaccaagactctgatgaaacaactaaaaaacttgtttatgcttttagtctcttacctcctgtagttttgggcagctgcgcaatattagagtcttgagtagattttccctcccgctaagtcccaactccctaccaacaatatttccttgctatgtgagtgagattttggggatggggtgacttctagcggaaattttactcttaacattttggtgtctttacctcaaaaaacgacccttgattgtaggtgatcgggacaaattcaggtacttcagtttacgacaactctgcaaataacatccagttatgtttttgccattgtaaaagcatagattagatgaagagagaagaattaccagaaagataaaaaaaggggtcatacctcagcaagatttcgggcccagtcatcggttagtccaaaacgtatgagcgtcagggacgttaagttggggcaattggtcacaaactctactaaggatgatcctgctttactctctaacgtacctgtcacacaataggtgagcttgaggatacttggaagtaacaaaaaggaaagcttcacagtggaaaagctttacgtggataaccgtaggtctctaagaacaggtgctctattaagcggcatttttttgtcaatgaattaaatagctcctcggttaagttatacctgtcacatgaaacacgaaataacgtaaaacaggagacaatgttgcttaacgaattagcagaactgaaagtcgacagacattgaagtagtaacaacccgaaagcatagaagatgacaatatgaaacctctggacaaagggagaaaaaaaggagaaattcttgaaattcataacagacaagcaggcactcaaagacaacttacaatcccacaatcctcagatcagtgatatttggacaaactgacaacgcatcgcataaggacctgtattttataggtctgagattgtaaagccgtaggcttctcaagcgactcctagttcaatgaagaaacaaaataccaagttagaagattaannnnnnnnnnnnnnnnnnnnnnnnnnnnnnnnnnnnnttaatagtgatagagattttgaatcactttcaaatggataatcaaagggaatagacaatatttcaggatataaataataggttttttcttttaattggtctcatgcttgattcttggtttcaaattttattttccacctaaggcatcagccataaacaatgagttttagaaataagagagcctgataacatcgtaaggcatgtttttcctgatctagatctaaaactatctataaaaacgtataaccttaattccacatgttcgtttatcagccgtatctc

SEQ ID NO: 27218 - DNA, 706 bp, Arabidopsis thaliana landsberg
catcagaaaaaaacctggcgcaacatgccccacattttttttaagcaattcaaaaatttcaagaacacccccaaaaaggaataatcatacgaaaaaaacaactccgatgtttttaagttttaagttttaaaaactgataagcaaagaaaaagaaaacgctgcgcatccctctcagcatccctctcagaaaataggaaaacaacacttagttttcggaccactaccacttactgtccaagtcctagcttcacctcttccttcactaccatcatcaaacacagaccaagaccaagaacctttcttacaaccggagactcttcgacgattctctggtagccacttggactgcatgtatctcgtagtcctccatggaggcctagacattccttctttcttcatggactttttcatctcaccacaaaccaacgaaacaactcttctcagtctcccttctgtcgccacaaacactaatggaagcatctcagtcatatctttgtaagcttctgtctgtctcgctagctcaaactgagttttgaagtcaagatcaattatcacacgtttcagcttgcttacgccatcacggtcgctatcaccgatcaccatggcgtctatgtactcgtacttgctcgagcacctaaacactctacaccctatataacagcatttttcacaaacaaaacccacaaataaataacttatatcatca

SEQ ID NO: 27219 - DNA, 1343 bp, Arabidopsis thaliana landsberg
  unsure (1)..(1343): unsure at all n locations
aaaaaatatatatttctatacccaaagaaactatacaattagttagtaatttcgaaaaaagattattataatgtttaagaaattttactttgcatagccagaatttcagctgagggcctagtaaagtaatcactcttattgagcttttaagacccatttaagttacgaaaacctccaaacgtccaattgtatgaaactcatatcatagattttttttttcttcttaatgagcaacttggtagcggcggcccattaatcattattattgggcctttaagacccatttgagttatgagagctcctaaacgactcagcaagattcaccggagtggcaccggccgagtcatcgcatccatcgccgttgtcgatttccttcaaacccttgcaaaaccccaacgatcagagacatggaggaggagagaagagatgactacaaattcctgagaattcaagacgctttcaaagcattgcatcttcatgttaacctcattggagtcatcgttgagctaggattctccaatggctctggtatcgtgatcctctcccaaaatccttttttgctatttcatttcatcatagcttcgttttttcatacttccgactgctcgaaatttgtcgcagattgttcatgtacgctcaaaatcgttgatccatggtattcgggatctggccttcccgttaagttcgtcgcnnnnnnnnnnnnnnnnnnnnnnnnnnnnnnnnnnnnnnnnnatatcatcttactttcacgtgtaaaggttgacacactattcctctgatatgagaagatcaattcttcgtggcttttgctgattttgttgttaaacagttttcttctgggtttaaactcagattgtgctgattaaccggaaaatcacagctctctgcaatgaaacaacctcttcgtcttttgctttattcaatgggaaacatagcgtggattctataccttaccagtcctcacctaaattcctgatgagagaacaggataagaacttcttatcgaatctgagagaatggatgatcacgtacaagtttgaagatggtaattatgatgcaatatcatttctaatgaattctacttattcactgaaatctctatatgcaaatgtttgcttcgtactttatctctaatgtgttctatgtcttggtggtaagttgcgattgttgtgaggttttgttttgttttgttttatgatagggtcatgctgtttcacatccctgaaagatatcaaagatggcgaatgttcaaacctatcttgccaggccgattgatcattccttaaaagaatatgatatggctttacttttcatgttcaatctgatttatggaactgcaagtg

SEQ ID NO: 27220 - DNA, 1332 bp, Arabidopsis thaliana landsberg
  unsure (1)..(1332): unsure at all n locations
tacgggaagcttcatagtacccagagaaactccgtcttcttcctcggccttaacgccaccgtttcccggcgaagcatttgctacaattgccctcttcacttgccggggactcgctgcaccattagtcggaagaacttggagcaggcaaggaattgagagacggccaaggaatctagccggagatcggacggctactggaggtggaacgaagagcgtcgctgcgaaagccattttcctactgtcgcgtccttcacatagtgagagatagctttttagaggatatgagttgaaacatgaaaatcttgatgacgtgttcttttttaagccgttgaattgatatgaacgaggcaaattacaaaaagaaatagagagtgatttaacgtatttcaatcatttttttccatcaaagtagagtcaagacttagacaaaaaccagtctacaatagtatcaagggatcagtacacagagttatagttcttcatgtcataaacggtttactaaatgcttcttcttctccttgacaaaaactcctctgccccaatcaatcgatcactttggtcnnnnnnnnnnnnnnnnnnnnnnnnnnnnnnnnnnnnnngaatagaaaagagattccttcgattagttgggttttttcactcggtggttaattcttgttgattccaaatgaataatcaactttacctgtcggtgttatcggtttggacactaccgagcctcttgatcacctccatgcctcggcacactctaccaaatattgtgtgttttcctagaagttgcatagagatgtgaaaagaagaacacaacagtcaatgcaagttctcttagtaaacatggaaaatgatctcaaaacattgtaagctattaaaagagtgtattctgtgtttaccatccaaggacggttgtggggctaaggtgatgaaaaattgactcccatttgtattaggaccagcgttcgccattgataaaattccggctcctgtgtgcttcaactctttgtttatctcatcctcaaacttcgaactaggaaaaggagcaaggcaaaaaataaaataaaataagacaaatgctaagattaagatcaagcctctggaacacatgactggacctaaacaaaacaagaatggaatggacaatgaataaagcaacttgagtagtgtcaattaacttgagacttttagtcacagagcctagttcataatgaagcttacttcatcagagctttgtatattatcacttaaaaactaactacatcagagcttgtttttatccccaccaaactaactacatagagcttgcttggtccccatattaaatttgattactgcaag

SEQ ID NO: 27221 - DNA, 1430 bp, Arabidopsis thaliana landsberg
aaaaaagatgattggtgaattggatatacactgttttaaaccatcccacaaaatttttatccatcacaaacatatccataagaacaaaatcagaagaagctgcaggtccatacaattacaaggaagaggggtcacaagaagaacccatagcgcataaagacatcaaagtctggatattatttagagtatgcaaccaaaaaaaagaaggcaagtggggtggtcacaaaaaatgcaagataaaggtcacaagaagaatagaacataaagctaattaaggaatagtactctatattcctgtttttactgtaggaactttatctacttatggctctcttgtacaaggctgattgaatacccttttagccatgtttttatacttgctcttggttttcacaactgattcattcctcttctttctttcacatatttaacagaaaataagcttacatatgaaagtggtaaaacattgggcccttggaatatatttttttagtttttacctttcaaaagatgatttagttactgacaagagcaactaaatttaaaattgagaattgatttggcattttttgagattttatgttaaacaatcgaaatgaaaagactacaaagatttccaataagaaggtatcacaagaaacagaattttaatggcgaatccaaactctgatatctctagcacgttttagctcctgtccaagtctttggctcatcagatcttgatcctaagaaacttagcttagctcttggtagttgaacaaactctgttgattccctcgacgtaacactagcataacatgggaaacttcttgtaaaacactgcacataatttaaacactcagcttcataacaaattcttagtccatcccaaatcattttagagcatttctggaccgacaatacttcaaagggaacttgcacaaacttccaattcattattgccaatgatccatctcagccaaagtaataaatatagaaaggtcaaaagagttaactgtccttcaattcctctaagaatctgatgatacacaaatgtacaatggatgtaactttttaccttacagcaagttatacaatcaggtttggagtacaagcaactgctttcgctttcacttgtaaggagcaaaaatgatgctggagttatgaccaccaaacccgaatgaatttgacaaggctgctttaatgtccagtctctccttcttaggacccaccagcagctttgtatcctgctccaatttcatttcacagtacgattattaaaactcccaagaggttttttttacgaacattaaaaggtctttgtataggtattgatctcatatgaaactaacataccactccactgtctgggttctcgaggttgatattagagaaaaacccatccggtccgtatcgcctgtagatagcaacagaatattaacattaaaaat

SEQ ID NO: 27222 - DNA, 1289 bp, Arabidopsis thaliana landsberg
agtcttggcctgatgaacaatgtaaggtcattagagcatccttaacggtgggttttagtgatggttcttagctttggattgattaaaattaaatcaataataggctttatttgagaaacccgctcttaactaagaggtttaaagagcctttaagaggcgctgacgtgtctgattgggtgtactgtgaaacgaaaaaaaaaattatcctcctctctctctctctcttcctcctctttctttcgcatattctctccgattgcaaaatcggaagagatacgtctcgattatcactctccccgtcacagtggtgaatgtggtgatcgtttttcactttcatcgatcggtggttcagcctcacttcgtctcccggaatccgtaacgccgccgctttcaccgctttggctctgatgtgtatatacaattactccatcgcggttttcagggatccgggtcgggttccactcaattacatgccggatgttgaagatccggagagtcctgttcatgagattaagcgaaaggtcatctctttctctcccatttagctgttacttggtgatgaatagtcaattcagagatttatcagtattagtttggaatttggattattattatgatcggttttagttcatttcaatgtcaaagagatttgccattatctctgtattagaactttaccatatttgtcaaaataattctctagatagtctatggtgtgtagtcattttctgtacatatcaaaattcaatctttaggctctatgaatttacttgaatggtgattcttgtagattgttgactctcttgatagattttgttggcttgctagagaaatttcaacttttcaaatttgttcctagcttcttctaattattagtgagggacattaaaggttgactcttggggattgcagtaaaaacttcatcttttggctacatggattagttagagtggtgattcttgtagttttgtttgtttctctaacgttgttttgatggcatgtatgagacaatttaactttcaagtgatcagatttttttccagctaacttctaattaggaccttaatagttgaggttttgatattccatatgtgacctcatgttttgtggctttgggattcacttgttactttggttatgttatttgcagggaggagatttgaggtactgccaaaagtgttcacatttcaaacctccgcgagctcaccattgtcgagtttgcaaaagatgtgtgcttagaatggtatgctctactgaacacatatgtttcctgccaaactaaacatgaa

SEQ ID NO: 27223 - DNA, 1616 bp, Arabidopsis thaliana landsberg
tacgccagaaattgaagcacccacataaaagtatgagagagttacctaaagtgtcatagtaatttattggaagttcaagttcaccgccaacagcaagatctatcacgtggaaagggatcccctcactcttcattcttatttgagcaacctgacagaattctatgttaccaacaaagtagactaacagaagataaatgaagcaagaaattactagattaactaatcgattggctataaactagagcagacaacgatctacaaactaaaagatagttaatatacagacttccacattcaaaatacctctgcaactctcacgcaagcagcaatctcaatccttccacttgtgcggtctttggcttgaatacatgcaacattgttgctatcagttgttttgacactcccgccattaattgatatggtatctcgttcaaaatcagcccgagagctgcagtctttcaatatggagtagactatattgcctctgtgactttgtccatctctatgcttctgtggctctgaagatgaaggtaatagaccagatgatgtataaaaaggcggaagaacccaagtcataggagccccgagcgaaagagggagatcaggcacaacagataaaatcattgacgcttcatatgttctagattcagagtacaagccaggagacacgaaatcacatgagaaggcaattgtaactctggttttgccagctgatctgtaagagaaaagataagctgctcgttagaatttcctaagttgtcttagcttaagtgaatatgtttgtgtgtcgtcaaagtttactaatctacataaaccttacctgaacagaatacaagaatactaagctcaagttattactaataaactgtgtcattttttcctaagcttgagtaaaactgtcccagcaatgtttaacgtcaagctaatcactagctgagcctactttgaaaagctaaatgatgctgagcatgatgatgccttgtaaggatattttagactagtgaaatctaacttctctataaggataacttttaactagccgacctggaaatatttaataaccataattggacaatggtttgcatcttattaaattttaagagtacaaatgcaagagcacatgcgataaccttaagttaccttccttggacgacattaacaaagccagcattctcttccacattgatggatgatgcaatgaaaattaacaccttaacaagaaaaaatagagctttcagtcataaacatagaagtcgaaaaaatagattactatttatactgtaagggtgaacacagaattggaccttttcatcttcaatagtccatttgtaagcgctgcagagctcataaaaagataaaaggtcaccctgataacgtaaccaagaatcagatttttgcaagcgataattctaaatgaattaattaaaaagtgatttatttctggctcatgattctcacctcaggaaatgatggggatacaggcatttcatggccaacggccacagtgtcactttgagctaccagcattgcagtagcaggaagtcctacttcggcatttccaattgcctgacaaattacagcaccttcactaacgtaaattgttacatagattgtct

SEQ ID NO: 27224 - DNA, 2637 bp, Arabidopsis thaliana landsberg
gctaatcccgtccaggtcctgccaattacgacgacagacaattatagtttggtggaggctttggtgtcccgtatcctctctatgtgtgccttatagctttgtgaaattgatgatctctttaccgctagaaatgtgtattctttaacctttatatgttagacatgtctgagattgatgaaaagcagatgttgttgtatgcacagatggctaatcttgtgaacttgattcttcaatttcctagtgttgacctaagagagatcgccgagaacttttcaaaggttggtgatgtggtcccgggattttttgtattcctctttattggaatgttgtttagggataattacttaagccactttcatttctactgaacacagttctcatgcaatgctcatagcatttgtgatagcgaattgagacctcaagggattggattgtttccattggtttccatcattaatcacaggtaaatgcttttactttgtgttctttaatcactttgtttcctgcctaaatcttttgctctgtagctgctctcccaatgcggttttagtgtttgaggagcagatggctgttgttcgggcgatagatagcatatcaaaggattcagaggtagtttatgctttgtttcgtctctagtctttcgtatttgctagtagcacactgacatatagctgttagattcttttgtctttggtcagataactatcagttatattgaaaccgctggaagcactctgactcggcagaagtctctgaaagaacaatacctcttccactgtcagtgtgcccgttgcagtaacattgtaagtagtcgctatttctcccacttatcaacgaatggagtttaatattctcggttttttacaacctgtatcaacatttttcttcatacctaagggaaaacctcatgatattgaagaaagtgcaatattggaaggctatcggtgtgccaatgagaaatgcactggtttcttactccgtgatcctggtatgttaagtaaaacttacgtagtttgtgtccaaaaacatttatcgatccctccaatcctcatttgtttacttttgcagaagaaaaaggctttgtttgccagaaatgcttgcttcttaggagcaaggaagaggttagaaatttagcaaatgatctgtaaacaggtttcagagaaggctcctacatctccttccgcaaaaggtatctggtgcctttgtttcccccatacctgcaattataagtctgaacaagactaactgatctttgtgacattgagctgtcttgcaagttgtctgagagaatctttgatcattgtcagataaacaagccgctattgaactatataagacaattgagaaactacaagttaagctttaccattctttctccatccctttaatgagaacccgtgaaaaacttctcaaggtacgtatcttttggacttttggaagttgtacagagttttgaagacgagacagacatggtttctcaaagcttgccgttacacattcttttgcagatgctaatggacgtagaaatctggagagaagctttgaattactgcagactaatagtccctgtttaccaaagtatgtctacttcatcttgattattactttgttcgctccttgacgcatgttcgatcaatatttttcttttctttaggataccttctagtatatagatctaggtgtgggatttatattttgaacataagtacgaagctcttaagagttttgtatagatacatttacttataattacgtaggaactgattgcatacagtatcagagctaactgtactactactaatggctgctaattataccttaaacagaaacatctacataataattgtaaaatcattcaaattcttttggtggttattacttgttcttactttgtttataaaattgcaggagtatatccggcaacccatcctttgattggactgcagttatattcccagggaaaactcgaatggtatcaaagcttctttcccttctctagtttatattttgataatatatatgagctgcggaaactaaaaatgattttgaagacggattaatgctccggtcaaaatccttagatccaatttataagtgttttctctcaactgtcaacactgccattcctctacatgttctcagtgttggagactcttattctactgtgacgttttcagtcagggaacacgtaaagattggctagtggtaggcggaacttggctaaaagccttcaaattggatatccttaagttagaatctctgcggaaagaaacattcgtgtgcctgtaaaatattatcattatcatattttaactttctacgttaatctgagtctgagtgcaataacatggcgtcggctactatcatattctgcggataaaaaaggtataattgtgatgttgcaggttgctgggggaaaccaaagaggcggtgagttcattgattaaggcatttgacattctgcggatcagccatggaacaagcacacctttcatgaaagagctctcatcaaagttggaggaagctcgtgcacaagctttttataagcagcttgcattgcattgaaagacgcttataatgatgacaactagcaacgttgatctctctttgtacaaactcatgaatcactttctatac

SEQ ID NO: 27225 - DNA, 1502 bp, Arabidopsis thaliana landsberg
  unsure (1)..(1502): unsure at all n locations
agaacaagaagaagaatagctgaagtctcctaataaacctgttatgtattcaaatctaatcttcttcttttttacaacgacaatcttttgttcaatagtgtactgtgtctgtctgaactgagatttctgatcatatgatatattatttgttcatttgtacgagtacagtacttgtgaaattctctacaacattacagcttcgaatttgggggtttgattgctaaaaaacgttgccgtttccctttgctgttgttatatggcagttcatggtaccccactaaggatccacgttgttaacctctctcgcacgtgtgaatgaatttttacaaatgaaaaagccgcgaagtcttctcctccttcctttctccgtcgtcctcatttttcttcttcccaggaaaattctcattttctcacgaaacaacgaagacttcccatcaccacaatcaaaaacacaataaaaacatgagcaacgaagaaaacatcaaatctgataataagagcggcgattcctctgatctccctaccattcccgccttaggtaattttcataaacaactcacaaaattttacatctttttctcgataaaacaataaatctctggataatccaaccaaaaatctaccctctcacatttacttctgcctcaagtaaatgccctgttttatatattttcgatcttggaatcaacaaggaatagggttaattgaagctagctaaccattatgctttgtagatattggggcagaggaatgtgatcttcttgcagagcttaaggcaagtcacttcaaattgttgataaaaattcacacagtaacttttcttgtgtttcctctggttttatgatccttttgggtgttgattaacttacagaacctaaccttaaagcgaccatttgatgtgaaaaaactctcacctaaagttaccaaacgtgttctgtttctcaaagacattcaagtactttcaaattttcgctcttttacaactaaagagagaggctcaatgttcggtttatgtatacttgtagagtaaatttttaggttacacacgatgaactcgaagagaagtttcttnnnnnnnnnnnnnnnnnnnnggcaacatatgataatctctacaagccgctttttgctaaggtgacaagtttaatattttatcttttacttaatgttgtatggggttaaaattcctgagatgtactgagaatttgcagaggtatgaaattgtgaatggtgtggtcgaagctgaagcagagaaagaaggagttcccaatttctggttgattgcaatgaaaaccaatgaaatgctcgcaaatgaggtacatgattcaattgatttttctggaagctatgtgttcattgacactgaatagattaatgtaaaaactgtcttgttttggtttatgtagataacggaaagagatgaggcagcattgcagtaccttaaggacatcagatcttgcagagtaaaaaacacttcaagaaatttcaagctggagtttctcttt

SEQ ID NO: 27226 - DNA, 701 bp, Arabidopsis thaliana landsberg
  unsure (1)..(701): unsure at all n locations
ctcgaaggctcgaaccctctctttgtttttttaccactatataagaaagtccgattcctcgtcactcttattcccacttccacacatacacatatacaacagagcaagagagtcaatcaagtagagtgaagatggcaactaaacaagaagctttagccatcgatttcataagccaacaccttctcacagactttgtttccatggaaactgatcacccatctctttttaccaaccaacttcacaactttcactcagaaacaggccctagaaccatcaccaaccaatcccctaaaccgaattcgactcttaaccagcgtaaaccgcccttaccgaatctatccgtctcgagaacggtttcaacaaagacagagaaagaggaagaagagaggcactacaggggagtgagacgaagaccgtggggaaaatacgcggcggagattagggatccgaacaaaaagggttgtaggatctggcttgggacttacgacactgccgtggaagctggaagagcttatgaccaagcggcgtttcaattacgtggaagaaaagcaatcttgaatttccctctcgatgttagggttacgtcagaaacttgttctgnggaaggagttatcggattagggaaacgaaagcgagataagagttctccgccggaagaggagaaggcggctagggctaaagtggaggaagagagagtatac

SEQ ID NO: 27227 - DNA, 1370 bp, Arabidopsis thaliana landsberg
acgcatgtgaggtgaaacctatgcgaacatgggagctttctcgcttcttctgtctctgtgtacttcgcctaacatatgcgacattcctgcaataatggaaccggtgggtttcagttttgatgtcaagattgatttctgactatttgacctatttcagaattcaaattagtgcttaccggatcattgtttgcttgagaagaatcagaagtttcatcaatgagtttgtatttccaacttgggagactggagatctggtcatctgaagctcctttttccgaagatccaacgttcatgttgtagccgaggaagctactaacgagaggtacaacacaacagagcaggaggaagagaagaaatgggaaggagtaacagagagcgttccaagcgagtagggagatgcagaggacatgaaggattggagcatagtggaaagaaccaaaccgagaatcaaaaacccatacattacctatcacaaaccatatcgcaaagaatagctccagcgatgtccggcatttgttcatcaaatgcgagcacctaaaacacacacaaaaataagtcattttcctagaaatctttgcattttatgatcaaacttgaaaaaactagatttttgttagtaacctggtggtctcttccctgcttctttggtgctgctcaatatcgccgaagctaaatgcattttcatggctagtatcttgctgacgataccgaccgtatagtaacataagattgagctcacctgcgtcgtagtattcagtgatccgtaacctcagcggtcaagcaggcctctcgctgttgttcaaagcgagtgtggatgttatcacagtgatctgtaaaagtaaagcgatgagctctgataccatccaagcgatagaattgaaaggattggtgccaagatcggatcttgaggcgttctggtaatgaaagactcttctcaagaaaatgaaccaccttgctctagataccctcatggcaagtctcatgaagaaggaagaagatggagagctctccggagccgtgtgagtgttatcatccagttgcgtggaagcgaaggaagaagatgaggagacagtgatggagttaatggctgatgattgcaactgagaggaataacgggtactcatatcggaaacagagaggtctttgatttgatctcctgaacaagagcaaagagaaacagagtaaagcttgagctaaaaagccatgaaaagtctttaaaatatgcaattaaagtacatgtaaaaaaaaagacatggatggatatatcagtgaggcattttcatcaaataccttatcttcactctgcgaaacagagcaacataccaaaaagtgtaggttttggtgtgaacccagcagatggagaagatttg

SEQ ID NO: 27228 - DNA, 1190 bp, Arabidopsis thaliana landsberg
gaatgccttggaccttacattttgaatgatttgagttttagtgggttttctatggttttaatgattttaggaaagttaatgtgatttttttgtaaaaaaatttcaaattccatctaaaatcatgaaatttatcatcgaacacataccccaaatttctcataactctttatactttcctctagtctcacccatgatgatacaaatctcaccaaatcactagtcatttaaaaaacaaaaaaagctaaaaaatcaacccaaatatttttaaaattactcaaatctcaaatatggaaattccatcgaacacctccaatccaatatacccccccccccaacccgatttctgtatttttaactaaagaaatctttcttctcaaatccttcaaatcacaaactgtcttttaaggtaaatttttttatcattagttcaataacactagattttatcagagttattaacatgcatgattgaataatatagaatttgtaaagttaacataaatcacttaaaagttaaaatacacccctctaaatgtttttttctctaacaaaagtgtaaaaaataaaggttaaaaataaagggcccacataatctataaataacccaaataatttaacaataaacaacaaccaattaattaagtcataactcataagataattttggtaaggtaaaaaccatatgttaaaattaaggagcttatatatatatatatgtgtgtgttaatcatgtgtaatgaatcttatccaagagagtttaagaaaatcaagtggctaaacctaaaagatgaacaagtataactcataagataattctggtaaggtaaaaatctagggtttccctttcatttcaatcatggctacgggatctagagaggccgagacgacggcagagcccatagagacaacccctgatgaatccaccgtcgcttgctctctgagcaaggacatatccgactccgacacaagagaagttgattattcctccggcggagaaaaagaaggagaagactacgaaagcaacggagaagaaggagacgagatatgatggcgaaagcaacgaagaagaagatgatgacgatgatgataacgaaagcgccagagaagaaggcgatccggagagagagggagccgccaatggagaaagtatagtggccgatggagaccctgacacacgatcaaccagagtg

SEQ ID NO: 27229 - DNA, 1314 bp, Arabidopsis thaliana landsberg
ctttttctccggggaaagaattttgggaacccaccactctcgcaccgttggattcgttatttgtgcactattcctgcagccaattaacttatgacatgtggcaaatacataaacagcaatatatttattgaagcaagcaggcagcattatactgtacaaattacaaaaaaaagtacttgcctatcactcctccttgggactgactatctatctattgggccttcaatgaaaatcagattaaataggtgcaacataacttgggaactgaagaaccacatggcacaaaacagagtaaaattaaagactacaaccaatcctttttttttgccattcctcccatgattttacttgtctagtagaccgtagacgaacctcagctaaatttgtaattacagtcgaaaatattattaagctctttaacacttttatagcctacccttgtctttgtgcattccagagtaatacgaatcgattcaaatcaagccaataaaataaaaccaagcctaactacactttatttaatgcttaatttttgtccttgccaacatgacaactttttagaaaaaccatttgatatgattttttaacttgggccgtgacattactaatgaggcccacaatgtacttactccgacgtgtaattgtctccgataaagacaaggaaccatttggaacctctcacgcgctttagctggaaattacgtggagttgagctactcgcgactctatcctatgtataattgtatatcagttttccgtctccatcaaatatcctagagagccacgaatttttccttctttgttgtaaattctgaatattaggccacataatacggaaagtcttaaagggtttggaccattctcaatcttatgttctagtagcttgatgattttttataaaaacaatatggaaatacttttatctctatccgatttcctatgtcaatatgtgtcacaggattttacacgtctaacttatgttggaaacgctatcatcttttctttttttttttttatagtaaacaattgtatttgttatcatctacaactctaaaaaatacatttcgaaaaataggagagagcgagtaggaaataagaaagtggcaacgcgagagtaggaaccggaaatggtaaaaagattctgaggataaaagagaaagcagagaaacagacaaactttatttggagagatgttaacgtggatcgaatatcctcacgttcacactatcccattggatgtagcacgaggccgccacacgcccctacatctggctttcatattcaccctccacgtggatctcaatccaacggtga

SEQ ID NO: 27230 - DNA, 1797 bp, Arabidopsis thaliana landsberg
  unsure (1)..(1797): unsure at all n locations
gataatgtcctgtttacaagtaattgataaagataacctctttataacattttcttggggtaatgggaccaaattgttgaattagaggatgcatggctttgtttactttacaaggatcaagttaacatagttttggctatccaactcgtttacacaatccttttaaacaactaccattcagtcactatacgttgaacaatatataaaaaatatagtgtatgtatcaaactgagcctctaagataataattttaatgtggaaatcccaagaagagaatcaaatctataaaaaaaatagactttctttcacgaaagaaacattgaattttcttagggcaaccaattttaatacacacgatttgatttggctcatataatacatatgagttcttataacgagatacacgttacgaagaaaaaaaaatgcatatccagacaaacttccattactaatcactctttttcgtcaaccatatcaataaaaatcaaaagtaaaataattttaaattattaatatgtttagttttattaaacgtgagaaattttaaaatttataccagtaaataataatatcacaaaatctttttaaaatataaatgataccaacgtagaagctagagtgctatagacacaagatagtcgtaagaataaataaaggtatttttgtttaatatccttaacacctattcacgaaaaaaacatagaatatctttagggcaaaccatttttaatatacatgattgattttgttcatataatacatatgagttcttaacgagatgatacacgttacaaaaaaaaaattgcatatccggacaaacttcctacactaacaactctttttcgtcaactatatcaatcaaattcaaaaatgaataatttcaaattaataatttttattaaacgtgaaaagtttgatattatatactagtaaataataatatcacgatgttttttacaaatgtaaatgatagcaaaagacaagatagtcgtaagaaagaataaataaggataaattgttataatagtaattttgtgacgtaggttcatatttgatttgtcctgaagcagtggaagtcacattgtcacgttctggtggatctcgaccttactcgaagtaagcagacaaataaaacctacctccccttaagtaaattaactattaaaaaacccattgattgattgaattgctcctccaattatattcttttggttntatgttttcagattccttcacacaaacgcacaaatccttcattttatttattaaaaaaaaatgaaaaatgtttagaagataaaagtttcaagttaaaaaaaaaaaaaaaaaagtttcaagtaaccaaattaggctaaaccgggctatgtcgataagcttgatgatatgttggatctaattttgaaacagctactgaataacaggtttcattagggccaaggtctaagcaataatgtggtcctgtctgtccactaggatgttttctcgtacgacgtaattaaagaatctgtatcttagtttgctttggttctcattggtgtaaggtactgtggagcctaaaatcgattgtacttgttggaatctacgatttcagggttgctgattacaagattggaatcagaaaagaatcgtattttccattaaacaggacactctgctacttactattatgtcttgtagtcttggtaaatggtttgccttgtctctgccacgataacatgttagtgctcttgaaactttctcaatcttcaattgtgaaattaaatgtctccccacaagctgagactaagttattgtgtgatt

SEQ ID NO: 27231 - DNA, 858 bp, Arabidopsis thaliana landsberg
tttgaagcttgtggactctgtaatggagtctttttttattctgatgttaaccctttattttgtctttgtagggcttaatacttagcaacgcctaagggaccaaagaattatgaagatgagagttgcactatagctctcaataaccttcgatcaaaggttatcaagctgagaaacgaggctacggaaaaagacaagtttctactttcattggtggataaagtaaaggaggatgaagctagcttcaaaaatcaatccgaggcccaaaaaattgagattgaagaccttcggaaacaactggccgaagcaaggaaaaatgtggtctcgcagaggccaactgaaatattagtgagtattggaaaaattatttagaaaaaacagttgcagaacttcgcgcatcaaaagagagatgttttgaaaaatctgtggagtgcgtaaaaaagataaagagtacgttcgccaatgtaggcgcgcactcaagcgaagacaacttcatactggcgatgctgagggagtaattgagtggatcaccatgtgaggccgaagcctttgaagagattttgaatgaccgcagggacatctgtgccttctctggtgcgaggggagttacagctattttggagaaggcagggtgcgaacatgttaaaactttggctcaagccgaaactgccttctctattgacgatacgaaggaccattcggctgaagcaagctcaataggtggaaattttttcactgatatctgggaaaatggcggccgagggatggcccattaaataatgaaaaagagcgaaaaagatattcatgatactcgagaagcagcgaaagcagctgaaaaagctgcggagctcgaaagacgga

SEQ ID NO: 27232 - DNA, 1725 bp, Arabidopsis thaliana landsberg
  unsure (1)..(1725): unsure at all n locations
ttcattattggattacaacaaaaaatttcctctttattttttatgagaaaaggggaaaaaacacttaaaaccttttgtgttgaccagaaaaaaaaagagggataaaacgtgggggtattaatggtaatggggatgttccacatatttctgaaatttttttccctctgctacgaaacctttgaaatttgtgtcatcgaaatcgaaaccaaaatggatctttcgaagaagaaatgggcttcgataatctccgtcatcgcttcttctctgttttcgctcctcatcgtcttccagattcctctgttcaggtatcatcatttccaaaccattcatcgcaattttgtcatctgatgaacgcagaaaccaatgcactaactagttgaaattgatggcaaaattcaccaaattagggttactctgttcaacaatgcaggggcgttattggattttagattctcgtataaagacagacagatagcattctattagggattgacgaaatgtatgtcttagaccattccttgttagagaacaatctatatttgaattgagtgcgctttgtttgtttatatgttgcagagtggcgtgcaggaacaagagttgtgaaactccattagaggtcatatcctctgagttgattgctactgatttgattccttcttctcttgtcaagaccctcctttatcctggtgccattgccaagtctctttttgctggctccaaaatccccagctaccaccacttgtttcagttttacagtttcgacggcatgtatcgcacctcctcctttgcaaccgatattcatcatctagaggttttgcttcttccattctctccatccatctggttataacaacacctttagtccaacaatgtcaatccaaaatctgcttcaggtgtttgctgggagttgtttgtgtcttcttggagctttactcaacctgttcaaacccacaagaataaccttcattggaacgcttttgatatcttggggtcttatcagagacattcttcttctggactctgctcacgattggataagcccccacagaaactctgttcgtgtctacccaacactgtttctagcttcactttgtgcatttctctccatgcgaagcgacgtcaggaagatcatcaggtgttgtacatctatcaccctttccaaatcctctaaaggagactaggcttctgcttcactaacttcatagattccaacacctagaagaactcacttttcctttaaacaacagagaaactgttattttctgagaaaaagcttctgtaactttcccatcaattttcatcatgaatatgcaatcaaggttcactttttcttttccacctcatatccattatgaatttgatatattacagatctcttggaaaaggttaatcttccatgaaaatgaaaaaaccccaataatgctacagatgagtaaactaagaactgatgtctgcctatgatacagttgtaataaaacaaatatccaaatagaaacatacacaaagaggaaggcatgtgcctttagtcacagatctttctacgatcgtcttctgcttcggctgccagaaccgtgaaccagacgagatgctcccccgctggtctctgctcctttcagtttctgtgctttncaaacttcagcttcatccatcagcatggctaactgcacaacacacacaacaggatntcgacccagcccaaaaaatcatcatccatgaaagagcttt

SEQ ID NO: 27233 - DNA, 849 bp, Arabidopsis thaliana landsberg
acaatatctatgattacaagtacatttgtccaaattctttgttctcaattgagacagatcttgctttttttttacttgtttgatagtttgtttgttggagtggtttgagaatgatacagagtacatatgtacagaggaaaccaaattaatcatttgatacataattgataatggaatatggtttttgagaggtaaaatatatgtgcagaatcttttgtttaagttgtttctttagctgctcataaaatcatcatctgcatcatcaagaccaacccaactcatgaaagcaaatagaaactctctaaaacccactttcccttttcttccccaatccatttcttctgcattacaccataaaagatagaatccaatgagtatatataatccaattcatcaaaacaatgagaattgaagagtgtgcgtgagattcatatgtaccaaatctcatgttggtgacatgtgaaggagatctttctagcggatagtcttcgttgttcaatgtctttatcacatcagtcttgtttaatttccctttaccgtctttgtccaaaaacaagaacacttctactattggatcaaatatagactcaaccaactttggacccatctctctcgattcctaagaaacacactacatattttagcttaaatagtcaatatattcatcatcatgtcactgattattaccgtgctggattcagaggaaggtttcgccagaagatagatgagacagagaaggactataaactcattgaattgtatccctttgcttgcatcaacgtcacaccaactatataaacctttcacttctttatccgataaactcaggtttagtttctctaaacattt

SEQ ID NO: 27234 - DNA, 5345 bp, Arabidopsis thaliana landsberg
gtttcctacccgcctcatgtttctcttcatcaaataattctaataactccaaaagataggtagtgtcaccttttctcactgttttttccgatgcatgaagagtatctattgtctcaagagggctgggtctcccactagtgtcacccattattcgttgaccttgaatttcagagtgtggcgcccccaattgatccttgtatctcccaaggtagctaaccacgagtaccccaacactatatctgtggttcccaaagcaaacagaaaaaactcctccttaatatccaccccttcaatgtgtagctgcacatccttaactttgccttgtcctgaaataatctgaccattaccaactgctactccaaaatcacttgttggtgtgactgttagtgagcagcgctgagcaacttcttcagaaatgaagttactagttgctcctgaatcaatcaacacgatcacttcctgacctgctatccatcctttcatcctcatagacttttcattagtaaggccagccattgaactcaacgaaagatgcatcattgtctgtccttccaccttaggttccggttcttcttcactctcagattcgtcttcctcctccagtaactgtcccgcctcgcttgttgcgaccaactccaaacatttgagcttctgatttttacagcggtgtcctggaaaatagcggtctccacacgtgtagcatgcgttgttcctctgatccggtttcctgttatctcttaccccatcaaatgacctcctagcttgaatgatatcctgtgtcttgatagggctattgttgttgcttcgatgaagcaccggagctgaatttgttctactaacggatttagagttgtaatttgagtggaaagacgtcttctcctgctcttgctcttctatgaggcctgctgtctccacaatctcatatatgccagagggacgtgtacgcatcacttggtctcttatatttttcctcattccctttaagaaaattccttccaaaagatcgtcagtaatgtgtggcacctcaactattaattcttcaaaccattctctaaattcctccactgagcctttctgtctgatgttcaacaactgccacacaacagacccgcaacgactgtgtccaaatcatttccgaacttttttcttaaaatcattccaatctttgaaaaatcctctcattagcacacctctcaaccaatttaaagctgttaccaaaactaaacacgttatagctacctccaacttttgatgttccaaggtctggttctgcagaaaactcttctccattctgaataaccagtcatctgggctatgtccttcatactgtgatagatctgaccttcttccaggtgacccagtgttgttacccggagatcctagctgaccggtgttctggctaaacccgtatgatgtctgagacggatccattgtttggatcggtactgccagcggcggtaagggtagaatcccatccccttttgcctttaacggagcttgaggtgtgatgcaactgtccttggtgacgttggtctggaactgagccgtggactgaggactttcagctattacagagcctcattgcttttcgcggaaaaaacctaagaagctgtctaaataactttgagaattattttggtgagaataacttttaggagcatgagaggttacaaattgtttatgctaacttggaaggagagactaggcaacggataaagcatctctggaaaaagaattcacctacaagctggaaggaatttaagtgtatgatgggccgagagacaaagacgacaatgaagttaaatcatcaacctcattattcgggaatacaacaagaaggatcaatgcgtgattacagagaaaggtttgaagctctttgtcttcgctcagttaccttaccaggacaaggcttcgaggagatgttcttacaagggttgcagcctagtttgcaaactgcagttcgagaattgaaaccgaatgggattgtacatatgatggatacaacacaatggttagaagaaagtaataatctcataaattctggaattgtgtcgtcattgagaacagctaccaatcaagacaggcggagctgatgagccttaccctggtacaagctaagctggatgtggtaaagaagaaaaaaggagttataaatgagctggaagaattagagcaggatagttataccttgagacagggaatggagcaactagtgatagatttaaccaggaacaaaggtatgagattctatggcttcatattagatcataaggtcgttgcagctatagattctggagcaaccgacaattttatcttagttgagttagccttcagtctcaaactacccacgagtattacaaaccaagcttcagttttattgggacaaaggcggtgcatacaaagcgtaggaacttgtctcggaatcagattatgggttcaagaagttgaaatcactgagaatttccttctgctagacttggccaagactgatgtggatgtgattcttggttatgagtggctctcaaaactgggagagacaatggttaattggcagaatcaagatttctctttcagccacaaccaacaatggatcactctttgtgctgaggacgaagaacttgagcaagttactacaaaagtaaagatgaagagtgaaaatgagcaagaggatattgaagaacagagaaataacgatggggaaatgcttgttgtttgctaccttgaggacaagtttcatggttggaaccttggaaggatactaaagagaatgacgatgagaaatcattttttgggcaacccggggtgaaacacagtgaagttgtagctggaagtacgcggaacatgtcaaccaagagtgaaaaagaccaaaccgctccgtgtgtgttaaaggtgcacacagaacagactaaagaggcggtcatatcaaaggaggtaaggactgcagaaccgtttgaagttgtgggattgtatcatcctcttaaaactgtggtttcaaggctaatgattgaattcggtaaagaggttacacaaatgcatgttgaggagatggttgataagtgggaatcaagtgtcaaaaagaaggttgcagctgtaggctcaaccgaagttaggacactcgtccaaggaattcactttcttccaccttgaggacaaggtgactctcaaaggagggagtattgataggttcaggagttgggccttatggatttttataaggcttagtgtttggcatgtttactttagtaatgtcttttatttaaactcttctttagtcattgaaaaacacttattgattataatcttaagaatgtttatcttcttcatcttccttctccttctctgaaattcttctgcatctcaacctatttcttctattatctcatctctttctgttacatatcttgataagccattttggtacttatcactcaaccaaagccactaactctgtgtgttttagctctgagagagtgattgtgtctagcgtagttgtagccttgatctcttctgtttccaatatcatcttaaacacctcaaatcttgcagactataaaacattccataacattcacaatgaaattcagtacgagtaaagaacgtttcgtaaatgtttttttaagaatcatatgatgatgaaaaaataataagtaaagaggaagagaccagcacaagcttatgagcagatatagatacacccttctgatcgctgtcccctgccttcagccggacatcgacttgtcgctgttctttcaaaatccttgcaagtccacccacaaaaagctctttgttggtttgtgatgccatgtttttaagtttatcttcattctgttaacgattggggttatatagagactagagagctagacggtcaaaattactcttttgctttcttttcccaagatttttttaacgtgaaagagacattaatgcacgaatctgtagagtagtcaaggtgactaatatgaagatacttgtaagagaatatgtagagactgggattctgataattgtgcccttagagttatacgattctagtaaattgaactttaaccaaaattatttcaggtatgttcgaactgttttggttcaattcgtatggtatggttaatttagtttgattaggttcaattaaaatttcatatgggatattgataattagcaagttcttttaaacgatttttctcttgtcattttggaattagtgtttatttatttttttggaaaccctaaacctaaattatggtaatcatcgttctctccgtctctctctctctcttagacgtcctccacaggaacagttcgtctctctctcagtctctctatatcaatagaactttcatatttgttccctctctagttattataattgcccacgttctttactattcaagcagttttgagtttattatatagggtatttatagaagggctcacccctatagattaattcatcccggccggttaatgtagtagttgaatcacaggaaaacaaacattcatgtttcaggcaatggatgccattttatttgacacaagctataagttgtcttacagatgaaattcttggaaaaatattgtcctcactttcgacaaaacagagatgcaataagttgcaaccactacaggaaaataggtttttaatagaagacgaaaaacgctatttatcgttactatagcgaaaataaaaacgatatgttatcgcccgctacgatagcttgccaagttttcatagcggtttttagcgacgctattaaaagtgttaatacaatagcggatatcatttgttatagtgtacattataatagcgggtgttttatgttattgttttgtgtacaatagcgcatatcatctgctattgtttttaatataatagcgggtatgttgtgttattgtttaaattataacagcgtctattatatgctatttataaatttaatttaagcatgtcacaaaatcattgtctgctttcatttatgttgttgtttacatatataatcaatatcaatataatgtaagaaaaccataaatcaacttttaattaatattgtcaatcatacaacaagttcacatcaatattacacaatattacacaatatcaaatctgtcaataacccaagttcacagcagtatcaaacaaacacatgcataacatagatcatatcaaaatgagtctatcattaggccaagctacagtaaggcctactgcatcgccaatgcacataatctcagaatttggtctccagactttagcatctccaatcttctcagattctacccacacgatgctagcattcaatcctaggcgttcgaaatgtactagatcttcttgatttgttgaagaaact

SEQ ID NO: 27235 - DNA, 318 bp, Arabidopsis thaliana landsberg
ttactatcctagcattcagatttgccttaaagccacaccgcacaccacaagttaccaccgagaaaagggtaaaaggtagtcatcctagaaacctatggtttacctaaaactctagattcctagctctaagggttcaaagtattcaggttactaaaagattctaatcctaactctccactcactcagactaaaaataaacgacttaagctagcaacactcacttggggttaccattacccatatgatactacgcttaacaaaactaagtaaacaatacttaaaataaagcgcccaagcaattatgcaagcaagcaagca

SEQ ID NO: 27236 - DNA, 1338 bp, Arabidopsis thaliana landsberg
ctcaaacttgcagttgcacatttgtttgtgctaactctttgtccagaggctctttcatactgagggagtatatctttgatagcgagacacgatttcatgtttgcttgacagaagaagagcgagtcgtcagcaaaaaggaggtgactaattggagggctcttgttgcttattttgattcctttgatgtggccttgttgttctgcttttttcatcatatgactgaggacttctgcacatagaataaaaaggtatggggatagagggtctccttgacaaatgcctcgttccggttgaatgaatccatatggtgcaccatttatattaactgagaaggtggcagttcggacacaagtcatgatccattctatccaacgaacatcaaacccaaacttaaacatagttgcttgcaggaagtcccattcaaggcggtcatatgctttggtgatgtctgtcttgatagccgtgtaagaggtagagcatcgtttcttcacttttaaagcgtgtgtaatttcatgcgaaatgataacattgtcagtgattacacgccctgggatgaaagctgcttgttcctccgaaatgatgctagatagatgttttttcaagcgaccaacaagaatttttgagatgatcttgtagctcacgttgcataaggcgattggtttgtaatcactcctgtgtcgtggatgttctggctttggaatcaagcatagatttgtgtggttcatggatttatcaaagacgccattctcaaagaaattatgtacctccttcattaccgtttgtttgatatcagcccaatacttgtgatagaaatctcctgtgaatccgtccgggcctggggctttggaacctccaatagagaatacagcttctgcaatctcctcttatgtgatcctctttgttaagtcatcattcatgtctgaagtaactcgctgtgtgaatccgtttaagacatggtagtgattgttgttggttgttagatcattgtggaaaagatttgagaagaagtgttgagccaccttgcctatattagagtcgcctctgtgttcaacgccatcatcatcaaagatagagtgcattcgattcctggattttctgatttttgtagaggcaaagaaatatttcgtgtttcgatcaccacttgccaaccaagtctttcggcttttgagtcgccaaaattcttcttcatcagcataagcctttgataattggaggcgaagtgcccagatgcgttgaattgatgaaccgtccgtatgtgctctgtctattctttttttgaggagggctatgtcttctttcgcattagaccggtagcgccgtttccattgtgaaattgct

SEQ ID NO: 27237 - DNA, 1327 bp, Arabidopsis thaliana landsberg
tccccaattgagggaaatttttctattcatatatgtaattaaatcctaactaatgaaattgagtacataatataagaataatcaatcataatatcttccgtcttagatctatttaaatggtcttatttaatttcctaaattttggcctaataatttatttgatatagtgaatttatggaagcttcatgttgatggaataaaaccggcttatcccaattaatcgatcgggagctataacacaaatcgaaactctagtagctataaagagtgtgtaatagctttggatcacatgtattactatttatttactagctcgtgcaaaaattggctttgggaaaaaaattatttactagtactcccccttcacaatgtgatgagtctccaaatgatatattctcaacccaaaggacaatctgaaattttcaatatatattccattttatccgcaacatttgaaatttgtggcaatgtttttaaaaagactatttataaagaatctttctaaattgtttctacgacaatcgataacaccttttgttgatcaaccccacacaagactatgattccaatcctaagaaacatacgacacgtggatttttatgtcacactagtacgatgcgtcgatgccttcagagtacgaatatttttcacataaaattcttattcgaatttgataatataaggtcagccaatcttttaaagtaattatattcttcaatatacggttgtggtcaaaattccattttattttgtagcttgcatgcactactagtttaaaaccatgcatggatttattgcatataataacattatatgaattttcaattaaattaatccacacatttcccatttcaatatgcctataaataccttcatcacgagtatgacaagatcacaagacaagaaaagaaaggtagagaaaacatgataatgatgattacgatgatgagagtctctagttgtatcagagggtcttgcatggaagaatagagaatgaggttgagccaaggatgacttgccgggtttttttaccaatgaatctaattaactgattctggtgtctggcaagttgaccttggctctgcttcgttctctattcttccatgttagattccagatatacattagtcatgaatcggacttatcatgtcacatatataacatataaaccctccaaatgttacttttaattcgatgtttaatttgtctcaaaattaatcacctcgttaattagtctttcatgcttcataagttttttttaagtttttctcagttaacttcttgtaaatctgagaaactttcttggctatagatataaaacaagaca

SEQ ID NO: 27238 - DNA, 1238 bp, Arabidopsis thaliana landsberg
taaataaagttatacaacgttaaaagaagataaagatatgaacacattttatatcaaaggccttaataagtatatttgggcctattaaatcgaacctttaaacagaaaaactggcccataaaataaccgtggttgtgttataacaagccggttaagtacaaaccggaagcgactcgtgtttgtttagtgaagcgatcaagcgagcgagatcagtcaaatagctttttcattgttcctcagatcgaagaagaagaagaagagcttagcaacaatggtaaatctagatccgtccaagtgctttcagtcacagctaatttgatctctctatttgttgcttttacgatttctgattttgtttggtgtgtttgtgctcgttcccggtgagaaggcggcgaaaccgattgcgagtccgattccggtggcgctgtatccgactttatcggtgttcactcttgcgattggtctcgtcattaccgctatcttcttcatgtaagctaataattgatctgatctctagatcttcgaaattgccccttcttgttctcaatttatattacttgatgtcagattagtgaaacagttcctgatagattcgatctacctatgatttatcttgattttcataaagcttgattagtgtgtgatagtcatgactaggttctgaactatgaatcgtgtgaggctctcctcttgtttgttcactgtgtatgaagcttgaccaacattgttactgcttatatatatggtttggtcacaatgctttctcaattgctattctctagagataggtcttctaaagctcctgaagctacatgttcatcactttcatgatctctttgctagattaatctgttgaaatatgtgcctttcttattactaaagtttctgggtaaaaagtaagaaagtcatgggactcatctagtaaccttttggaaatgtgtgagctctatatactatcatgatataaagactcaaaatttatcaatgataaggtgatagtctatggaaatggaatcagtactctaatagtttcactgaatatgacaaaatgactgattatcgatttagttaagatacaagaaagttagacttgtatgattttcatttaagcgtggagcatttacctttcaaagggtggcaagctttaggagatatgattcggcttgttaaagtaatgtgcgtctgggctacgagagcatgtgggttagcctccagtcaaaaccttaagatagacttga

SEQ ID NO: 27239 - DNA, 1865 bp, Arabidopsis thaliana landsberg
aaactcggtttaaatttatatggtaactcgttgataggattatgcggtaggacgaagctccttttggtcataatgaacacacacctgaacacagacttctgcaacatcagctcttgcgattgttcttgtttctgtctaaagtagctcgtcatcttttcccacacgtaattctcgaatgccaccgtccttgtcctgcagacctccagccctgaatccaagagcaatattgcaagatgagaatattccgccattgcaatttgtaccggatgcaagtaaacaataaaagttacctgatgatggtgtatggaataccggaatcagccaagtattgctcagcctttctcttccagacctacaaattgcataaagactgtgaacatttgccgtgaaactcatctctgtgttcaagaaaacagagaaagagtagtctcaccagaatgttagcattgccaatactattgagagggtgattaatgtttgttcctcccatcgacccaaccaaaacaatctgcttaactcctgcagccttagctgatacaacaaacgacaatccatcatcatcaacacctccgctaaacacacatacaacagagatgatgaatacaaaccagcgtctatctgattcttctgaccaatccagtcaacctacaaacaaaatcatgaattcaaaaaccaagaagaaatgaagaaatccacaagaacacactacactaagatcaatgtagtcacctgttctggataagctccatcatcaaagaagaactcaggtcttgcttctttactaggatcaaaaccgggcttcatctgcggaacagcgctagtaagaatgaccaaagcatcaatcccttcaacagcaggagcaattgatgcagtatctctaatatctccaatgaatacttcatcctctccattgatcttctccttactctcctttgtcctcactaaaccccttgccacgaactgctccgacctctccttcaatttcttatacacaatttgtcctgtcacagtcaccatcaatattgaacagtgttcttatggaatttcacaataccacattgtagagataaagagagagaacctgttcttccaccggcaccggtaacgaggacggtgagaggttcagttgttgcggcggcggaaacggtaaccgatactcttctgttttttccggtgaacttacttggaccacaaatcgacgtagaatctgacacaagtgagcgaaattggagagacgacgaacgaggaactgagacaaaggaagaagctgcagctccggatttgtaagtgttagcaggaagtagtggatggaagaatgttgtcgtcgtcgtcgtcatcatcgccattgactggagtttgatagctcagacgaagaagacgagagagtgagaaatatcgcaaaatttccgattttcgccacgtcaccttatcttttgaattatatttgtctttttgtttcattctaattacgctttaaacgggcctgattttaaaatgggccatggcctatctcccacgaatgatcgaagaacatctaattaattgaagtcacatagttttactgcttgattcatatttggagaactacacaaatttttctgctgtgtatacaactcaatattttgaacgtcgagagaggtttctcaacactataagacggttgtttctgtatacgaaggcttctttacgtactctacaagcatcatagatacaaatcaagagaaatataacaccggttccttcctttttaaaatcaaaacagagtaggttggcgaccgactcttctcggtaaaccaaaggtttgataagatcggatctcaccacgaactgtatccgtcacaatcaccatgccccaagccgatggc

SEQ ID NO: 27240 - DNA, 573 bp, Arabidopsis thaliana landsberg
accgagcttcaacgcctccacacagatatccacgctctccttcttcatcgctttatccaacaggttctcgtaaaacagatctagctcatctgcacggaatcctcgtgaccgctcgagtgcctggggtccaagcaagttcgtgaccaggagcttcttcatgaacttccagtaatctccatagggagcagaggtgaagctgaaagatccagcaaaaagggaatcatcggtaggagggaatccacgagacgagatgttcacgtcgtgttccctgaagatctcataagcaatagatgctgaggagacgagggctacagggaaactgaagacgcgaagatagagaatagacccatacttggtggagagtgtctgtaaagatctgtggactagaacagagagaagaaggtgaagatgaccaatgatgggaagagtcggagggctcggaggtaaatcatagtgaagtcgaggttcctttggtttcctgaagaagagagagtaacagagaagtgagaagaggcttaagaggacaaaaaagaagcagttttaaagtcaacgatgttcattgctgccataatt

SEQ ID NO: 27241 - DNA, 1045 bp, Arabidopsis thaliana landsberg
  unsure (1)..(1045): unsure at all n locations
agcttcttagctacttgaccagaacattgagcttcaaggctctttaacttgagaatcgccgagtcaaccgcctttttatacgagtcagaagcgattcccgtcgggaagattttaccactgcaaaattcaatcaacggaaaataaatctttgattcttgaggattgagttacattaataatcaggggatcagttttaaccttcgatcgtagatattgaaacgagcattggtgtaatcggaaaagcaagtacggaggttaaaacgcgaggcaagttcccaaacgggattagactctttaccaccgacaccggcaatccaaccggcgccaagctccaccggcacgtcaccgaaattctgtttatgtattcttcctccgatccgatccgtcgcttccagtatcaatacatcttctactccgttctcgacgagaaccttcgccgccgatattcctgaatttcaaaacaaaattccgttagttattttataaagagcacgagtgttaatggatgttttgatccgaaccggagattccagnnnnnnnnnnnnnnnnngaggcggtagacattagagagagagcgaaaggtgtttgttagtttgttggttggggcgagaggagaaggagttggttcgttttcgtttcgtttggggtttatatatatagagagagagagaggaaggaggaggaattctacttctactcgaacttaaacacctgagaacgcgtgtatgtgacgcgctttgcgtacacggtacctgtgtcagggtttttggcatcaaacaaggctagtgacgataattgtttttctcaggtgtatatcttatcaggacgggcctgaatattctaaagcccaataaaagttatggcccactaaatgaaattattttaaagaaaatatttcaaacaagagatttggttgagaggtttttttttttttttatcgactggttgagaggttttttgtaccctctaatacgttttgagaaaactattgtcatttataaactttctaattaggatgagctgcgaagctgtttttttactcttg

SEQ ID NO: 27242 - DNA, 1311 bp, Arabidopsis thaliana landsberg
  unsure (1)..(1311): unsure at all n locations
gcgatatgatatctaccaaaacgctataaaataatgtttttgagttttgacagatgaggtaaaattaagaatgaaacttaccattgctgaaagtggagaaccatacattataatgtttagaccagcagatatgaaacctattgattgagaacgcatcttctcatcttcaaacgcacttctcgttgccacaatcgccgcgattggaaaaaacacgttcaacatcgctaccactaccactgttttcagctgtaagaacaaaaaaaaagatcacattgttgttaacatatatacaaagctcaattatttgaaccaacaactactttgtaaaatgtagaaatacattggaaactctactttacaagtcatcatcgtatttcttataacaagtggatcaaatattttaatcgacttgactttagggagaacaaaaaagaatcaattaaaagtgagacatagaaatctgataatcagatccaaatctgaataaaaatgaatcaaataaaatgcagattttgtaaccagctatcatataggaaacactaaagatcatgcataatagcatatatataaatcagaatatcataaaatagaataaattaaaaaccttgagatgtcgaggggcataaaagagaaaaagtgaaacgtagatggtttcaacaagagcaccaaagccattaacggtggagacaagatattctccgggagtgacgatnnnnnnnnnnnnnnnnnnnnnnnnnnnnnnnnnnnngcaaatgtacggcaagcttttgtactcctccgttgatctccgcttcactattttccaaaacgtctccctgatgatttttgtttggtatattaatatggaccgatcgattaataatctaagtaagaaagactatagattatacaattttgttacttcttgcaaggttagagagcttacactggtgagaggaaaactagtacggaaattacatttcctgcgtcaaacacatatatatatatgttatgtattggatcgtgcacttgtgtttatacatgtacagattatgagcacaacgtacacgttagagaagaagtgttacctatgactccgatatagaaacttgcctctgccattcttggagaaagagtttctgagagagagagaaagagacagagagacaaagagagaaaggaaagaggaggaggcttcttaattgggggaaacgtgacttgaagttttaataatgtttttattttatttgttcacactataatgattcaagtatgcaagtgtgtgtctattggtgtgaatggatagtattggatgaatgaatgacaagaaaa

SEQ ID NO: 27243 - DNA, 1889 bp, Arabidopsis thaliana landsberg
acaattagagaaaggggaaacatgcatggaacttaatgcatccactttaatattgaagcaatatctaccctttctgtaatttcgtaaactcatcactaaactagaaacatttttacatttacttctttcatatcacaaacatatcatgatatagttattatatatattctttttaacatgacacttaataggatgtttattttttacttttggcataactcagattaagttgttatagtttagtaaatagtattaaaacgaggtatattaataatttcaaataattttaaaatatgtcaaaactatttttctaggacacagaattaatggaaattttttcttttacattgggtccatttcgaaatcccaaaattgtttgaaaaaatgacaaaaatggttttgttatgtgatgagctcagatattatggagcgtgagatgctgagaacaacacgtaacaaacataaccaaagaaggaatggaaaataaatatttccaaccatttctgagatttgactttaccgtaaaagactgcccaataaaatgacattgggtccaaaatccaaataatgaaaccacgtgtttttttagatgcaataactcaacggtatcattgtgttacaaagcacctgtcaaactgtatttctaacccaaatgtagcatcacaatgtgtgagattacgttacataaataaagtttgttaattgttaaccataacacaaactctaagttcataattccggatattcaacaataatactgaatcttttcatgatatattctggttctgcgggaatcttatgcagtcgcggttcgccgagactgtgaacagtcccaagaagcaagtccaggtacacccaaaaagcctgacggttaatttgttagcatatggtcaagagccgtgataatggagcaaagagtacaaaagaagattaaatgatggcaaaagatttgcacgagggttaaggatacgactgaaaacgatttgacaggcttgctttgttggcctcacattgcaacttgcaaagaattgaaacatgagcatgaggtaacttaggttttagctattagatatctatgagaaggacattgagagacattaagggttaaacgtataaccactaatagaaaaagattctttctcacttcgtacatttctcttgactataacatatgcagtgccaaagtggtgcattgtactgttaactgttaaagataatgtttcctacagattactcgatgcgacaagaccttgctgtttccaccattcataggttcctaagctttctattatgacgtgttttgtccttccatatgtctatttacaaccataatcatcttttgtatacacaaagactgtggatatgtgtgtattaatggcccagtgaaacagagccaatcacgaaactttgcttggggaccactcttctatctttttaagggtgagaaacaggaattttatttactataggcccgccactagatgtaacctcctctttttgccagatcaaccaataaacatcttagtagtaagctcttcgctgtttgatatagtcctcagggatcgtatgcaatgaaatatcaaagttaaacaaaagttagattttagggagaaaaagcttatttaccacacatgttaaacaatttgaacccatttaagggtacatatgggaaatgttgtcaaacactactatagtggtgagatgcaaattataatactagaatatctcatgagaaatttgatgttctaaatataacataaaatggaatctaggcatgctctcttctaactaggcagtgtactagtctctcagaaatgatagcagaacactattatcagtaaagtgaatgacacaaaaacagcaaagatatcagtgtgtaacagaagata

SEQ ID NO: 27244 - DNA, 3321 bp, Arabidopsis thaliana landsberg
caaactcatgttctacattaatcactttttttttatctgtccatttgccgttgtttgcatagtttgttctactatcatcatctgatcttattaacatcaattacccaatttactctacaaatgctttatatgatatattcaaatgcaattcaacaaccaatataccattattattcatataagtcaaaagcctgaggttggtgttacatcgaattattccactactagtatatagcatttttatttaagtagtatcgatcacttgacccacataccccgaactttatttttataaatgaaacagatctgtataacattggttgatctatcgatctctctcacctattgctctcattatttgttaattcgaaccgattagtaaataagtaaaagttatagaatcttggtgttcataccactgtagagacgaaaaatctaatcataattaagttaaatatgctttatatacctatctctttattcattttttatagttgaatattatacattaacgaatcaatacaatgggtcgatcaataaaatgtgtctattatcaactttttgtgttacatgttacacaaacatatattaattattaattattttcggctgctatgtgatacaacactcaccattttgtacaatttttttttttgtttttttttttcattttttttttcattttgtacaattgttcaatcattatattgaaacgaaattaaactgagattcttttgttgttaatgagctctattgagtttgtgtttaagtaccacccgaagactttttgttaaattgcgtaggttaagactttagaccgtcaagaagttttgcctaataaaaatgacagccaaagaataaaaaagaccacttcctggttcctgcaactcgataggcgtagcgtaaatataataatttaaagtaatcaacaacatttgtttttgttttttgacatttaatcaacaagtttttgaagttccacgcataaacacagacgcataactataagaaacattaaaggaaaaaaaaagcagagctaagaagatgcaaaaaaaaagatctaaagaagatgccattgagacacctatatatagtgattatttcaaagacaaagagttaacgcaatcaagatcaggtgtttaaaacacaaatgatacaaaattatatactcgtatattgaaaaccatgatctttgagctttccatccaatttgcttgtgtaattaaacaaaccagaaagacactaactaaaaaaaataaacatgcatagcatatagaaaacatttagatagtaagatcgtattgtatacatctttttttttattcactgagaagtgagatcattatcacaataacaagaaacaaactaacgaatcaaatataatatgatgtaaaagtttctatgtaataaaatataaaatgagaaaaaagacaaagaatgcagaatccatgtgaaggaaagggagtggaagaagcccatctatattaaaacttactaaaagtactaatgatcgactacaatctcataattaaggttttgaccacctctaatctagcccttaaataatttatccttgtatgtatatgggctttatttgtatatttgttgttgggcttcgatgatacttaaagaatctgaagcacccaaaaagaaaaaaagagatttggtgaaactaatcaaattagtcagagacaccccagtacctccttcatcatcactctctctctttcgttacagttccctaatcaagcaagttgcatatcacgagctctctcaactctcaatccaatccatctctctctcacgcattttcgtttgtttcttcgttttcctcttttcagattcttctcttcgattcttcacattgataaaacttgtctatggtggttgttacgtcgattgagtagatgaagttcaccggaaaatcaaatttgacggctacattacccgcaactgtcccaaatatcagggctattcatagaaggagagcgcgaaaaccgagcttcactcgtcaacgaagatctggcgtgtctgtcaggaggctaagcaggccggagactcctcaattgaaatcgaaggtggaggatcaaaacattgagcgatgcggcggggttgaagatgatgataacgaggatgatgattgtaataagatgcgttgtcaggaacggagtaggagtgtacggcctgatactgttaggaaacttgttgccggagtgtggcgattgcgagtcccggatgcggtttctagcggcggagataagaggagcaaggatcggttacggtttcaggtacagctttgcttttgaaaaaatgagacatttataggatccgcattgtgatgaagtgaattgtatgaaagcaatcaaaagattataggattgctgattttgccttagctttgaatctaaagtatgagagcactggattggttttagctggttgttttaatagtaatgtcaaagtaatctgaaatagaaatgactgttgattccaggatcttcacactagttcataactgtttgctcatgtctctggaatctgtacactctgtttcttgtgtgatggatctgaattagttggctttagctactatctcagaggagtacatatgtcaaataaatttctctttattttctttgatgtttttctccaggaaactgctggtcctgctggaaacttgggtcctctgttttattatcaccaccatgatgacaaacattctggctttcaaagcaacaattcaagaaacaagcatagtggattcttgtgtaaggtttgttgataatctcaaacttctaggtgaagattatattatgtcaattcaattagatgtggatatgcttcaaaaagtcttatacatgttacttgagctactttattaagaaccataactgaaaatgttgtggttgagatgacggttctctgagtttagagttgttacttgagctagtaaatctgaccttggtctgtttaaccgtcttggtatgagtatgaaaatactgccttagcttcactatagttgttaacttgaacactttaagacattgacacgctgtacatttcgtggttggctattcctttttctgagtcctcttaaggctctttatttatgtgacagtttccgtttatcattacttttttctttttcttttgctgttagcatgagccttcagttccatttccccactgcgcgatggagggagcaacaaaatgggatcccatctgcttggatacaagggatgatgtacaccaaatctatagcaacgtgaagtggaataatcaacaagtgaatgatgtttcattagcttcttctattgaatt

SEQ ID NO: 27245 - DNA, 1042 bp, Arabidopsis thaliana landsberg
aatgtaagccgggacaattacttcttaaataccaaacaaaaagtttaaaataaaaacgcttatatatatatcatcattctcagatatttatgagcggctaaagtcaaaacactaagactagaggttttattgatttggggttaggagtgtgtatagagtgaatgattttcaatcatgtaatcccaattcataatggttgcattgaaattatttttgttatatgcataatttaaagaataaggaaattgatattaattacttccttttcaaaccagagcatgattaataaatcacgtttatttgtcaatgcgctggttcatatctgattttttaccaccgccaaatttggagtccattaacgtttttattttttatttctagtaaatgttaatttgctaagacccattcaaacccttcgcttctttgttgccctcacccttctacgtaaagaacttaaccgtttaaccaatactattcggctacgtgtgttccacttcacctctctttccgaacattcttggcattgttttcaacagccgcgttcaaaatgacaaatataaccctttactactaccattactagtctactgtactactagtagttgactcccaaagaattacataaaaaccatgcgcaaacggaggggctccacaattttccaatgtccaattctcacaaagtcaagtctaaaactgtatacagtatacattcctcttttatgacccgatgacctttcaaacacatatgatctcttgcttaaagcatgctttatataagatcaattgcatgtctttttcatctaaaaatcttaatctctattcatctctaacatcctctacatatataaccttttggttttggctgaaaaaaaggcaggaattgaatccaattaacattaagttatatacttgatcgggtcatcgcttcaccaacgtaactagctttataggtaaaaatacatacatatcggattgtaagcgcgagatcaagtgtgagagagaaatatgtagttggtgtgtcaaacacagagaacagagtgct

SEQ ID NO: 27246 - DNA, 1635 bp, Arabidopsis thaliana landsberg
gctttttgttatttcaaaccacaaccacttgcatctaacatgttaaatatcagtccctttaagatgtcaaatgatttgatttttgtttctttaactatttttttcttaggggataatatccaaatggttgtggttttccaaattgatttttgatattagtgtttccaaaaatacattttaaaattttatagtcggtcaagattttgataaaagccaaatattttaagacttttttaccaatttctcaataaatccaaaatccccaacttcaatgaatttttgagattttcttctacaagattgtcaaaaagataatattcgaatggttgtggtttaaaaaaatggatttttgatattagtttttccaaaaatacatttaaaatttttatagtcgatcaagattttgataaaagccaaatattttaagattttgataacaattttctcaataaatccaaaatcccccacttcaatgagtttttgagattttcttctacaagattgtcaaaaagatacattttataagttttctatgcaatttttattagttgttgatgatgaattataaactttaattttttttaatataatgggtttagagttatagaaataatcacaaaatggtacatttataatgagcttttaatatgttatgtgaacagcttaaaatttggatttattagaaagagtaataattattctcttcaagaaaaccaagaagcagagcaaacaaaaaacatcaaaaatatttcatagtcttcaaattaaaattgatgcttgaaaacaaacttaaaaatgatatttgtcagttaaatacgcgacagtcgcgacggatgtttccatgctggctggttttgatgccaacgcggccgagttttaatttttcatggagatgacaaaggcgcggttgaaggcaagtgagtcgttagcccaagcatcaacgaatggtctgctgcggttgtcggtgaagagaacctggtcagaggtgaagagtcgtttgccgtgtacgtgttgcagatttttaaagtagatgttgtgaaacttcctggggcttaccgggtcaatgttaatgatgactttcttgggtcaactttcttgggacaagccaattaaagttcttttgcgtaggctttgtttagagtagggtcaactaggtgagtacggttaatagtctattcaagactattatagtagaagtagtaatgatcgttatgtttaaaataaaatttcaacatcgctcggattatgtttcatcgagccatgttcttgtaatggcagactagttcgttggttcctcttttttttcttgcttgtttcttaaacatacaaaaatttagcatgacaaatcttttctttccaaacttgaatacaaaaggtggtagtaaaatactgtatagttctttgaaactaaggatcataaccctatcggccaataatatgattgttgccactgttccaacatggtattgatggccataattctggattatttcctgacataaagggattatggggctccttttttcaggaaggattttgtaagcccccttttttccaaaaaccctaagcgatttggaaaattatcttttttttttcatgataaaagcccttttttgctctttattgataggttcc

SEQ ID NO: 27247 - DNA, 3633 bp, Arabidopsis thaliana landsberg
aatatcaacgacagaactttgtttaggaatggagctgaaaggtttactcatttcttgtcgcaatcactacaagaatttcggccattggtagcagatgattgtagcactaattcactaactgctagtaaaagtgataaaatcggatggcaactatattgtagcattaatttagtgctgagaaagaatttcattaagcggcaacccaaaaatcattacgataaaagaaaaatcactgtggaggcaaaaaacttagccaaaaatttggtttttttgccactctcttcacacttagacaaaagcattcctcacttagacaaaatagacaaaacacttcgtcgacgataccataaatttcgtttcgggtcactgatataggtcaaattgcattaagaccactctgtcaaataagagatcgattgtagcacttaagggtcgaattttacaaagttcttggatcaaacaatagatcaagattttgaattaagctaagtaaaatagtaatgaaaaagaaaaaatagacgaaaataatagcaaattgtgaggttgtaagacaagaaagtaaaaacgtcatgcttagggtactttcaagaaactattggttagtagatctaataatagctaggttgttatcgaaccattcttaaactcaaactctaattatagaataatcggtggtgttccgcaaaactccatatgcctatagctaagaataactggagaagccgaaagatctttaacctaaacatgcattcttaacgagttcgattgttcaccttagtagctaggccgattcttattacgcacctaaataccaagctcatcaaataatagattcaactacagatacctatggcgggcatatctattgtctagattcaagatctagttaattactctagatctagcattaagcataattaaagatgaagaattctacagaaaacctagcaaaaggggcaatctactaaaccatatgaatccctaatgagaaaccctattcctaacaagcagattactcagacatattggatgaagcaaacaacatatttgagtatgaaacaaaaacacagtgatataaccctatttttactggtttttgctatgatttaggtataggttttagagtctaatttttatttctagagtcttttctagtctttttcaggtctttacatgttgggatgcaattggagattatggagcattctatagcaaaacagacaacttaaactacataagcaatctggagacgaaatttcacgtaggtgtcgatcgacaccacccctagtgtcgagcgacaccaatatctgacaggaattcaattacgcaacttattgaagttttgaagatttccaaatttgccccagaacttctctttattttcaaagaagtccctgcacgttttatgaacttatatatggatttttaaaatcattgtttagacctaacacttattatctattctatttttgggaacaaaaccctgtggagcttcttctagagaagatctttctaaactctatactcatcttgtttcttacattgatttctacgttaatcatgttttgttccttgataatcatgtctgagtagttctattgatgggtttagggattctcaattagggatttggttgaattagtaaatcaaaaaccctgttaggataatatatttagaattcttcatgattgttcttaatgttagttttagagtaactaactagaacttgattttaggataataggtatacccaccataggtatctattactggaactatcttagatgagcctagtatttagatgcgtgctagcgtccattacttaggtgaacttatcaaacctgattataatgcttgcttagttctagggatttagaagagagttggaatcaatactattaagcatagtgagtagcacggcacaccaccggttactttatattagtgatttgtgttctagaatggttcaataatattcctaatttactactaaatctactattctgatatctctagagaatttccctaaacccgacatcttaatcatctgaatctaaaacaaacttttaattaatttcttgtcttttacttttataatattttatgtttagctttattcgaaactgttagtctattgtgtgatccgagaactttgtgaaatccgatccctaaatgctatagcaatctctttatttgagagagtagtcattaggataatttgactcatatcagcattccatcgcttgattgaactttcaacatgttaatctatttggtctctttatttcttctaatttgcaagtctcaatttcaatttgcaagtaaattggtaagttattagaaagtaaatcttattgttttcaaaatttctaacgttttacaagtctcgataagtatttgcatgtagatttcatgggttcttttaggcctgggctcctgttgttgatttccctgaagcttttctgatgtcatatctcatcttgatacctttttcaaggtttagatcaaattttccattcctgacatctatgactgttctagctgaagctaagaatggtctacctaggattcggagatccttgccttcttcatctacgtccaataccacaaaatctgtaggtatctcgacatttccaatcttgacaggcagattttctattagaccatgaggatgtgcaacagaaccattagctaagagtaaagctaagttgtagaacttgtatttcatgatccctagccttttagctttagagagaggcataaggctaacagatgctcccaaatcacaaaggcacatattgaatgtcaatggtcctagagggcatggcagagtgaataaaccaggatcatcaagcttttcttggataactttcttcttgtacgtttcttgagtgatgactctactaatcatctcttgattctgatctttcttgagtttttcaattttgagcttttttccataatggtgagtattcagcaaaggtgtgtgctctatagtccagatgaattgctgggtggcaggtgcaacaatttgagttgaatccccccttcttgaatcttgaatcatacaatcctcagtattgggagtctgatgacttggtggaaactcatcttcttggtggatggtgatagcattagcagtagcatagtccttaggatcctggactgctttttctggaagttgttgaggatgcttcggagcagaggttggtgcaaattgactctccacatacttgattttggaattcagagcttcaaacttgacagttagatcgttgtaacaacaatcaatcttattgtgtaattcagctatcttcttgtcaaaagccatagctccagtagcttgtccttgaatgatttgttgaatgagttgcttaatttcaggatcttgagctgttggggattgttgtggttgttgagtgaaccctggtggtggattctgctggttctagcatccattaaattgttgtttagggatataaccttggttgtactgaacaaatggcttagactgattctgttgtggtggatacacttgatcttgggggttacttacattattgcttttgtaggagaaaataaggttgggcttgtagttattgtagcccatgttgaaccctccttggttctaat

SEQ ID NO: 27248 - DNA, 1299 bp, Arabidopsis thaliana landsberg
ataacccgatccatcaaatcttatcctagatccgaatagaatcaaaccgggtaatatccaacccaaatgaattaaaaggaattaaagctcaaaatctcctacaaaaatgtatatgtagatttttcagaatttcaaaaaaaagaattttgtaacaaataataaatatacatatatggtatgttttgacaaagctttaactaacaacggtatgaaacaacaattacacatccaaaggacccaatttttgtaccccaacatctacaacaatgacacttaacaaacatcatgaaacaaaatgcctggaccgttacaacagtagtaagagatgcgagctacattaacctaggagagtcattgttggctacaggagtggttgtagcagagctactagcttctgagttgtatcgggtcgtaccttgagaagtcctcttggtccttacaagagggttactttcctcctcatcgactacccgtggtcggtcaaaatcattgcctttaaaaaccggatgcacgtaagcatctttcagatattccttgaggtttagattcggttcagttgctttttctagtgtatccttcaccattgcttcctgttaaatatattcaatcccaaaaaatcagttgaaacatttgtatacaagtcttttttttgcagcaagagcttttgactcatcacctgtaaaggaaattttgagaaggccgattcaaaccgtcctgcgcagtatctgtaaaaccaaaaggttaagataggctgagggagaagcagagctgttacttttgcaaatttctttgtgctgagcagacccatcatcagaagctgtgatattattagacatatgatcaaacgtctatgcacgtcaggccagtatctagccccgctctcatatttctggtcgtagacattaataaccttgcagcagtagataagacatattaacattattgcatatattgcaggtatgctttagaagaacactatgatatttttagcttttaaggtacctgatgccgaaaaacaacgtatgcgaaagcaaagaagacgataatgaatggaaggagaattggcgcaacagcagcgtatacgaggcctagcaagaaatagaactgaatccgtggttcagatgttgcaaagtccagatgacctggatccattgcttgctgcctgtcttgttctgtcttaaccaaaaacgtgtttttcaggtgaaagatgactaatggaaccactctgagtatctcagctgcaatgccagcccaaccatcgaccatgatatatgtgatgaaaaatgtggccttcattgg

SEQ ID NO: 27249 - DNA, 1008 bp, Arabidopsis thaliana landsberg
ttcatggtcgaatttgcaacacagaagactagtaatcactaacaaaatgacttctttttgaaaatgcaagttcagattcaataatcagaatattccctagacaaatgcaaccacaacagaacataataaaactgaacaggctagcctagctgaatcctatggagcgcaaggattttactagtctaaggcttcaatgcagtaaaaagactgacaaacttttacgaaataaaggtaagctatagacaattacctgtgaaagtgacagccatcaatcctaaccacgacccaagttaaaggtaacaatttgttctcaaactgaaacgacctaataaaatctggttcaatttttccaatgtctttcgtgaagtggccaagatcattatatagagagggctgctcattccaaaagcttcttcctgcaatattctctgaatgtacaaaaacagcctttctcctcaatctttttacaggattgccattttcgtcatgctttacagtttcttccacctgaatcaagttaaatgaaagtgtgttattggaaatttacaataagtcttagctacatagcatcacgcaaatttatgatgaacatcaagaagagcagctagatacatcagttttaaacctaaacatcaactaagctgaagtaatagtcttctacacattgctagattttactagggttcagacaattcaaacttacaaattacaatgcataagcctaaacgtacatgtgcatcaacaatattgtcaacaaactcaggttactaacattcttagagactcaacttaaaaatggaagtctatatacatacacaacacatagcaaagcaagtgctctgtatataatttctaacaaaagatataaattatcacctttttcttgaaaagacaagatccttggcgaaacaattcaggaagcgtcttgtaattgataccaaatttctgaaagagaagctcatttttctgctgtttttgtgtatcctgcaggcatccaatggaaataga

SEQ ID NO: 27250 - DNA, 1344 bp, Arabidopsis thaliana landsberg
gttcaataaagtaatatggaaaatcgctctattaaatttccatcctctattctatttttaacacaaaattttaactatcttatatattgaaaattaaaataatatccgatataacttttctattttgaggattgatgcacttttacataatggatgacataactgaattattaaagttagtcaattattacatgaataaaaaacttgactatagagctaaccattgcatttgtttttaggtgaataagcttaggctataagcctataaccatataaatatcgatcaggaatggacttcatagttgcacaccggcagctaactggttctaactggttaggattgtgtataaatcaatttcgggatttatgaaacaaatggtaagtccacaaaacaaatgattatgctctttttatttgggaaaatttgacttgatttgatgtggaaaatataaacatgacagtccagaccctttgccaaaaaaaaaagacagtccagaccataatgggctttttaataggcccaaagcgaggtgacccggaacacctactggtccagtcgctttagagtactgaaaattgttggcgccaaggaagaagaggtgatcttcagagctgagcaattagatcttctatatcaagatttgaggtagtatttatatttcaaattcccaattgcgctctactaaaactctaattcatgcagtttcgtttgattctcgtataaatttctcaaatcaatttcacctaattttcactgggcttagttgattaagtcgaaacttggaacattaatttaaccacattgatcctgcttgtctttctcgtttagtttctcgattctagaatgatttttgtgtttgttgacacatctaggggttttgaacatgtagaattcatttggaaaccatgggactttggtctgatgcagtattttttagtttagcctttcttcttacactggactgattagttccgtctctcgaaatattccaaaggttgtctatttaagggcagatctagtacaattactgctctctctttcagtgtgaaatgattggtttttggtctcttaatggtacagaatctgcaacctcaatttggtagaatagatgttgatatttgacagcaccaacactggttcttaatttatcgtaccattttttactttctatgatgattagcactatattttaaaccacccatttttctatgtttggttgctaatcatctgatttgactataggggtggcttcatgctcagattccattttactttatgccatttgttctaggtgtagcctataaacttcattttcggtggatgaattatatcaaagccttttt

SEQ ID NO: 27251 - DNA, 1441 bp, Arabidopsis thaliana landsberg
aaaaccgaaaacaatcgcagccggttctgacctcggcatctgcattccccatttcggttataccgtcatcatcatgtggatgaagggattcgtagtgctttggtgttacccggttcaatgttctcatccggtttaaccggttacagatcctccaatctcggtttcattgttttggaaaacttattctcaaccgggccaatgatgacagagcatcatcctattcaagagagtaactacaacaattcaacattctttggaaatgggaatctgaattggggattaacaatggaggaaaatcaaaatccattcacaatatcgaatcattcgttacagaaccattcaaattcgtccttatacagtgatattaaaatcagaggccaatttttttggcacagaggcttcaaatgttggtatgtggccatgttaccagctccaccctcagcaacatgcatatggccatatataaatcttcttgtatattataaggtgtggaatctttttttttttctcaaatatggatttttttaaaaaatgggttgtgtatatagtttgtgttatatacttatatatcatttaatttaacagtattggtttttacatttttttgttttcatattcgatgtaccttgtgaaccacagatttatggactcggggattttgtttctctattgttaacggcttacgacatttgtttctcaagttttgttcattttctatacacattacatcaaaatttattaaacatatatacaaatactatatatgaaagaatgttacttaaaatgatacgataaaatttcattttttgccaaaataaaaaataaacgatatgataaaccttttgttttaacaaattaagttttggacttcgtagtctctaatatcaaaatctatatactgacatctaactaattttatttttattttatcatatagtgtactcttttatagtcctcctggtttgatattttcacataaattttaaaaaactaaactgaatattcaaaatttaccatacaataaataatttgactcttgaaatttaattaatttttaccaagaaaaaaagaaagattttctcaaagatccaaaacgttaaattatattctaagtggagaatttttgtaaaacgaaaaaacccaacatagcataaatctctacataaatcataaggcttggcccgcactgcatcatttccgcactctttgacaaatatgtggataatttctctattcaattttaaaactacaaatgtaaccatgtaggcagagatggagatgcataataaatgatatatatgtttagtaatttttttcttaaaagatatactatatgttttgttaagatataaaaatcgtacccaagataaagtaaatatttctattaatatttgagcaaggtttcaaaatacactagaataaattagtgtcgactatatct

SEQ ID NO: 27252 - DNA, 842 bp, Arabidopsis thaliana landsberg
cggatttgccatggcgattaggagcaatagtcttcctcttctgttggcccttgaactgattgctcttatgcgtcatctctggatcgtcgtttctagctagggttttctcttctgtcgaagggtttttgttgtaatagaagaagaagaagaacaacaatcaaaagcctatataatgggctcttaaggcctttatttatatgggctgattaattattgggcccaatttggagttttctaaattcaactctgctaaatttttgggaggcagaagattttgttccgaggaagacacggatacgcagaaagcggtaaaatcctccttcttcgtcgtccttgtaaaaaccctttctcatttttggaaggttctttcaaaatcctttcttcgattgctttcggattctcgctcgcttcttcgatttttggttttgattcatggtgaatgtgtttcctccgctaaggttaaacgctcttcttcttcatgacagtactttcagtgacgtcatgacgctgcatctgtatcatcactcccgttttctatggaggaatctctgttttcctcggagtgttggaaacttgtgtaatcggaactgttctctcatctctccttcccttgcacgctctgcgaaggtgatacttgtacttgtatcgttcaattctgagctatttagatgtggtttttactcttgttatgtagtctacatctgaatcatggctctgattagtttgatatacagattttctgaatcaattgaatgtttctttcgcgacatttctgtttactataaactcaaaattgatctctgaaggatacttattacttcgttctaatgttaaaataaaca

SEQ ID NO: 27253 - DNA, 1421 bp, Arabidopsis thaliana landsberg
agaatagtatgtcgagattgtctattttcacaagctccttgtacgtcacgaagacaaaacagccataaagaatcagccagattcgtgtatactagaggaggacccgtttggcacgttttaagaatgttagctgtatatttgttgatattatattaagaatcaccaggcatctgaatattggtcgtgataatatggatttatgaaagaaaaaagagtaatatgtaaacattggcatgtgtatgggttgagtttttcttaggaattgtgttttagtatttgattaaaaggtgagttgtatattactatattggactgatatagttatcgtgtagttttgaaaatatataaagtttagaaaacatatacctagtgaatcttaagaaatataaattagtttagaaacctatcatttggaagccataaacctaccgccatgatttcgtggcagcttttggaggattgtctagattagttgctatgctgtcatggcacaacctaaacccgcaataccttctcttagaaggggaaaaaaatacattgttacaaatttgtagtatataaaggttaaaaatacaccaaaatgttaaaatactagataaccaacaacaacaaaatcttgaaccttgtgtaaatgtgtgcttggttttatttgcaagagtaaataaatttaaagtatcttacttattgcaaactatttaaattttcataagaattggtgacgtgagcgactgctcaaagatcaacaaaatgttttaactctttgttttttctaatccattaatcttcctacaaaatccaagaatctgagatgtgaaagtggctataatcagaaaaatgtttttgagtaaaaatcagtatatcaccaataaatagaacaacttgttgaacaattgaaataagatgcctttgtagtgtctttatagacttgtttaaatatatcctctccaacaacgtagactctggtcctattttcatcatccacgtcaatatcagaacacactgccactttattctcctcatccaacaagaaacttgccacattcaccacgctcggtaaattaaacttatcataatccactgttaagacgaagttgctccacgacaattctatggtttcatcaatcttattggtcaaccatatcttcatctcatttgaaaattcaagaatcttttgatgtaacactgagagtttttcttccctaacaactgatagagaagcagtatcttcacgattaaaactcttaaacggaagaggaaaatgcccaaatctctcccttgtgaaatcaaaatacaacatgaacatgcccatttctttatctccagcaacccagtaagtgtttcttttcaagggcccgccacttgaaaatacaccatagtcatgagtgaagtaatcaagaaccctccaagtatcagagccaaac

SEQ ID NO: 27254 - DNA, 1734 bp, Arabidopsis thaliana landsberg
  unsure (1)..(1734): unsure at all n locations
taattaatgagtagttttattcacaaaattatcaactggggtgtgtagctaggccctcacaattaatgtatgatgcatcagatttatctagaattgtcttactgcccctccaaatcgatatcatatcaagttgtattaaaaaagaacatgcatctcaagattagtttaattcattatatttaaagtagttcaacctaagtgactaaatcacaatcaacccctaacgtaactaagtctacaaattaaaccaacagtcaactacatctttttttttttgggttgtaagtttaaatttactaatcaacaaaataaatgattatataaaaaagaactacaatttaatatttatgatcagcatattttttctaatgaatttttaaatagttgaatgaccaaatttcgatatatctaccaacatcgtcaatggatgattttttttataactaattttcagtgttttatttctaacttttactctatgtttttacggtaagattagaagtgtcaagacttggatattattttgctttttattagaattagtaaatataaggaaaacagaaagctaaattttttttttaaaaagctaactcggtatttcttcttcatttttgtaacagaaaaaccccacaaaatttgtaactatgcaaagtccgagtggaaatataatttgagcttaggatcattaaatccctatatagttaattagtactaaaaggaattatagaaaagaaaatgactcagttaataggaccactctagaggaagaataaatagtttaggtgttaatggagggatatattctagaattagaactgtcacattgggaagcggctcttcttgctaatgtattttagaatcattcacaagaaacaagaactaaataattctctaaactaaacatttaatcaaaattttagaagacaaaaaaagaagaagaagagagancagacatctttgggcacctcggagaaaaataagcatgtgagactcgatgcacatcattaaatgctttgagatgacatggaagattcggttctcggtatttgctcttttgtttctattttattttcttacccaaagaaaaaaataaaatctttggaaacggtgggggaggagacaagaagcaatgtttgactgagttcagttaaaatttattgaagtctcttttgtgttgaagagttgggacaaaaaaaaaaaaaactttaaagacctgagggtttggtttttgcttaaactttagttgaatgagtgaaagaaatgagtttctgtttatgtcggaatttaataagtctgtaagattctgtaagaaacaaaaagaagcaatctgaaacatcagagcttcgtgctaatccgtagacttggactctagctcttgccgcctcgtcttttcttattttacaggtttaactctaccttcgatatcaattagcatatgatggattatcactttctgtcagtaaaaacttgtatatcgttagaaaaaacactaataaatgtaatatttggcgatacaaaattagattgtataggattttgtttttcttttttttcaaaaataaactatttattagaatttccaacttagactatatagtttcataatcaaatttacgattactttttgttttccatatgaatatgattatatatttaagatgttaaagaagactaaatttttcattatttccggcttggatataaatagggtaccattagatatgtgttatcttg

SEQ ID NO: 27255 - DNA, 1326 bp, Arabidopsis thaliana landsberg
  unsure (1)..(1326): unsure at all n locations
tgtgtactaacgttgtaatttggattcaggaattcaccgagtattcgaatttcgagaaatgtttggagtacctgaaggatcgtatgatcaaggcttggtcctttcgatggtctcattgggttttcccaggtaagttttctacatttgaaattgcatcacaagagtctgatttgtgacctctctttgaaaaactctaaatttgattttgcagggtccaatttagtctgggggtttaccaggacagcaagctaaggtacgtcaatactaatgccactatagtattcatgatcagatttattaccaattcgggtttctgatttcattttcaactttgtgccagggaaggtgcatttcagagagtaccaaagattaagtttgttataatcattggagtagaaaagcccaaatccgccatattggccgacaatgcaaattcgtcttccttggaaactctagaacaactctttttaggtacattctgcaaaagctgatttgaaaattcttcaaaaccttgttcattgatgatcgagaatctgataaatggcttgtttgttgcaggagagactgattttctgaaaccttacggaactcagctgatagaatcgtacaagaatccggtggttgtccatcatcccaaaggccatactgtcccaaggcttgatgagaaaagcttggagannnnnnnnnnnnnnnnnnntaccttagagcatctggtgatggaggaagacaagaatggtgaagaaaatactagtaagccaacaaaatagataagcttaaaatgttatgtataacgaataattctttggataataatcgtgcaatgactgtaaataaatctggcaatgtttgcgaaaaaacaattattacaacacaaacaataatagacgattctttcgttcattttcatacattgtcttcctttgagctataatactcttcttggtgtatataacgaatccaaagaagagtgaaaatggcaaaacaaatcatgcagtgtacctgaagcacttacagtttacaaacacattatcttctgcttgctagttttgcttttccccaatcatggcctcatttgcaccaaagtttttctcataaaattgttacaaactttggagcatccttccttgggccatcaagggatcgatacaagtacaatgtctcaacataatccccagtaacagtgtcttcgtcatcatcaccatcggctccaaatacttccacgactacattaggcagagcatgagaaacatccctgcagcctcctcgggatatgacacatgacgacaaccaaacaaacctcatattggaataccgatgcatacccga

SEQ ID NO: 27256 - DNA, 887 bp, Arabidopsis thaliana landsberg
agttgagcatttgttcaaaacattaatttgttaagtttgcttatccaaatgatcaagtttcagtttgataagccaatgtagtcaataattaaaatggttgaattagatattatcatactctatatttagttacttattcaaatgcgttcaattatttttgtattctatgaatcatgtaaaaagtagtgaaaaatgtatatagattagcttttgagcgttgagaatattctgaaaaaggaacatgaatgtcgatcggttctcgagtttcatcacgtacgagaacgaaatcatttactaatcgaatgtttttccaaatttgtctaaaatgtagtgagaaatgtcatttaattgttttctgcagtttatgtaccagaatacacaatttgcttaatgtataaaataatttgctactaacagtaattttaaaaaaaaaaactagacttaaactcatgatccatatttttgcccgtagtgaaaattcatcaacatgaatggctctagcaaaaaaaaaaatgtcggcgagacttgtaatcgaatagttgattaagtttttgaagacattgttctttttaaagtgtggaggaggaggaggatatagagtgatgatgcaaatacttcccatgtgcattgattgtcaacacattttgtaccagccaaaatttcaacatagggtctgattgttagatatgaatgaatacactactattctaaaaacgttttatgaatttaagaaaattatatgtgtagaatttattgaaagattggactcgagcacatggttcggtggtcccaaaatcaaacctctatgggccagtgtcggctcagttctcctattctattgcttttggtggggctattccttttctctttttcctgcaaaacaattt

SEQ ID NO: 27257 - DNA, 1176 bp, Arabidopsis thaliana landsberg
  unsure (1)..(1176): unsure at all n locations
aattacatttgaagagtggttttattgcatattaatttgactttttatgattaatctgcattttttgtggaaggtaattaaaagttcaaaatttggcgatttggagggttttgtgtgtggagttatttccttgctaattataggttggtaaatgtatataatttacagaacaaagttaaagaaagaaagaaaaaaaaaaaattaagattagtctagcaagaccatgaatattgattgtttactttttattttttttcaagagaagaagacgcagcccaataccaaattgatattatatggacaaggaaactaatctgatccagagttataaactaaattaatctatttgtagacgaaacccaaagtgataaactaaataggcccaagagatttgaaattgacataggtgttgcacgtggacttcacgaatattcggcaactctaatcattgtacatagggacctgaaaccaagtaacgtcttgtttaatcgtgttatttaaatatgcagtggctacatgtctccggaatactcgaaagaggggacatacttggtcaagtcagatgtttacagtttcggtaagctacgtaagttgattcgattttagagtccatcttcttctgttatagtcaaaagctattagagaaaaacattactatataacttttactaacaactgcaggcttggaagaaatggagcgtgcagttgataaccaaacatctaattaaccaaggttctttgtatacaatcatcaagaaacaacaatacgaccagctccattgttgtcattgttttcaccgtcttcgtcatcgtcatctaatatcccatcaaagaacgggtcgcagaggagctcagctgcagaaggtctagctctcggctgcgcgatgcatttttcaataaatgccttagcttctggatcattaactttgttgagagcctctggtttgaggcctttgctcacccttttgtatattttggcgacgctgtcacattcgctataaggaatctcgagtgacacaagctccaaaacgcacattccatacgagtatatgtcaaccatctcagtgtagttctcctcgtacagctcaggagccatgaactctggtgtcccgaggatcgagtgagctaaatggttcttccccacaattgcagctanacctagatcaccaatcttga

SEQ ID NO: 27258 - DNA, 702 bp, Arabidopsis thaliana landsberg
taaaccctcattgggaaaatcaaactttgttaaagcattttttccatttgcaaacaaagacaaaaattgctgtttcaaaacccattagaaaagatgatttagcgtgtgctttagttcatattaccactttatttgccccagtcaccaccttctcctttcgtttttacatttttacctttgtcatcgattagtattcgtttttcaaaaaaggtcttattatagcaaattatctttgcagagcttttaacgaaattacatagctgccaaaagatattaaacacatggtcatcaaatattcataatttcttcagaaaattactattgttgaagtatcatcgtcacatataattccttatattagccaaatttattttatcaaataactatttatttcaaatatatatctttagtgtgttatagatgtcaatttttctatcaacaacttctcacctttttaactttgctgtaaattttcccctataaaataagcaccaagaagacgatgagaagatcataaaatcttgtttgtgtctttgttgtactagaaagaaaatggaaggtggcgctgaggatctgagtgctgaggtataagattgatatactaaaatttcatgacatgttgtttttgtattgttatcatatccctatagtttatcaactaatgtttttacattttgtttctttgtagattgttggtctatt

SEQ ID NO: 27259 - DNA, 1890 bp, Arabidopsis thaliana landsberg
atgtaaaaactaaatgtgaataaagcatgtaaagataaagagtggcaaattttggattatcttatgacacctacttttgtcgaaaatcgttttcttacatttcatatgtttcgtgtttttttttcacaccgcaaatatgcaatcagaataataatcatgttttagacgatgctgccagtctataccgaactcaaaaggaaccaaaagttacatggttcacgttaatcaacgttttataaagtatatttttcgttctgacaatttaattttccgaaccaggttcatgttttaatttgactggtccaatagcagtccgatattataaacttaaataatgaacacgttaaagagtatgaaataatttcacgtatgttcaaattttcataatagtgatttatccataatcggatctgtaaaactcaaaaatagacgatctggttaattttcataagtgatcatatgattagtcaaatgtatttaataaagtacgaaaatacaccgacgacccacgcatgtatcagtccgcacaacacttatgcatacacacgtacatattacacccagtggtgatgacacatgtgtttcttcaacacttctgtctcgatggtgacctatgcagcccgctacacgaaataaaaagaatagggtttcctttaaccatattcaaaaaaataaaaatatgtttgttaaaaatatgtttacatatatggtattggtagcttaattgtatgtttattagctgataattcaaaagatgaaagtttttaagataactaatttgcatgtcagatttaatatgtttatagataacaaatgcacaattttttttttttttttttttttttctgtgatgcatatagctagcctagaatcatatttcatatgtcatagttttgaatatatatgtttgtaccaataagtgatttccaaaaaaggtttaaccagaacaattaaagtactaaagttgtctgttgttgatagtagaatgatattttgtaatatgttaaattttctaattacatatgatgattgaccatgacgtaaccgatgacaattatttttgtcataatacgatatcttaagcaaatcgattttttttgaaaataatttatattttaagtacgtctagtaaatttcactatcttgttttcttaatgtaaaatttcagtatattttagatatgttgtttttattagtagcgtttgttgttcctaaccagtatgttttcatatatttaagtggaaccatccttaaaaccaaaaagacacgtggccgtaacctataatcttacttttattagtaaagaaacaaatatgtagagtatatttataaggctgcggtggcttcttcataaggctgtgcccatatgaccggtcctgttgtcaattatgtatttgtatgtgtatgaagtttaagacaatggaccacgcgtgaatgggattgatagacatgtggtaactaccttcaccaaaccatcttttcataaagaaagatcgacattttgtactttcggttaccacagtataagtgtataacatcagtttttttttgccgatcatattcatggcgcctatgttagaaaacccttttccaaaaaatattcatggtgatgatgatgctatagtttaattaaaatgttcaccatgtaagctgacgaatcatgatttgattaattttggcccaacacttctccattaaaaccaaataacagaaaaacctaggaatagattgaataactggtcttcatcttctaaaaaaaataaaatgaatattcggcatctaagattcttagaaatctattttttcaacggttattctaaacaaaattttatgtcagaagatcaactttttaacgagtagagctcatcacaaacatcaaaacaatgccag

SEQ ID NO: 27260 - DNA, 1602 bp, Arabidopsis thaliana landsberg
  unsure (1)..(1602): unsure at all n locations
aaatgtttgatgtttaaattaattgccatgtctctctgtctctctcggtatctctctctctcttcttccccgcgtggatttcacattttctcttttaagacagctttgaatctacagacaacttcatttttaccaaaatttctgtttcttcaaaggattgaactttcatatttctctcttgcccagttctgagttattgcaatcagaagttgtaaacacttttcctgtctctttctgctacccgaatttatcttctttagcgtctgtctctttcagcggacgtgtcttgtctctttaaggtaatttcaagacttaaacttgaagtatctctggccttcttctgctgtctgtttcatttttgaaatcgatttggagattagatctgactcagcttcgactaaaagccattgctttcgcctttggattgttgattccctagtggatgttctttatctctttaaaaaggtcctctcttttaaatcaatttttgctgaacttgcccaattcggaaactttgttgcaagtctcctcttggtctctggtaatcgttttcgcatcaatccttatattgatttgaatctgtaatcagattcgatctttgatgctaatttggtattctatagaagacaacatatctgaattgggtttcttcgttggataggataagtggttagggaatgagaaaattgtataggaagctggtttcattcagagacccatttgctagggtcaagagacatgttagttcacattcagggtttagagctttcagcgacagaaaatggttgttcccttttctagctagcttgatcatgtccattactcttctgattttgttaatttctggccaattcgacaacttctttggggaagaagatcaattaccagttgatgttgtttcagagtctaatgactactttgtagaatcagatttcaagcaatctatgaattcgnnnnnnnnnnnnnnnnnnnnnnntcctagattagcttatttaatatcggggacgaaaggtgatagtcttaggatgatgaggactttgcaagctgtgtatcatccaagaaatcagtatgttctgcatttggatcttgaagctcctcctaaggaaaggcttgagcttgcaatgtctgtgaagagtgatcaaactttccgtgaagttgagaacgttcgtgttatgtctcagtctaatttggttacttataaaggccctacaatgattgcttgtacgcttcaggccgtggcgattttgcttaaagaaagcttggattgggattggttcatcaatcttagtgcctcggattatcctcttgtgacacaagatggttagtgatcttgttttgaagttgcatgttttggtctttgatacttattagtgaccttttttggttcttcctgattctgcagatatgctgtatgtttttgctaatttgtctcgggatgttaatttcattgaacatatgaagctcaccgggtggaaactgtaagtagtaaccgctaaagtagcaactcattatcctgaaatagtgaataagatgtgcttctcatggtcttttgcaggaaccaaagggcccaatcaatcatttgtgatcccgtctttacctatc

SEQ ID NO: 27261 - DNA, 984 bp, Arabidopsis thaliana landsberg
attctttcaccagctgtgaatgatgattcgctaacagagttatctataaaagatcttcaggtgttaatggtttgcataaatagggttccaccaaggaatgtccatatcattcacatttgtcatcagctaattgcgtagaatgtgtaataaatatcctaccattagaagaggatctatccagctgaagaagaacagatttaggctctttttgaggggatggagcttcgattactgtcaaaagagaattggtatcagaatcattgaacatattcttacaaacgaaatccaacgtatccaaaattcgcttctttacttgcctcttttgcactttctccactcatcaagcagtaccctgatgagtagatcaggccagatacctttaatttccccggtaagggaatttttgcatttctcatacgaaacctgcgataagcaggaggtaaataatcaagagagggagaggggaaagagaaacagtggcaaaccaaaaaaacatcttgaaagcaacatacattcagcatcttgagatgtttacgattaaattctgcctcactataaggaagcaattggcgtaaaagccatcctccatcccataatgtttctgcagatatgttttctcggcagagaagagtgaccaatgtatccaccacctacaccatatttgtaattaaattaagacaagaacttttgcactgttatgaaaaagaaccaatctttagcatttggaatttcagaagaagctaggctagtaggtcaggtttacaaacattcatatttacctgatgtctatgtacacgggggcaccttgcagccccaggcaatgaacagcacactccaaactgctcctgttgaaggtacttgaacgaatgagtcaatcacagaataatacaacaccaaagagatggagtttaagagatgcagtgaagtaccttcaacctccgtagataccaatcaagttcactacttaagccatctctcatggaa

SEQ ID NO: 27262 - DNA, 614 bp, Arabidopsis thaliana landsberg
ccatctgctcgctcgtagagagaccacaatgctgatatcagacgcacagtagctccggtcagccatactattggtgcacctttggtcatcgcttcgccaagttaagaccttctgcttggtctatcatctgggccagcgtccttgagctgtacagccatgtatgggattacaatcgctgtctgccacatcaggtcaacagaaccaataatctagtttagagggttgctttccagagaaactgaacttcttaaatcaaaactaatgttgtatttactgtttgtaaggaacatcatgagactccataagacgtcaagagagcttttgtatcgatctctctttcggtctgtgtatagcaatggagcaaacatgagtgtccaagctattacaaagttgaataacccttcagccatctgttgaatttaaaaaaaaaaaacaatttcagaacgatttactttcactaatacacaaaaacctgttcagctcaaaggtacaaaccgggtgaagaacaggagcttgtaagaagtgaataccagctgttctgtcacaaagtccataagcaagaaactttcatcaaagatcaaacagtaaacgaaatcgatatatcttaaggctga

SEQ ID NO: 27263 - DNA, 2195 bp, Arabidopsis thaliana landsberg
gagcaggaaggtagaattctatggctttacaccacatcctctcatcatctgcaaaacttcttctgctttccatggttgcttcacctctaggtaaccccacatcagagtctcaaacgtctttatatttggcgaaaccccgaacttgcacatcttgttgaaaaccctcattgcatcatccatacttccattgctacaccacccgctaatcacagtggtgaagatcacaacgttaggcctggattcaactatcaatgtctcaagaagctcctctgctttctttggctcttttgctctaacgtaccctttagctaaaatgctgtacgcgtgagcgtctggtttgactcctgctttaaccatttctttaaacacttgtgcagctttctccatgtatccagctgagctccaagcgttcatcacagtactgtacgtgattacatctgccttcacgttacacttcttcatcaaggtaagaacctgcactttcattttttgattacctaccaattcaacctcttgagtaaaagacattaacaagagtgttaaagttacctcattgataccatcacggtccatgacttcaacaaagccattgatcaaagaattgaagaccacaagagtcgcttccactctcatgtgcttcattctccgcacaaacctcacaccatctgtcactcttccttctatgcaataccctcccacaacaatcccacacgttcttccgttcggtttcgccttctccttcataaccatcttctcaaccacctcactctcagctctcacggtctctcctttctgcacataacaagttgcaatcgtgttataagtcaccgtatccggcctaactccacactcctccatcttcttcaccacttcccacgcctcctccaccttcttcttcttgcaccaggcttgcaccaacacattaaacgtccttatattcggtccaacatcgacgttgccctcttccaacataagatccagtaactcagatgatctctcaggcttacctgcaatcccataccctttaatcaaagtgttgtaagtactcgtagtcggatttagaccaagttctttcattttcaacagagcttgcaccgcatcttccatgttaccggactcagagaaagcgttaataacagcattgaagaatatagaatcaagtttggttccgctctgttccacctcagagactatagagcttatggaaccatactgtttctgaaccgtcattgcagctaaaagagttgtgtaactgatcaaagacggtctatgtcccgtctctgccaatgttttgaaaacagtttgagcctcgtgaggtcttccacgttctatcaaaacgttcataagcttggttcttgacctcactgtcctgcaactacttccttcaacacatgacttgcagaaacgatactgtcctactgtagtctgcaacaaaaaagcaaagccttgtgctcaccagaaggtggactcgaggggacatagctctaaattacttaaaaaaaacattttaaacacaagattcgacttatcaagatttcaataaactaaaatcaagaacatggtgtagtgttgatgtttcaaaaagttggttcaagtttaagataaagattcttgatattgttaccttaatcggtgtggatctttctggttcagacattggaggtactttcttcttctcctgattaacatcttccatgttttgtcggaaaagtatatgttttctgcaacgaaatgtaattactaatttcacagattcaagattaagaaacgccacctgtatttacacttctcaagagatagggtccatagaaattgagataaggaaaataaacgacaaattttttatggagaaatttatgtttgctgtccacaaatatttcttttttatcctttctattttgttctactttggtcgataaaatctatagggccttcagaaggcccaggccagcccaattaagtttcgcattaacgtcacgtaagacaggaaaaactcttcttgatgcactctatgtctatgcgactacgcgttgcattatcttaaccagtataacaattaattctttgagcaacacaacaccttcttgaattgtgaactaaacgatttcttgcattgcatatatttgactttagcaataatagattgtacccccaaaaaatcacatttgctgtttagtgcacatatagtggcacat

SEQ ID NO: 27264 - DNA, 1555 bp, Arabidopsis thaliana landsberg
cagctactgaactatatcgattttcgtgggaaagaatcgaagaatctgaatctcgcatatttggatttgcatctctaggagactcggactgtgactaatgaggaatcactgaccctgtttttgttaagcagatagaaaactctggcttccaagtctcaacacttctgtgacttctggtccaagaaatagattctgctctagctatggttttcacgttttggataaagtagcattggataatttttgtaggggaacaatgttcgttaagaagcatcgatttgtaattgcgttttcgttttttctgatgcttgtaacgaccttttttaataatatcaaaacaatggcatttggaatatctttttacgttttatcaaaaaggaaaaaaaggaggatatgagtaacaaatttggatatgggctaatctttgttccgaattaatttttgatttgggctaaagtccttatttcagcccattgagtcggtcgatgtatatccccttttccagctttggaatagatttccaactactttatcattttcttaacagaaataagagcattaaagtttgtgtaattgttagaacatatatctgttataataaatctttggagcaatttgcgttgcgtagtatgtggccgtaagtcaactcattcatttattctcactgcatgtgcaattgctaccaaaagaaccgtcatggaatacagtatagagacgctgtagtatagtctttttcctaattattatttctctactattaccaaatcgtaacgttttttttttctcatctaatacaatacaattaaggattatcatatgatagaaaaagcgaccaattcacgctttagcaacgattttacaggctacagagtcatatacatttatgcttttagctttttaattcagattacgatcaatcattgtgtcatcaaacgttcttattattggtaacaattatttggaagcttttaagcgtataaattcgtgaatattttatttttgggtggacgacggtggattaaaggctaataattccactatagttgtatttaattatatttcaagtaacacgatcttatgttagatggtccatatgggaccccttatttgaagctccaactcacatgtaactaagagccgatttcaattttccctatagaatatattcttcttcttcttttgattcttgcatgttgtaaagtatttttgtatcttatcaatagaaataaaataaaaaacaaaatttagacagaaatttatagtcttgaagaagtactagctagtatatcagtcccatgcaccctcttaccaaaccacctcaccaaattttcaactctttttacgtccaaccaaagaatcttcccaaacctctctttattcgattctccaggcatataacaactctcaccatgccggagaaaactcgccgtacaaaggctctcgccgccacgctcttgacgacagtggtgtttctcacgtttccaatgataatcaacgcttcagattcatcaaccaatagaaaactcgaagaggatcctataaaatgacaccagtc

SEQ ID NO: 27265 - DNA, 1226 bp, Arabidopsis thaliana landsberg
atgatgccattgtccacctggtactttagctgtttgaaaatatatatatgttagtcttcatagcgattaatgtgtttttaacggaatgaagtgatacatttgtagggatatggtacagaagaaggagcgttatgtggagtgtttgatgtgcatggaccgagaggtgagtttgtgagcaagaacgtaaggaacgaagtgccatctatactcttaggccacatgaataatcattcagtgactcgagactggaaactcatatgcgaaacatcgtgtttggagatggacaaaaggattcttaaagttaaaaagattcatgattgctctgcttctggaactactgctgttctcgccgttaaacatgtaagttattcatatctttaatgttttataccgctttatatattaggggatctattatttttcattgcaaaaatattgttcattttacgaaattgtgtattattaacaacaatattaatttgaacagggaaatcaagtgatggtggcaaatcttggggattcaagggctgtcatgattggaacaagtgaggatggagaaaccaaggtggctcagttgaccaatgacctgaagccaagtgtcccaagtaagtttttgaagttaattggataaagtgatgttgtaaacaatgatacgtacaggtttcattatggttaagcatttttgggttaattaattttgtagacgaagcggagagaataaggaaaagaaacggaagggtgttagctttggagtcggaacctcacattctgagagtttggcttccaaccgaaaaccgaccaggcctagccatgtcgcgggcttttggtgatttcctccttaaaagctacggtgtcattgcgactccgcaagtctctacgcatcaaatcacttccagcgaccaatttctactccttgcttcagacggggtacgtaaatctaaacctattaagtataaactaaaaacctgccacaccacactttaattttatatgagagactatgtttttgtattttggttactattgatttaaaaccgaaccaaaatccatgttcaattgtggcccacccatttaaggctttttattaatcaacctgggcccaaataatacgaccaaatccaaagtaaagcccacatttaaaataattcgttttaattgaatgacccacttaaataatgattttcttttgtttcttgtataaaggtgtgggatgtacttagtaacga

SEQ ID NO: 27266 - DNA, 1304 bp, Arabidopsis thaliana landsberg
  unsure (1)..(1304): unsure at all n locations
aagtttcaggctcctgatcttgattcaatgatccgttggaattcgcaatggtagataagaggaaatgatagttacggtggactaccaaataattaaaagatttatatgaatctggtttagatctttatgatccgatcatcttatgttaaaaatgacgacaaggaacgaatcaagaacatgcatatgatgagatcataacaattaattaagaagaagacttgaaattaattaagatcgatacatggatgggcaaacctagtaacaatttagaggttctcataaattcctcataaaacctatatgatcatcatatagtaatccccaagaaagaggccaagatcttaattaagaacaataggctcaattaattacaaaattaaaatcttatttggcaggaaaataaaacccaaataatcaagaaagattcgattcaaatgataaaagtctaaaagtgaaaatacctggatgatcgatcttgtgttacaaattggttgtatttagagggttgttgttcttccaatatttctagagaagactttagatatacggaaatgccttatgtgatatcgacggaaaacaaaaagcttactgtatacttcattaaaaattcagcaatcattaaaaataaaataaattaaagaataagttgtgactgtacgatttttttatttgacaatattttttttttcggtttcaatttcataaacagataatttgataggtgttcagaaaaaaagagaaaatttgattttattcttcttaattcgtttttataataataataaaaattaaaacaagaaaaaataacacgtaaaaagagtattgttagttgttattcacgcgctttgttcttattaaaataaaaaaccgttggattattcttctttttctttactttctttcctaattttctagggattcattagaaaaattcttttaggttttacaatctttgaaagagagaagatagtgcgtgcgcgcgcgcgacgccatggatgggaagagtaataatcatcatgatctttttgcgaatgagaacgaagagaaagaggtattcttgagtcttgaaccctaattttgttggaaagaatgatgtgcgatgtggtgcgatactttctctctcaagtaagaccattgatcgagggagattttcgcaaatcccagcnnnnnnnnnnnnnnnnnnnnggggaaaaatcgaagatcctcgtaaaattgatgctcagaaattagattctccacaagcaaattggtgtagtcattgtagaaaaaccgttatcatgaccgaagcagaaaacacatatgat

SEQ ID NO: 27267 - DNA, 1288 bp, Arabidopsis thaliana landsberg
  unsure (1)..(1288): unsure at all n locations
agtgtcatacagggatggtgtggacctctctgcaaataaaaattattaaatgcaatttgtcaatgtagcatatggctcgatgcattatgtgaattctatactcatctcttctctgacactctccgcttgttgtcgctggtatttatatctttcatgtttctattattttcttggtacaaataaaagttgacagatcgatatgtatatcttaatatttagattaatcatgttttggttgattaattgtaatctacatttataatatgctaatggtggctctaattggatttataaaacgttttattttgcaacttcttttgctgttggtaacttggtattgttttgtgttttttgttcacttgtttgcttagttttgttttacgtatgcatgttttcctttatgggctttttagttttgggcttatctttttatatatttaatctgggcttcaaagatcgagttcttatgttaccaatttcaagaagcctatatnnnnnnnnnnnnnnnnnnnnnnnaaacaaacacacaggctttgataacagtactaaaatcacaagaagcccatgcttgaatcaagttttgaccatattagactagtgttagttataagcttgttagatggtttatcaagttgttaattaataattagttagctagattgagcttattaaaaatcaccttgtatataaagcagtgtacattataaacacgattgtggctcttgtgttcttggagaagcttcagtattgttgaaattgtcatatggaagaatcagattttaaaaactatcaatttgttactacgtaaaaggtaaatataaaaaccaagtttatcttctccaagaattgtattaaaaaaatccaagacccgaaaccataacttattttgcctatactgtagacagtaaatgccctgagctcgagggaacgtcgaagagccacacgattttgaaaattgctgagatgagaggataagtaagttgagcagaggagtccaaattagagaagggaagagatatgtttgctctttacccaaaactggaccacaccaatctgtcttcttctccattcctttttttttcatatcttctttacaaaaatatctcatcaaaaagaggttctttttggatattatgatctttgggagcttctaacagcttttacctttcaagattataattcttactacgttgtacattctagttgtcagaatcgaaaccttgatgacagtttaagacaatgaatttatttctcttaatgctaaactattatgtaaatttaagacatg

SEQ ID NO: 27268 - DNA, 1607 bp, Arabidopsis thaliana landsberg
  unsure (1)..(1607): unsure at all n locations
aaattaactgcaaatactccggttatatacattgacacaaaccgaagataaccaaactattttttgttataattcatctccggttagcatctttgatgttgtcgagtgtcgaccatggcattgcgtttcccgcctcgtctcctctctcagctgaagctatctcggcgtctgaattctctcccggcaccggtatctgaagattccgaagacgaatctttaaaattcccatccaatgatcttcttctccgaacgagtagcaatgatctcgagggcagttatattcccgccgatagacgtttctacaacacgctgctgaagaaatgtacagtctttaagttgctcattcagggaaggatcgttcatgctcatatccttcaatctatctttcgtcatgacattgttatgggcaacactcttctcaatatgtatgctaaatgcggaagtttggaggaagctcgtaaagtgttcgaaaaaatgcctcagagagattttgttacttggactactttgatttctggttactcgcagcatgatcgaccttgtgatgcgttacttttttttaatcagatgttgagatttggatttagtcccaatgagttcactttgtctagtgtgatcaaagnnnnnnnnnnnnnnnnnnnnnnnnnnnnnnnnnnnnnncttcatgggttctgtgtaaaatgtggttttgattcgaatgttcatgttggtagtgctcttcttgatttgtatactcgctatggtcttatggatgatgcacaattagtctttgatgcgcttgagagcaggaatgatgtttcttggaatgctctgattgctggtcatgctaggagaagtggtacagagaaagctctggagctttttcaagggatgcttaaagatggttttagaccttcccatttctcatacgctagcctctttggtgcttgttccagtacagggttcttggagcaagggaaatgggttcacgcttatatgattaaatccggtgaaaagcttgtggccttcgcgggaaacactcttcttgacatgtatgcaaaatcaggaagcatccatgacgcgaggaaaatattcgatagattggctaaaagggatgtggtgtcttggaactcgctgctgactgcttatgcccaacatggatttggaaaggaagcagtgtggtggttcgaggaaatgaggagggttgggattcgccccaatgaaatctcgtttctctctgtgcttacagcttgcagccattctggtcttctagatgaaggatggcattactatgaattgatgaagaaagatgggatagttcccgaggcttggcactacgtcacagtcgtagaccttcttgggcgagccggtgatcttaatagggcactgagattcattgaagaaatgccaatagaacccactgcagccatctggaaagccctgcttaatgcttgtagaatgcataagaatactgaattgggagcttatgcggctgagcatgtatttgaacttgaccctgacgaccctggtccccatgtaatactatataacatctatgcatctggtggcagatggaacgatgctgccagagtgagaaagaacatgaaggaaagtggagtgaaaaaaga

SEQ ID NO: 27269 - DNA, 1385 bp, Arabidopsis thaliana landsberg
ctttacttaagctttcttggatttataggttatcctttaaagatggcgacacttggtatggacaacgaacttccaacaggagtaaaaattgaaaagttgagacaaaggcttactaaaacattgctcccgctttctttctgtgagttgttctttaaatgcatttactttgttctgtttctataaaagataacatctttttctaaccattcattttcaggagctcggtggaattattccacgggaaaccttactttggaagcttaagttactgagatctggctgtgcttatgccaattcccgcatccatgctgttcaagctgaagtcttggtccttgctaggtaatcttctttcttatggtataacatttcttctctcttctttatttgtggtctatgaaagaaataccacaacctggcttacaatgagcgacatattatcaagaaaatagaaatgacttcggatttcatcgactttcagtggaaaggacatgatgcttcctagccaagaagaagcaaagcggcttcacgggttacttaaaaactgttcagttcgatgcttcaaggacaatgggcatacccttttattggtaatttaacatagtaatttacatactaaattactcttgagtttccttttgttccggatggtaggtgaagctattaagtagtattagagtaatttcttacaagaagagaaaaacacagagtagtatgactatttattcattgacatactaccatttattgtcccaggaagatagcatcagtttgctcacagttataaaaggtacaggcaagtaccggcggtcctggagatatgatttggtttctgatttcttgcctccaagtaagggagaacttgcttacgcccttgatgaagtgcttgggtaactttgctaagccttccttgactctatttctcttagaaaaaagttccatctactaaatattcaaaaactttctccaaaacagttgacactacaagttaatgtgtctcgttccttgatctcctcaaatgagcaaaagagaaccaaatgtacttagcttcatgtgatttatctggtctgattttattccttgtgatatgcagattcttgcgaaatgctgttggttctgtgtttttttcaactatggaagacgggaaaatagtgaagggacttgctggtgttccagataaaggtccggtgctacttgttggttaccacatgttgatgggtcttgaacttggtccaatgtccgaggcgtttataaaagagaagaacattctctttcgtggaatggcccatccggttctgtattctgataatgatccagctaaaggcgttgattatggtgactggattaaagtatttggtgcctatcctgtcaccgcaacccatctattt

SEQ ID NO: 27270 - DNA, 1557 bp, Arabidopsis thaliana landsberg
  unsure (1)..(1557): unsure at all n locations
catccctaagctatataggggggtatatcactttaagttttggggtatttggctctgatgttgaatattcaaaactcatatatctacccatactataaaacaaaatcacatttgagttttgtttccaggaaggatcgaactcggaaaaactcaaaatgagcaacttttttggtagcctccgtcaattccaagtcttctctgacctccccggtgcaagctccaccgagagactcgatatcctcgacgacgaacgccacatcatcggtttcagcgttgttggtggtgaccaccggctctctaactaccgatccgtaacgacgccttcacccttctccgatctccgggaccgtcgttgtcgagtcttacgtcgttgatgttcctccagggaacacaaaggaagagacttgtgacttcgttgacgttatcgtacgatgcaatcttcaatctcttgcgaannnnnnnnnnnnnnnnnnggctgagagcaagaagaagttgtctctgtgatgagtctttgtcgttgtcgagtagtttcgttagatccgacgtcgttttctagatttttagccgtcgtgtgatctatgttttttcggcttatgtgtgaaaaaaaagttacattagtgaattaatctctcatgcatatcataatccttcttttaatttttgtattttacatatcccataaagaaccgatttggatagccctattccggctttcaccacccaaagataataatattcaaactgaaagaatgtggttgtgttgtccgctaattaaaagtgtgattttcaagtttaattaatcttgtttttctatagtttcatcagaaaaagcgtaaatgaaatggtacatatgatgttcgactcggatgtatattaactcgttacattgagttgttggccatctaatgtgtgtagataaatttacgtacgtataaacagcttttgtgaaattcgatgatttttcttaaaggcaactttaaatttgggcataatataatgtgttcctttcctctatgatttaactaggtcctcaaactttttactttcttattatctcataataattaaaataaccgattgagcgtgaagttgttatttaaaaatcaaacatttgatagagaattcaagatttgaagtttttatttgtcatcataaactatttggtagaaaatagggagtagttggggattttcaggcttaaaggtaattgcgtaaaatggacaaaacatacatgtatacaaaaatatgaacatggccgtcaaaatataaaaaataaaaaaacgaacatgttgatgaaattaaagaaataaaaacttgcaagtggacgatgctttgaatgataacccaacacagccaagctgttctcttcttcttttttttccccgcttgatataaagaaaatgcaagttgcaattttttttatcttttacttcctttctttatggttcttcccaatccaaaagatataatcctaaacctcgtataataaaaaagaaatatgaaatagaaagaagcgcaagttgcatgtccttttacatcacgagagtcacgagatgt

SEQ ID NO: 27271 - DNA, 1789 bp, Arabidopsis thaliana landsberg
gagattgagtgagttttatttcttaaagcctttgagattttttcttttcgaactatcatcctcaaattgcagggttgggagggttgtaagccgatgttccttaaattccactagtcccttttacatatctaaaaaaaaacaagagagcacagaaagtggtcctaaggttatataatgtgtatgctcttcacacgtctttattatgtgctccttttatcatgttgttcatcacatgctcccttctccattgcattaactagtgggtccttttatagctgctcttgatgttaactctatgacagcattcattcactgagtatccttaaattttccataatttgataaaaccatcacgtaattctcaaaggtactgtgctctctggtttaacctctgcagtttgtatccaaataactgttccaaggagggcagatatgtcttcttcttctttttcgtttggttttttgttcccatgtgattttgatatgcatccttattgcaatagtttgttgcataagacttgtctagaaaaccttatctctcatccttttgattgacaggctgagtttgcaccgtttggtccttccccgtaatatagacagcgactgtcctgttccgcgactaaagacttaaggtcagaagttttgcaatgtcactttctgcaacctgttatcacaataatgtgctgagatttgtttgaaagctttaggataatattaagacgtattccttgcataatgttagttgattaggtacacattagcaatcatgctacaacgtttcacgacatatataactagagaaggaaaagtattccttctgttcaatctcagtacttataacctgcatacttttacctcaagagtatccaaagttgttcttttggaattatagacttgatagagtaagattagctgtcgtttaacttttatatattggttagtatcacagctggtaattctaaagcaaataggctttatatatctgtaaccatcttgagttcttattgtagtatatttgtagtgtgaggcaatgccacatatatatgtgattgaagtcttgccaaaactggaaaagtcaagcatttgaatatcttggtctatgccgaaagtcgtagctatataaatatggttgtctttaatgtttggttagtgttaagacattgaaggtcatatgttaggtacgaggattgatatcattgcttcttctgagatatacgattgtgattcttgtaggccttggggcatatggacttcattcaaagtctgttcactggaggcaataagaagaaacatggtcatgtgccgttttttgtaaccagtattttttttttcttataggtggggagcattgtggtatatggggagagagagagagagatgaacaaggaaatatggtagacagcttgtagttgatgattctctttgaactgcccaaaaaaaggttagaaaagaaactaaagaagaaagcttttgaggaaaggctttagctttaggttctgtgtgttgagaaagatgtgaaagctctatctttggctaactctacacttgtaatcatggaccactttcacttctcaactctctctctctctctccccttttgtcttgtaccattgtcttcagtgatccccacagtcaccgaatcatcatcaacatctgcatttacccatccttcgttgcctcttgattcggtaaaagaccgttttaattagacagagaccctaagcattttgtatctaaagagctttctggggtttttaatggttaaaactctaaatatctcgactgcaac

SEQ ID NO: 27272 - DNA, 1417 bp, Arabidopsis thaliana landsberg
  unsure (1)..(1417): unsure at all n locations
gagtgcatgaacaagaactccatgacactagtgcacaaccgatgcaggtaagttctagacatagtatatgtctgattcttataatttctgtaacttaccttctttattttgtgtatcaggtttgctgataagcagattgtgaggcttcaggaaacacctgatgagattccagaaggaggaacacctcacacagttagcttgttgctgcatgataagctagttgataatgggaagcctggtgatagaattgaggtaataaaagcagtaattctatcagggtagtacattcattcctatggttttcgttgacaatcaaaagcttgttttctggataggtcaccggaatttacagagcaatgactgtccgagtgggacctgctcacaggactgtgaaatctgtgtttaaggcatgtcatcttatttcttcctctgttagttatttccctttattgtaattacgttctgacattgtcatttatgttttcttatgaatgttgaggacagacctatatcccttgccctcacataaagaaagcaagtaagttaaaaatgaatgctgaggatcctatggatgttgacaatagtctgcgtagagttgatgaagatgtcgagttagatgaggagaaggtatttcatctatttaactaaaatggttctacagttttgtatcttattcattcgtccctccattccaaccaatatttgtgttacttttcagctgaggaagtttcaggaactctctaaacaaccagatatatatgagaggcttagtagatcactagcaccaaacatctgggagttggatgatgttaaaaagggtcttctatgccaggtactgtaacgcttttgatactgacttatggtttaaacaaaattagttctttttactgagtcaaatttcaaatgtgaagctttttggagggaatgctttgaacttagcatctggtgctaattttcgtggtgacatcaacatcttacttgttggtgaccctggtacgagcaagtcccagctgctccagtacattcataagctttcaccccgtggcatttacacaagtgggcgagggagctcagctgttggtttaacagcttatgtagctaaagatcctgagacaggagaaactgtatgctaatattgttttcaatctttttattatcagctgtttttttttattctgtgtttcaaagttttcataaacctgacatgctaacatgaatgctacattgtttaggttttggagagtggagctcttgttcttagtgaccgaggtatctgctgtattgatgaatttgacaaaatgtctgacagtgcgaggagcatgctacacgaggtttgctcctccctctcttttttagcattgctcaaanaaagtagaaatacagtnttttgggtgcccccctcgtgaatgtcggtctc

SEQ ID NO: 27273 - DNA, 665 bp, Arabidopsis thaliana landsberg
ttgagttttgtaatttatttaggtttatgtatgttttggaagaaaaaaataattccaagtgatgttgtggaattattcaaaaaaaaaaaaaaaactttattagatggctttactaaaaaattctcgatcatcatcgtcatccgatacaaaataaagtcaggtagaggatcgagcatttataaattatggaataacaataaatcgtactatggaagcaaatcattttcttgttccttagtttgctgaccgtacatatactagttgacaaggttaatccataaatctctttgtatcattgtgtgctgtgtttttttttttttttttttttaatactgtgtgccgtgttggtgcatttgcgtaattgatggaggcaacattttgaacataatcactttcttgttgcttaattagtgtatatggccatgggtacgttcttcctattggtacatatgcatgtatttatattacaaggtgagtattcgttacaagttgtgtacatatgttcttacacgtgcaattcgtacacgcctcaatttgatttatagtcaaatttcaaaaaatttgttagaaatttcatctcaaaagttataatatgataaaaacgtgagaatgaaaaacatatgtgaatttgaatgatataaacgtgatattttttattaataacc

SEQ ID NO: 27274 - DNA, 643 bp, Arabidopsis thaliana landsberg
  unsure (1)..(643): unsure at all n locations
gacaatgtctcgtactggcgaaagttcttcaggttcgtcctccgacaagacgataaagctattcggcttcgaactcatcagcggcagtcgtacgccggaaatcacgacggcggaaagcgtgactacgtccacaaacacgacgtcgttaacagtgatgaaaagacacgagtgccaatactgcggtaaagagtttgcaaattctcaagccttaggaggtcaccaaaacgctcacaagaaggagaggttgaagaagaagaggcttcagcttcaagctcggcgagccagcatcggctattatctcaccaaccaccaacaacccataacgacgtcatttcagagacaatacaaaacgccgtcgtattgtgcattctcctccatgcacgtgaataatgatcagatgggtgtgtacaacgaagattggtcgtcgaggtcgtcgcagattaacttcggtaataatgacacgtgccaagatcttaatgaacaaagcggtgagatgggtaagctgtacggtgttcgaccgagcatgattcagtccagagagatctgagttctcgtctgatcagatgagaagtattactcgctggacntcatctaggttttgctgagatcngcatacaaattaagagagtatatgattagatat

SEQ ID NO: 27275 - DNA, 884 bp, Arabidopsis thaliana landsberg
accctttgatgtagtgttactagcctgcaaagtccgaaagatggtcagtgttccagtcaaagaacaagcgcttgtgccagtccctgagaaaagtcaagtgctttgagaactataagaactcgtgtatttctcctcataaggtaatccatggtcagggtcaggagccccatataagccaggagcttgcagctcttgcgaatagccttcctctcaaagacctgtagggtcaaaagcgagtggtattcagatataagttgtgatagcgaaaaacataaggggtgatgcctatataaaaggtacgaaatcttatttacataccaacttgaagcggttgatcgttcccgacattatccccctcgcggagtccattttgttcccctagagatacaacaacaaatagcttagaagaaaagcatgtgatagagatctacaaactgaaacagatgaaatcaaactttcagcttaccactttgtcaagcaagcggttatgattcttaacttcttcatgtatgtctccagtcacctgataagatattattaccaacttacatctcaggcaagcgttattgcaaactagatttgacaagagtgaaaacaaaaaaggcattgttttcataactagacttttctaaggcattacatcatagctcgatcctcgtcgttgagtccgaaagacttatacagggtctagtgatagcaatgctggagagaatgttcttaatctacaatttcaatacacatctagtaactaaaaactaagttcaatttctttatatctagacttttcgaaagcattagatcatcgttcgatgctcgaaagatacatttagggtctcgacttagcagtgcttaagggactgttctttctcaaacaataaggatca

SEQ ID NO: 27276 - DNA, 1422 bp, Arabidopsis thaliana landsberg
caatttcaaatgaatgaagaaactgacatttccattataccgattctgaaaatgataaacacttatttgttgtcactacaactttaacgtctctaacgagcatttcatcgaacaccatctactaaaaaaggcgatccttttgatcttgaccgttggtcatgatgaaaaccagacgacacgcacgcgctggttaatatgaaccgggagtctgagaagtggttttagaaaaaccgggacattcggttcaagaaatctcctcgtcttcctcctccaaaacaaaatgtcaaaatccctcctttatcggtttttacactaaccagacccacctgcgacaattttctgtggttttcgaccgtcgcagcaagaacgagccggagtgaatctccgtcaacgactccgccagaagtaaaagaggtaactttgtagtttttgatctttcttggaattggaacttcgtcatcatacatatataacatgtaaattcatgaattagtgcttaagttatatgtttatgtatgtaatagcccaaaggctctgtctttaaccaagagtcattgcatattcaatttgagttccatggttgcaggaactgtgttgtcgtctatcattgtacttagatttgatgttttcatataatgtaacaatgtgaacatgatgatattttgattctgtagtgaagatggagtcatggatttgagatatggataaaccaatttaccgcttatagattctggtcttcttctcattggtaagcacctgtagctcctctgcaatttccatttgtttacttttgttcacaacaatgatcttttaactccacaattcagaaaaagagtgcatggcttgtaagcaagatgggaagacttaccgtaggagtgtagtatgagccggtatgtgaattagtacattgtttaatttacattagttagatcttactctaaacattagtggttgggagaaagtgagcatcaaaaatgaccatttgaaattttctgttacagcaaagatactgtaaagtacagagatttttcgagaggagattcctcactatcttctgcaatggcatggcaaagttctggcaagttgtgattcggggaagatggttgatttggcaacagatttcaaagcatattaaagaagtgagttgatccatttcttttgttcttttatgtttatatatcttattagtttctagagttagacaagacgttatggtcatttttctggtaatgagatttatggtgattcaagttgttgatgttagctaacacaatgaaatggctttgttcattcatttatccaaatacatcttggcatcacttagatattttaggatatgatactttctctaaaaacaacttggaatagttgaaagaggaatcttgaagttttggtgttgtagtaaagacaaaagtcttcata

SEQ ID NO: 27277 - DNA, 1260 bp, Arabidopsis thaliana landsberg
cagctgcttcagccaccagctgtctgtaagaaacagtaatgagattcaattatcaccagcaactgagaaaagattggaatccgcaacataacctgctctcaccttggactgtaactcttgccaataaacctaccaacacctggagttatgtgtacaattctgccaaatggttcctcagaatctcgaggtaaaccaacccaccaacccacctatataaacatcagaaacgtgacaaatgcattgaaattctaaaacaatcatcgtctagataaaagcatagattcttgactagagatttgggtaacactgaaaccatgaagcaatccttgataagttgactaggtgaaaccatcacttatgtcaggaaacatatattacttcaactaaccttaactaccttaatagtttacagacatgtaacctattttcttgattcaaatgtgtaagaatcgtctagtaatatcttacaagctaaacaagaaagaacaaagtataaaggacggtaaacaaaattaccagtccacttcctgtctcgttacataacctggaagcatcatggtaacgctcttcgtttactgcagtctgcaaggaagttaatcatatataagtaagaagataacataagagtttgatgtaataaaaaaacacacatatataaacctgtaactggcgcatgatctcagcgacagcatcatcaacagtagcttctgaaatagcttgtttcaacttgactgcttcttcaaagtcttctttttcaacagcatccttaagttgagactgttacataagctagaagactccaaatttagaaatctataatcaaccaataatcgaacaaaaaatcatcaatagtagacagagtttagatggatagaaccttgagaagagaaacaacgctctcgacttcttcaatctcggagaagtgacggttccaacgatcccaatcccaatcccacttatcctcactcgaactagtatcagctccatcaacagcggcgcaatttcgcagacagcttaaagatggggctttagggttacaggttgatatagaagaagcgaaggaatgtcgtagaccgatagatacggagaaatttgtgcgtttgttggtcgagagctccggctttagagaatttctggggctgaagaggatgtgaaattgaggaacagcgatcatttggccgataagacatggttgagttgtcgccatcggaggacgttctcaccggaatctctcaccgtcggagaggcctgctgcgtttg

SEQ ID NO: 27278 - DNA, 1486 bp, Arabidopsis thaliana landsberg
cctttatggtcttacttgcccctttagcatgctaatgtaattgatttattggtatacctttgtcttggatggcctttgtatccgcaattgaagctcatgatgataggtttagtaatctcgtgattttatatctgtaacctctctatagtggaaaggcttcagcttagatctctctttgcacatttttccaatggttccttatagttacagaatctgaagtcctgacatgttagaaagtatattgacaacgtatcatctcttttttctcttttataagacgcatcaccctgcatctaacataagcttctactttggtgtgttacagctttcacatggaccagaacagtgggctgatgagtttgcttccgggagaggacagcaagaaacagccgaggaccaatgggttaatgagttttcaaagttgaatgttgatgactggatagatgaatttgctgaaggtcccgtgggtgatagttcagctgatgcatgggcaaatgcttacgatgagtaagtccactgtactctaattgatctataatttaagttctcttcttctttttttcattcttcacaaatcttataagttccctttcaattccattctgttatccttgtgggggtaggtaagtgcagacacaatgggtgttttcaacttatttgttacttttcccctatgcatttctctctggttccttaatccttgcttaggcgaacctatttttgcaactatgcagtttcatatctaccattatgattcgcctgtttaagggattatttctgataacctcctaatttttatctatggagtctaacaatgtttatccaacatgcatctttgacttttaagttcatctaacaaaagtatgtgcctttctaggtttctgaatgagaaaaatgctggaaaacaaaccagtggtgtctacgtcttctctgacatgaatccttatgtgggtcaccctgaacctatgaaagaagggcaagaattgtttcgaaaaggacttctgagtgaagcagcgcttgctctagaagctgaggttatgaaaaaccctgagaatgctgaaggttggagattacttggggtcacacacgcagagaacgatgatgatcaacaggttagttagattaatttgcatgaatattaatctcctataccttatcaaaatgatgaaacttagtcaattttcaaaacaattgtcgttgtggatgcaggcaatagctgcaatgatgcgtgcacaggaggctgatcccacaaatctagaggtgcttcttgcgcttggtgtgagtcataccaacggtcagtgcatgttatctagcaatatgtgtttgttttgttcacatatatggatacttgtggtcatacattttttggaattagattggtaattaaaatcttgttctctgtaactacagagttagagcaagcaactgctttgaaatatctatatggatggctgcgaaatcacccaaagtatggagcaattgcctc

SEQ ID NO: 27279 - DNA, 1658 bp, Arabidopsis thaliana landsberg
cctttctcttctttcgtcatcgtcaattgggttaatacataacataacatctccttctgatagtatgctggctcagtgctgggatgaactcaagcataccagacaagctgctggattcttggtatgttttgaatttaagaaatgctgtctaagcaaatttacttgaatcttagtaagagtttgtatttctcacatatttaccccttgaatttgcgcctgcaacagttcatccataagaaatacaacattttatacgacgagattgcaaatgatctgcgtccagtaagtatatttatcaaccaactcttttaccgataactggagaacattgacgattgtaattatgcttacaccattttaccttcactcagaaccttcaaatacagcagcattttaaactgtgtactctgtacaaggatgaaatctacaacacaaagagtgtttcccaagatgtaagctttctgaggaaatagttctcttctcttgacatatatgaagatcctctgctctagtagtttaatgcttgctcatcgatcaataggtaattgcaagcatgacaggagttatgacagacagcagcgacttcttgttaaaagaggattctaggtaagtgtagctttgcatcatctctatcttttgcttttatgatccaaagtcatgatgacatttatctctctagaaactaacaaaaccgttccttttggccatgcacagcaacatcatatccttgtcgatcgatgacttatgtagttcaatgcaagataaggactttgcccaagtgaaacctgctgaggaacttctggaaaatccatctttcatattcttacattagtaagtaattcagagaaaccaaaactgccacccttcaagaacaccatgcaaaagcatgaagaagaatctcagagaaaattgctgcgaagaaatttttagattcgccgatttgtttatttgtttatcattgtaattctctaatcatcccagagatttcataaagagtatatgttgttttgctgggagtaaacaaaaagagacaaagcttggctaatggattgttcttgttggtgttgtgcagtctttctttcattattttcgtgattgaaataaaaatttatttctttttgtaatttagctctttttttttgttgagtctgagaagttgtctccacccatttatggtttgtacaaaggaatcaagttaatagaaaaaaattgcattattgtattattgcattttctcattattgcattattgtgttaatttaaatcttgattattattaaaacatgattatgattcatttttcctttttttggcagcattttttcattcttctggtttggaaattttataagatgagtgacctaaaactgggccttaaatggactataaatttaggcccatttatattgaggtgagcccaacaatagtaaaagctagtgtttcgtatcagtgtagacaaatggctaataccaggcaaatgttgtacctttgtctcatctctttctcctatctcgatcggtaattttactcattagggtctctctgtttctggccaaattcccttcatctccgccgttttgcttcaatacagatatatgggattttttttaccgatcaaatttaggttttcgttttcactcagaacggtagtaacccta

SEQ ID NO: 27280 - DNA, 970 bp, Arabidopsis thaliana landsberg
tccagatcagcagcatctaacacaagtgcagtcccgctctccacagcttgtttcatcaaaatcagaactctctctatgctttgtttgctgatctcttccgatgtttctggttcgtcttcaggttcttcaaggtctcgaagaaaactatctaccgttggctcagttacatcttttgtagaccagctctgtaaagaattgattgtgccttccatttccgaggaatctacagttgaagggctcaaatcgtgaccatctggatcattttgcagttccatagaatccagaggagggttctgggtcatagtttgactctgatttggtgacaccgatggttcgtcatcttctggcaaggcagtatcaacttcgatatcttcaaggatatcatcctttttatctggagttgtgagagacgatttccattctcgtcctctccagataagaatctgctcgttttcaaaagatacgagcacacatggaacaagatcctgcaaaacggttcataacccaaccaacaggttcaacaagaggttgtacacaagatttaaaataacaaatctcaagtgaataataattagagtaaaccttgagtttggcaccgattttcctaaaatcactgcctttcatcccttgacaatcgatccgaaccaattcacaaacttcaaatgcttctttaacatttttcacaagatcacaatacacaccattcttccctatatgacccaacacaggacaaagttaacattctccgtcttggaggaaaccatatcaaaattaatagtactattacccagaggtaagctgctagcttacctagcttgcaaatgggcatgagctctcgtcctttcctccgcatatcggtagcttcctgacgagttaaaccctcaggcacttgttgaattagccttggataaacaggtgctacaggcttccacaacataagagggaaccgcggtcttgtcctgtggttatc

SEQ ID NO: 27281 - DNA, 834 bp, Arabidopsis thaliana landsberg
  unsure (1)..(834): unsure at all n locations
gttaatagcattaatctctcaaattttgactttctttccggcggttttccggtgacctacttttacttctaccccaagcatccgcaattatcctttgaaacgatcgtcaaatccctccagagctctctctctcaaactctcagcgagttctatcctttcgcgggtcagattgttcccaatgaggcatcacaagaagagcctatgatnnnnnnnnnnnnnnnnnnagctttgttcgttgaagcccgagctcatgtcgatctcaagagtttagatttttacaatcttgatgcgtttctccaatcaaagctggtacaggttaacccggatttctctttacagattcaagcgacagagttcgaatgtggaggcctcgctttaacattcacgtttgatcatgctttaggagacgcgagctccttcgggaaattcctcactttgtggtcagagatatcgagaaataagccagtttcttgtgtaccagatcacaggagaaacctcctccgggcacgctctcctccacgttatgaccctcacttggacaaaactttcataaaatgcagtgaggaagacattaagaacataccgatgtctaaaacgctcatcaagcgtctctaccacatcggtgcttcgagcctagacgcgttgcaagctctagctactgtaaacggagagagcaggacaaagattgaagctttctccgcttatgtgtggaagaaaatggtggattctatagagagcggtcataaaacctgcaagatgggatggcttgtcgacggtagaggaagacttgagaccgttacctcgagctacataggaaacgtattgtctatagct

SEQ ID NO: 27282 - DNA, 1163 bp, Arabidopsis thaliana landsberg
aatctgaacctttatgccttggctgttatgggtcattttttttttattagcctctgctgtcctcacaggaaccgtggatttctcaacaacgattttgctagatttggagacatcagcgatcatccgagcagcactctcccagtaagtaagatcagcagctttgccagcaccaagaccttgtgttttggttggagtgttaactgagacaaatacaatatcactctcaaatacatgtttctccacgtctgtgctaaagaagaggtttttccctctgcattgtttcaccacatcttccaatcccggctcgtaaataggaagcctatcactgttccaagcattgatccttggttcagagatatccacaacgactacttcaatctcaggacacttaagagccatcaccgccatggttggaccacccacataaccagctcctatgcagcatatcttcaccatttctgattttcaaaacgtctcctgttaaagtacaaagccaagaagatatagtctacgtaaatcagtcaattatacaaagacaaaacctttaatagaaacaacaaagtgacaatttacaacaactacaagtcgatgattggctatataagaaagtgcggcgttaaatcaaacaccttgtaagcttagatctatcaatttcaaaatgttaacagcagaacatgcaatgtacttcgatcaatctggttcttctgatcacaaaatgtaaaagccacaatctttgagtgtacgatctagaacaaaccaaaacgaacccatctttgatataaagcgtgacaacgatgtcacgacagacgaaactgacaataacgaacaaaacccatgtttccagtttgagaaataacgaatgatctcacaattcaaagtaccacaacaagaacacaatgatcaaaaaaacgatacattttacgaaggaggaatagaaaaaagataggaaatttaccttccttgagagtgaagaatcgagagatgggcttgttactggtgaagaatgagagagaaagcaaaagatattgttgcggcgacgatgatggaatttgcagagaagatgtcttctgaaagtttataaatacactcgcacccacttgacttacacatttcaactttttatttattgctcccaataaattccacacgcttttttttttttt

SEQ ID NO: 27283 - DNA, 1478 bp, Arabidopsis thaliana landsberg
  unsure (1)..(1478): unsure at all n locations
ccagaagtgaatgggtcttcattagtctgtgacatatgtagttcaaacatatgcaatacgtgaatcatatgccatgtacacttccaagctgctctggaaaacacaggagccatcatttcaacaaatctgtaggtagagagttttcttaatgagtttcagaacaagttatgctttccactgaagaaggaaatgaagattcagttcttttaccctgtgcaaggaggtccagtgctattctcgttgcacctcgcccgaccaatgactttgtatgttctccttttaaacaccaaaacattgcaaaaagattcattattacaatcttttttcttctctttgctaaatttttttctattggagcttgagagaagtacctatgtactcttgatttcttgtctcgtgaggtaagttgatgatgcacttcagagaaattaggatcaagagcaggttgtgatatttcaagctcttcttctttaataattgaaacataccaaaaaatattcatctcattagataccacatctttaccaagtgacaaacaatatattctttgtataacatcgtaccttctagcgtcaaaatggtcaacaccgagatcttcatcccatagaaatatgtaagaataagctgagacaatatccgggtgtagaaaacgctttgcaaaccacctaaaagagtcacaaacatattgaaactgcacagccaaaatgtaataactccggttcgggttttacgattttaaaccacaattaccatttggtttggtttactacagaaatatgaatagcagtgtcactccactcaaactccttccattcatccacagcaccatcgtagtgaaacagcatcacaacaaactcacttgatggaaactgccatataagaaggtggaaaaacagagatatcacatcaaaactgtttgattaccgagaggtatagtccgaggttttaccttcttgataatcttgttgacactttccttctgttttattccaactgccatagctaataagttcggtttcggtttctaagcaaacaaaaacagaaaatgtattgttaaggaatgactacaaagaaacttaagaacggttggtaacagataaatataccttatcgcgctttgctccccataacggtcgcatttccaagtcagatgtacttacaacaatacctcgcggtaacgtctcgctaccaggaggcctaagttgtgtctaataagcaaagcaacatgtaaaatgtcaatattcatatagacagagagatcttttgttttgagcagcttnnnnnnnnnnnnnnnnnnnnnnnnnntttagcaagatttagtctaattatcgaactccatcccgcgataccctgtcaattagtacactcaaaactgttctataacatattcagactcaagataacgcttaccaattgcagtttaagaattcatacctcttaatagtctactgtaataaaagcattccctataaggaagg

SEQ ID NO: 27284 - DNA, 1535 bp, Arabidopsis thaliana landsberg
aatggaagtggatgttggaaaggatctagagtcgttaactgattttttaaagaaagtgactttgttagctctagagggggaatctagtgagcccttgggtttacaaactgtgactcaaacaaacctacttaactgaatccaagaagaaccggcacaagatgaaaagttgtagaatatcgtggaggaattaaaaacattagatggaccaaatgctagtggctaccatctggctgatgatggcaccttattacttaatgggagaattactgtgcctgaccgtaaggattacgacaagaaattttgaaagtggcacatacttctttgttgagcattcatccgggaagtacaaaaatgtacaaggatataaggaagtattaccattggcctacgatgaagagatcagtggcaaaatgggtaagccaatgtgattcatgccaaagagttaaggtggaacatcaagtaccagcaagtgtattgcataatctttcaattcctttatggaaatgggagtcaatctcgatggattttatcacttgattgccaacaagaccaggacgtaccaatgatgctatatgggtagtagtggatcgcttgaccaagatggctcatttggtgtcaatgaaaagcacagatcagccatctatcctggcagagaagtatatcgatgaaatcttaagactccatggggtacctgctaatatagtatccgatcgagatcctaagttctcatccatattttggcaagacctccaacgtgctttaggaacaaatgttcacatgagcacaacatttcatccggaaactgacgggcaaacttaaaggaccatccaaaccatagaagatatgattcgactagtgcactagagtgggctggtgattgggaagactacatgcctttggttgagttttcttataataacagctatcactcaagcatcggtatgtcgccatttgaagcaatgtatgggaggtcatgtcgaactcctctttgttggacggaagtaggagagaggacgagttttagtaattggttaatcgatgagactacggagaaaattcagtttatccgagataatatgaagaaagctcaagatcgacagaaaaagtatgctgaccgaaagaggcgtgacatggaattccaagaaggtaacatggtttatctcaaggtaaccgcgttgaaagggaaagatcgctttgtaaaagttggaaagctcgcggtaagatttattggtccatgcaaaattgagaagagaattggggaagtagcctatcgtttgtatatgccggaagaaatgcaaactaaggaagcacgttctggatcctaatgctatcatacccgagccgatacaagagttgagaacgaatctcacctatcctgaaagacctcttggtattgctgaaaaacgaatgcaggagctaaacaatagaagaattctgccaattcaagtgtcctagggaaggcaaaatcgtaaggttattacttgggaagatgaggaaaagttcaggacaaaatatccacagtttttcgaaccagg

SEQ ID NO: 27285 - DNA, 1048 bp, Arabidopsis thaliana landsberg
tcaaagacaaggttggaaagtccagaatagtaccttgcagcgtgaaaacagaatgctgccaggagaaagctcagggccaaggacagcaacaatagcattaataaggcgtccaatgccttgagaaagatcgatccatccactttcttcagtcaacaaaatgtccaaggcaagtcctaatgctgcctaataatgaatacagaatgggaatgataacatgacacaatggatggagatatcaaatcaagctgggaaaatgaagttagcagttataaccatgcacctattgtaaggcagataaactttcttaaacattaaaaaagttgcagctattgaactgcaccagagaatttctttctctgtcaagcattaacagattcaggtgataaccaagtaactcatttagccaattttaaagatacgcagaatttcattttagtttgccgaactggcaacccgaacaccaaaataagatcctttaaaacgaaaaagcaaaatatgaaaactgtgcattcaaagatcttaatgaaccacgaaattgtttacctgaacatgagatacgaatgataaaccagcagcttcaatggtcaaaagaagcccatgcaaggcccatatcttaagaccaagaacagaggttttggtcaaagatgagactgaattaacagtagcaggtactaaggacgacaatgccattcctcctgcactgcacaccatgtacaaaataaattcaaaatataacaaatcaacatgtcatagtagccttcaatatgtaaaataatacgtatctgcgaagattgataatattttaacttaattgttgttaaagcatcacaaccagacacatattagcctacttttcaatttttattgatattcacaacatatcaaactagttagaagccaactccacctgtgatgaatgcagccaagtgcaagagcaattgatccaccatagtttggatctgtaactccccttaggtcgccaagaagaactctggtctatttatcaccatgcaaaaacatatgtgagaaataaggaaatgttgcacgt

SEQ ID NO: 27286 - DNA, 7618 bp, Arabidopsis thaliana landsberg
  unsure (1)..(7618): unsure at all n locations
ttagtaattttaatgatatttctgtcaaatgctgtgattgtatgttgagcaaaactcttttggtaactagaagtatcgtatgttgaccaaatacatttttaggaaatagatatctactgtttatttggtcacatctatttagaactcaattttgtttttgtttcttcaactccttaatcaaaatcttttttttttgtacaactgtttttttctcgatcgtttagtactttattttcattttgcattatgatgacataatcagaaaacgtatatggagtagacatgtttttgaagaaatatatgtatagcaaaatgttatgatgattgataactatggtgaactgataatgcctcatcagtaaccatcaatataaacaacaatggggcttctcacgttatgtgttccatcagaccatattagatttgcagaagaaggcagttttgggtcgatattgctccctgaaacagtcactgtaaaagactgcttctccttcactgacttcatagatagaacacttggggagacctcgactttgaggttagatccgtgatttaagagaatctttgatttgtatgttgagtttggggtacctacgttggttacggttctgttgaaagtcacgatgaaggagctttcagatttcggcaatttagctgacattgaagggtagtttaggtttcttggtaaggtcttgccagtgcaagtgacagcttcaccagcgatgagttttagagaagtcgcattgtagttcaaaccacagagaaaggcgatgtggtctgatttgcctatttcataaacgagacctggatttatagctgctattgggtcaacatgtccagctccataagcaaactcggttgatgcaaccgcagttccggtagcattcatcggccaagctgcaaacgttaatggatagactgtttatgaacagagttgccaacaaagttatttgccgggcaagaaaatgaaaattggatatgagttttgcttaccagttgtcatgatggcagattggatcatggaaggagaccattcaggatgaaacgtcttgatgtacgcagccacgcctgcaacgtgtggacaagacattgaagttcccgacagaacagagtacttaacatgtctattatctcttttgtcttgagctggtgaattcaaaggtgaaaacgcagcgagaatctccactcctggtgctgttacatctggctgcaatccatccaccaaccattgtttctcaggtcaagaaataataataaaaaagaatcaagagcatgtaaatgttatataccttaagtatatcaaccgcaatagtgtttggaccgcgagaagagaatccagcaactttaggagctgcctggttaaagattgattcactttttagaacagtcccgtgcggggacctgaggatacaaacacagagatatcaagacaaagtaggggatctagaccaaatgaaaaaagagaagatcgttggttacttcgtggagttaacgtaagagatgacagagtcaaagtcatcttttgatagagcagaggagggcagaatgctaacgtaggcatagtcatggtaattttcatttatgtttgcaacaacgatttctgaactaactttatcttcactcaccaagattttccctctaagcagaggtccatcagtagaacctccatacagaggataattctttccttttaaatcaaaagcgttcaatgatttcccctgtttagacaaaaaaacaaaagagccctttgtcactgaaagggacaaatatactatgatgatagaaatgagagtgttacttgatacttacgacaaatgtcttgccgtttccgagtacaactttggtgacaaacccacggttggtgttgcttgctgcaactgtcaagatccatggtgctacactcatgactgagcccggattcggaccaccgttaccagctgactgcacagtgagaatacctttgaccatagcgtgaaaagccccaatcgctatcgggtccgtttcgtacgtgcggactaagtttgccccgagagagatgctgatgaggtcaacaccgtctgctatcgcatcatcgaacgccgatagtacagattcagtggtacaccccatctcgctacaggctttgtaagctgcgattcttgaggctggaacgccacctctcgcagttccattaccgattccgtagaaacttgtgttcttaactgcgtttccggcagcgattgacgctgtgtgtgtgccgtgtccactgtagtctctcgctgtttgatttgctttagatttggctgtgtagtctcttgccccaatgaccttgctgcaaaattagagaaattgttgttacccaagattaaaagtactcttaaactgttggacaaaattcccaagttagggtaagaagtgtacttacttgttgcaggtgaagtttttcccgccagcacaagttcccttccatttcttaggaggagggccaaagccttggtcggaaaagctgtcggattcgggatagattccactgtcgatgaccccgataatggtatcactctcaatgctacgggttcgcttagttttgatgccttctttgagacccataaagttccaagacgacgtcgtttgcagtttcagttttctacttgggaacacagacacaactctctccattcctaagaaaaaacattacataacatttagtgatgtggtgcacaaaaaaagaaaagagatacgattttgcaaatttttttgaatatatatctaacactgaaaaagtttttcttttaaactcctttaatttttctttctactataattctgtattcttttaaagatttttaaccagctagaaaactcgatataatgttaccggctaatctttttcgttcggattctgtgagtcgtgctgcaaacccgttgaaactctttttgtagcttctcaccaagcgattttcgatcaaactagaatattattaaaactttttagagttatgattttaaaccatatataagatataataagaggaaaaaaatcatttttaataaaacctctctccggtgatttcttgaagaatactcatgtgatcggacattggtgtgtactcttctcgagaaggaagtgatcccaagtacacgatatataccttcatggattgtcattatgtatgattggtcatatattacagagaaaccaagaaaaaaaaaaactcgataatcttaagttatgagaactcacttgtttatcttgagaatcatctgtcactgcagagactgaaattacaaacgagacaagaacacatgatatgagacaaaacgaatctgctcgtctcgccatctttttcttataaaatgaattaaaggttgtctaatttctcagtttttatcgagatcaacatgatataatttatacactagtataaaattagtaattttaatgatatttctgtcaaatgctgtgattgtatgttgagcaaaactcttttggtaactagaagtatcgtatgttgaccaaatacatttttaggaaatagatatctactgtttatttggtcacatctatttagaactcaattttgtttttgtttcttcaactccttaatcaaaatcttttttttttgtacaactgtttttttctcgatcgtttagtactttattttcattttgcattatgatgacataatcagaaaacgtatatggagtagacatgtttttgaagaaatatatgtatagcaaaatgttatgatgattgataactatggtgaactgataatgcctcatcagtaaccatcaatatacacaacaatggggcttctcacgttatgtgttccatcagaccatattagatttgcagacgaaggcagttttgggtcgatattgctgcccgaaacagtcactgtgaaagattgcttttccttcaacgatttcatagaaaggacactaggcgaaaccttgacattgagcttagatccatgatttaagacaatctttgatttgtatgtagagttggcggtaccaaggttggtgacggttcttttgaaagtcacggtgaaggagctattagattccgaaagtttagctgacatcgaaggatagttgaggtttctttgtaatgtttttccactgcaaatgacggcatcacctgaaattagtttaagggttttcgaagtgtagttcatgccgcagagaaaggagatgtggtctgttttgttcaactcatagacaagtccaggatttatagcggctattgggtcgacatggccagctccataagcaaactcggtcgattcagccccagttccagtagcattcatctgccaagctgcaaagattcattaagagacagtataagaacagagttgtcaacacaagttacttgcgatgcaagaaagtaaaagttggacttttgtttaccggttgtcatgatggcagattggattacggaaggagaccaatcaggatgaaatgtcttgatgtacgcagccacgcctgtaacgtgtggacaagccatagaagttcctgaggtaatagtgtagttcacacgcctattgtccaacgttgttgcagatggtgaaacaaaggtgaataagcagnnnnnnnnnnnnnnnnnnnngctgttatatccggctgcaattcaatcaaccattttctcttaggctgggaaacgaaagagaattaggtagcatcatacaaatgttatacctgaagaatatcaaccgcgatagtgtttggaccgcgcgaagagaatccagcaactttaggatctgcctggttaaagattgcttcactttttagaatagtcgctttcggggacctgagataaataaacacaaagatatcaagacaaagaatgagaatccagaccacatgataagagtatgaaacatggagatgatttgttcgttactttgtggagttaatgtaagaaatgagagagccaaagtcgtctagtgatagagaagagacgggccaaggttgaacagaggcgaactcttttttgtctctaaatatgaatgcaacagggacttgtgaaccaatcgcataactgcacacaacaatctttcccttcaccagagattcattattacacttctcaaccgatgtttcgtacacaagaggatactgttttcctttcagatcaaaagcattcacggattgcccctgttataaaaacaaaagagacatcgataatgagaaggagactaggatcatagaaatgagaacgtttcttggtacttacgacaagtgtcttgccgtttcctagaacgactttagtgacaatcctacggtttgtggtgctggctgcaacggttaagatccacggtgctacgctcacggttggattcggaccattgttaccagctgactgcacagtgagaatccctttggccatagcgtgaaaagcccctatcgcaatcgggtcctttccatacatgtacgcggtgtctcccccgagggaggcgctgatgacgtcgacaccatctgcgattgcatcatcgaacgccgatagtatgtactccgagctacatcctgctccgctacaaactttgtaagctgcgattcttgagtctggaacgccgcctctcgcagttccattaccaatcccatagaagcttgtgttctcgactacgtttccagccgctgtggatgctgtgtgtgtaccgtggccttcaatgtccctggtgccttcgtttgtatagtctcttgctccaatcaacttgctgaaacagtgtaaccagattcattattaatattaactctatagtttatttttgtaaccaaaatattttatgcccaaacacaaaactaatttcttcaaaatacgtccctaatactaatctttattgtaatttaagagaattacttgttgcaagtgaagtttttgccgcctttacaaacacctttccatttcttaggaggaggaccaaatcctttaccggagaagctttctgactctggcgaaatcccagtgtcgaaaactccgacaatagtatcactctcaacggccaagtttcgttttgtattctttccttccttcaatcccatgaagtcccaagatgccgttgtatggagcttgtacttcttgctcgggaacacggacacaactccctccatttctatcaacacaaagggttttaaaacgtttagccttaaaaaacatttcaacagaaaatgtacgtctcgatggaagaacactcaccggctactctttctcgttctgactcagtgagccgggcagagaacccgttgaaactcttcttgtaacttctcaccaaacgaccttccatcgaactaggaaagaaatcacttgttagtatcttatcttcataacaatttttaaaaattaattgtaactaatcacacctttcgccggtgacttgttgaagaatacttatgtgatcagacgttggtttgtagtccggttgagacggaagtgaacccatgtagacaacatacaccttcatggattgttatcatcgttatcatcgtgaactatggatcaaatgatagggagaaacaaaatttattgattattctttatttaattaaataacaaacttgtttatcttgacgattatatgtgtctgccgagacaaaactcaagatcaatgcaaggacacatgcgagtgcacaaaatgaagcttctcgtaatttcgccatctttaaaacttttttttttttttttaagattactgcaactttttattttctgtggagatgtattgacatgaaatgaaaggatatttttctatactactaaacagtttttatacaaaaatttacttttcaaaatttcaaaatttaatttcttacaatatcttagagatcttctgataaaaatctgtttattcctagtcgacattcgttttattatttatctgaataagaaaagaatcttaaggtatttgactactagatatttacttgactacttttcgtaaaaacttcaaaaaattatagaaattattaatttgttgtcctataaatcttgttatatttgactactacatatttatttcttaaaatatttctacaccataaagtttttcctaaatattatgaacgatatgtgtatactatacataatagttatttcttaaatttaatactatatactatgggatttatactttttaatcatatgagatttatcatcatttgtttgactaaattatcccaaaaggagagacatgggctcattatcttcaagcccaaaaaacgttttgcattgaagccgattaaatcattttattgggcttgaagataatgagcccatttaagagaaaaaaatggtcggtcaaactcattgccacgtcatctatagttcttaaagatcatcttcaccaaacctgtagtcgtattgttcttgaacatctccgaagctaactccgaacatcaatactgtatcttcttctcctcctcctccttggcccttttcacaaaggttagttacttctcagaattcctactttatgcattggagccgtttcgaattaggaaatccaataatgtcagcttttgtaaaattcccatttcgactaaatttagtcaaagcttgtgacggcgtgataaacaaaccatgctgattctcaaaggacggtataaatgtcntctcttcgatatagaaatcaatgat

SEQ ID NO: 27287 - DNA, 2308 bp, Arabidopsis thaliana landsberg
  unsure (1)..(2308): unsure at all n locations
attgcggctggccttagttttcaggttcaataataagtgttaattggccatgagaacaccttcaaaacgtgacttggcaatggctgttaccacaaagaatccaaacttagtatggctttgatttactagtgaattattttgtatagtcatattcaaatatttaatcgcaataatataatcatgaatttgaacattttcatagatatttatcttcaaatgtagcaaaaaaaaaagactatctagaatttattccaagttatctagaatttttcagctaagaaaaacttatactatgtgacattcttgaaccaatcctaatagaactagttgttcattgttaggtttcggcaaagacaatgggaaaacaatctagtgagatttgtgtcttatacaactctgacgaataaagatacttgagacctttaatcattgcgtgaggttttcaattttgatacctacacataaagctaagtcactcctttatacaatctttgatgatcgaagactaaactatcctgaaggttcacttcatttgatcactgatccacattttagtgtttggaacaattgtgacttttaggtctaaagaaggaaatttttgggttataatttacatgcgtagaagaaaatataactatcgtgatctattaaatttaagtctaataatagctagtggttacacatgtttagaataacacattaacttcgtttcttgactaattttacctcaaaacaaaaaaggtaacaataatgttatcccatgagaagagaagcaagaatctctcccatggttttctcaggcgtgtctccgttgtcatctacgtgaactccggactctagaaccgccgcatcaagaactagtttccgcttcgctatctcgtagatgttctcatcaaccgtcgatttcgtcaccagtctgcaccaacatttgccagagttaatatgctatctctaaaacgttttcactgggccaaggatttaaagctcaaacctgaagatagtgactggttttgtttgaccaatacgatggcaacgatcttcagcttgccgatcaatctgtggattaaaatccatatcgtgaataatgactgtatccgccccggttaaattaagaccttgtccacctgctcgagttgacaagagacatgcgaatatcgacttatcgttgttgaatgtgtcgactatggtttgtctatctgtaacttgagtactgttgaaacaaaagaaaatgacttaagcttcttcctttttgtagaatcgtcaaaaatgtgacaaattactcttttttcttttattacctgccgtcaagtcttcggtatgtaacgccgatgacatcaagtgtccattctaagatatcgagcatcgatgtccattgactaaatattagaacacgatggccggatttcttcattgaagggagaagctcagctaatgtctgatacataaagggagatttagatcgctcacaggtttagttatacttaatcagtttcacaaagaagacttatgaaatgaagaagaatatcacgtacccgacattttgctgagagcatgacatgtttgtctgagagagttcctttggtatcgttaactccatattggaacaaaagctatggaaagaaacaagttagttagcttcttcaattgcataacatgtttgttaatggatattcaactgcttttggaaagagaaacatttacctgnnnnnnnnnnnnnnnnnnnnnnnncttaacttcctcgataactctatccaaggaacattcaaatccaaatgcaccgattgggtgcaatttcctggcgatgcgaatgacatcctcatcgctgtatatccgcctaattaacaatggatggtttgcaatctgtacaaccaaaatttaataacacatgaataacacactcatttggcacaaaaggggctttgtattatttgtttagaattaccttccggaattgagtaaaggaggttgaaatttgacgctttggaagtgccttggctaaagaattcaaggattttgatgaaagcttcacaagccgtgcttgagaagcagcacgatactcctctatggcttctttatatgcatcttcctgctttctctccattaatacatattcaacctgcattggattgatgggaaattaatgagatttgcagctaagaagattaatatcgtgtacttaattgtgcatagatatatccatacccgctgtatcttcggaacaagttgctgcatgacatcagattttaaacgcctcaagatgaaagggacctaaaatggattccattcaagtaataaactaagatttttt

SEQ ID NO: 27288 - DNA, 2594 bp, Arabidopsis thaliana landsberg
tttaatcactaaacgaaagcaatcactcatcaccaggccattgagcaagttcagagacaaagaagacctctagttactggttccgggtcattggagcttacacgagcctaattttgactggaactatggtttattgaaagaagattcaatacatgtatatataaaatatatacttttttttttgtttcagtatcatccttcttctcttttccttacaataagaattaagaaaaagtagccgtgtttgttaacatgggccaagaacaagcaaagtgatcattcaaatataaaagtagctttctcatggaatacaacaaagaaatgcacatgcagaagaaagtagatttaactctaaaagtacagaagcaaatctatgaattttactacaccggcaagtgtttcatcttggctcagggcattaagccaagctatactctttgtcgattcaccagttccggcaaagtagtctaaaccactatgctcataacaatgattgttgctcacggacatacataacacaaccaataacgatgaatcagaagcagacctgtgtggtatatcatggatgatgaagatatgctgacagtatacatgtatgcatcatcatcaaactgtagctgccaagcaattcacaatggcagattcattaggaaccgtaagcacggtaccagaccattcaatttttccccaaatctccctttctccacgccttccaacatcaatctccgcacaccaaatctccattctcctagaaccaccactaccagctttaccttcccacaaaaccgtaagctttccaccacgattagccattgtagccccacaaagaaactttggaagtgactccacacctttcagctctctccaaatcctctcttttggatcataccctctaatctttcccaagttttcataacacgtcaatctgttctcaatcacacaaagcttttgcttttcatcccaaattaagctttttcttaggcatctcccatttctttttcttgggtctgtaaacaacaccgtttcgagcaggctttgattaaacctccccttccataaccgcacttgcgtgcatccatttctcacgaacctccatacctggactagccactggctcccaagtttgagtctttatatcaaacatctctgcccagttaatcgatcgagcccaattatcaactacacatcctccaatcacataaatcttcccatcaattacaccagctgctgcaaattcacgacctactctcatattagagactcgtcgccaagtatgaaatctgcaatcgagaacccacacgctcgaagaaggcacgtctctaatagatccaccgatcacgtaaatctctgaatctaccacaacgtaagcggatccgactagagacggtgaaggacaagatgggattggaacaagcattttcgaattcgttgagttcgataaggttcgatggaggagagtgaaccaacacgcaccagattcaggaggtatacggattgctacgtagaggatgttttcagtggctccgacgagagctctcgtggcgtagagaagaggtgatgttgggagagatcggaaagtcttggagacgagtgagaggattggatagtgacatctagggacgcgagcaaggccattgagagcaacgtcttctgataacaacggaatcaattgcgccggtgattttgtttccggtggttcgtcgccggagctcgttgtagccgccattgatccgtttttatcagtctttatttccttctcaatttaaaagagaaaattaattttgcaattattcggttcggttcgattcgattaagtcagacaaatccgagaagagaaagttattttagaaactaaaccggtatttaaaccgatatgattgtgccgttatctacaagtgctgacgtggcgggaagcatgatctcgtggtttgaaagaagccacgcgcttcctcgtcttcccttcgtcctccgacgtttccaattgggagaagaagaagacgacgatgaagcatttatctgattctgggtctgttgaaaatcaaaattttcttgagaactttttttgaagagttatgattgcattagctgcttcttcgttggggaatacaccgattgcttcgtttaaccgtcattttagattccggttacatccacgaaaccctctgatacaagcagcggtttcaccttcgccttcttcttcttctcctactgcttcatctggctttgatttgagttctctcgaatccgccattaacaaggtcaattcagttcacaacctttacatgctttacttcttgattcgatgaactctgcagttaaagcataattctgaaagtgggatcatttgttgatgcagaaagatagtaatggtgttaaggaagctctcgataaattgagtgaagaaggttgggctaagaaatggagctcccagccgtatctttcgcgccgtacggtgtatatcgatctctctatctaagcttatccttacgatttgttaaaaccatcgattagtcgattagtcagtaagagtgaagaagtgatgtgtcttttttttcttgtatcagacatcactgcgggagctgacaactctcggt

SEQ ID NO: 27289 - DNA, 1068 bp, Arabidopsis thaliana landsberg
  unsure (1)..(1068): unsure at all n locations
aaacgtcactagtttctggatggaccacattaagacccactgctatgtatcggtaagaccgcttcttcaaatccttttgatttacaaaaatgttgattctgtttgtgtactttcgaattcaattatctaaatatccaaagaattttgtgtaacatgagtgagttgtgacgtgactgcagtatccctcggttgaagaagcagcagcaacaagagaagcagtgtataacctccagtggccacctaatggaggccgccatctgatagctgaatttgttagagcagaagaagtaaaagaaaaactggaagctcctctgcctcctcctcctcagcctcagcatcagccacaagctcagactctttcgcggccacctccaactgctcttccaccaccaccacctctggccaaaccacctcacgtcgtagaacgtcttcctctgcctccccctcctcctatagcccctgaggaacaagaacctcccattgtcactcttgatgatctattcaagaagacaaaagcgatccccaggatatattacttacccttgtcagaggagcaagttgcagctaaacttgcagcgaataataacaagtgatcttgctggttcttgggaatttcaggtcattgttttcgtagcaggctcnnnnnnnnnnnnnnnnnnnnngacaaaagttgagtactctgttgagtttggtttgttatttttaatgtagaacggatgggaagactcttcttatgtttagtagactttggtttgaacctgtgatgaactaacagagttgtttggctctctgtgtgttagatcttttcctctccatttcttctttcaccttttcatggatctatgaacaattgttgggtcaaaaataaagtaatagcagcccaatattaccaaatttcaaatcttgcaacttacttttagatcatgtgtcaaacctagtaatgggcgtgtgtcaatggaataaccttttaacacttgataacataaacacacaaattgtacactttcacaaaactacaaagacgaccaagatacgttttagacacatcacacatacatcagtaattac

SEQ ID NO: 27290 - DNA, 1205 bp, Arabidopsis thaliana landsberg
acaaacatgtctccttaacatgctacattctttcttctactaacttgctctgtggctgagtgtgattcgttaccaatgatcacttcaggttgcttgatattatttgaatcaagcttccataatgtttgtaaaagaaccagtttttcccactatatggtggaagtgtaagtacttaaagatgatcttttgatgttataaaaaacacatttttctcccgggggggagaaactggtgtcataagaaaacagaaatagaattgaatccagaatccagaacttagaagtatcaatcatatatctttaagcatcacagaacaaaacgaccccaaataagcaaaagttaaattttctgagaattcttcttttgttctttgggaaaatgcaacttgataagagaaggaagatcgactagctccactcgctgcttcccgagcaaaatgctcttgagcttctcatcacaaatcaccacattcttgttcttaggatcctgtaagaaacaaaaccaatcagtcaatgagacaaaacatttttaaaaaaaacatctttagcttaaataacttaatgatcaaacctgaagattgttggtcttgatataggaccagacacgcatgaaacaacccagacgggaaatctgagattgaccaacaaagtcccgtagagtagatggaagattcacgaggtcaatcaaattcccaagcttctttggattatccgttatagccttcttcaacctctggggcagcatcctgattctcaacccacgagtaaaccagaaattcgactgccgcggaaaagcaaaagagaaaaaacgttaattaccactgacaatccctttggggaatttcatcgagcatgtggcgtccaaatgaaaagcaaacgaccctacgtacaaaaagctttttaagaaagcttacccgtggaaatggtagaggaaattgaaagcaacaagtccgtgtaaaccaactgactcgcttttaacccgtaatgcttgcgatgttttacgcttcgaccttggaggtattctcgcgtttgaacgctggagctgcgatagagtcaaaaagtcttcttaagaacaaggaagagactacattgtgttactttgtgacttgactattgggccgcgttttcttttacatttgggctgaataataatatatccttgtgacttggaatgatcgttgtggatgacctgtaatgcaataattt

SEQ ID NO: 27291 - DNA, 1216 bp, Arabidopsis thaliana landsberg
  unsure (1)..(1216): unsure at all n locations
ccctgttttcccagctggggagtgtattttgaggatcagtgtgtaccagagtgttgtttattcgcaagattatatatcaatgtgtttggagagtaaagagactgagaagactttggtttcagataggagctgttggtgtttgtttaggatgtcagctttgaatcagaagcctggttgcactcacatgcatagggattcatatggcaggtttgctgctgataataagagtggggacaatacgagcttgggctggaatgattacatgaaaatgtctgagtttgtgaacccggaagctgggtttttactcgatgatatggctgtctttagcacttcgtttcatgttattaaagagttcagtagctttactaagaatggtgggttgattgggggaaggaatggggctggagctaggaagtcagatggacacatgggaaaattcacttggagaattgaaaatttcacaaggttaaaggatcttctaaagaagaggaagataacaggtctttgcatcaaaagtaagaggtttcaaatnnnnnnnnnnnnnnnnnnnnttattgtttatccccgaggtatgtaagtgtactagattatctgttttatacggtagacatggaaccaacaatctccttttcaatattctgtttttccttcctatgagctgtctgattgctgcatttgtagtgttgaatgtctgaactaatggtcttactcttaatggcctcagggcagtcccagccaccatgccatctttcagtatttcttgaagtgacagattcacgaagctcaagtgattggagctgttttgttagccaccgactatcagttgtgaaccagagattggaggagaagtcggtgacaaaagaatctcagaatcgctactcgaaagctgcaaaggattggggttggcgtgagtttgtgacacttactagtttgtttgatcaagactctggctttcttgttcaagacactgttgttttctccgctgaggttcttattttgaaagagacatctgctacaaaagagtatgtggaggcagactcaactaattcagtttctccgactgataacagcgtcaaaaaaagttcatttacttggaaagtggaaaatttcttagccttcaaagagataatggaaacacgaaagatttttagcaaattctttcaggctggtggatgtgaactccggattggtgagtggttagtttttgccagtctct

SEQ ID NO: 27292 - DNA, 1361 bp, Arabidopsis thaliana landsberg
tatccttaaatggaaatacgtacttcttgactcaagagcaaagagcaaaagataagtatcgtgttttcttgctttgttttaacttcacaacggagaagtttgaaaattttattgctatgccgtttaagtatcataggaaatacgttggaacactttcttgtgttggaaatgaaaaactagcggctctatatcagcgctgggatacaggcgagatggccatatgggtaaccactaagattgagtccaatgaggtgttgtggagcaacttgtttaaagttgatatgaaaccactcgttaggtttggctttcaacaatgtaaagatgaagctggcagttttttcattgacgaagagaagaaactcgcggtggtttttagttcaaacaaatcaaaatgctacaaaacagcttacattattggagaagatagatacttgaaagaagtggatcttggagaatgtaaaccattgcgtagcccaattgtgtgttttagcttgtatgttccaagtttagtgcaaatcaaccaaattgcagtacccaaaaggagagagaataagaggaagaggaagagcaaaggaaagggtagagaagtgtgagggaccgaaccaacaaggtttaccactaaacgagtacatgaagactaaacattaacctactagctttttttttatgataataggtttttttcttttcttcttctatttagttaaacaacagttttagaactttgtcatttatggccttccaaagatacagattaactttagaaccatctcacttgcactagttcctactttatcccaataaaaataaacttctcaaaaaacagaatttgtgtttgttcgtttgggtaaaactttacatgtaggttgggcccaaagaataagaagaaaatagtgaaagtctctgctattattacaaaaacaaagcttctaagtaatcatcaacataagctaagcaaggccaataatctgttcttatatgcaccaatgtcgatccttgcccaacttccatttcaaacattagatgatatcttggcggcagaaacatcagcatctttatcgttcccattttccccctacttctcgtcatcggtacctcttggtcatctccatatccaatgtatgtcagacgaagagggcctcggtttaatcccaccgaggatgaagaaggctggtccgcatttgtgtgatccccttgttcttcttcctcttccttccacacaatgttctcgataattcctccgtctcttacaatgtttacaagctgttctccactgatagccaccacaaagggcgctaaacgaagctcagtggcctgtattacagtttccgcagggacttcaagcagttttactgaccgag

SEQ ID NO: 27293 - DNA, 1956 bp, Arabidopsis thaliana landsberg
tagtgagttaaaataaataccttaaaatgttgtcaaaactatcaaagcatttatgtatgttgtttaacaaaaatctactatatgtatattagtagttttcattttttctaattagttgaatcaaaggcaagttcgagtgtcattccaatgcagtctactttgtcagctttcaaggtataaacatatcatatctttctgattaatctaattactaatcatgttgttaaatacttaatcatcaatctttgtcttcaccattgtcacttcaccatcaatcatcaatctttgtctaacacacatctcttaaaaacacttcacatccattttacaaacactccaatttataaaagtaaaatttgttttggtgatattttgagttattcttttatttactaaagagatttcgaaccatatttaaatctcctgatctttaaaaacaccaaaatttggatccgagaatggatcggattttagactagatctcaaattcctagtattatttttccagtgcttccgaaatttcgtaagaaacaaatatttttgtatgcatttatggattagtgttactgtgttagagattacatcttatttgcatatagtgctgtcaagttcttttagaaaaaatgtgtgtgtaccaaaatttatcctctttacatggcaaggtttaagaaacattcaacaactattctataactcacacattttaatacgataaacagagaaatatcacacaacaatacattatgtatctgtttatgtataaatgtaacatagttttggaggagactcatgtttttcaaaataccccttgtgatgtttcattgcagaggccatttaatgggtttggagaaaacaatgcattaccattgagaaagatgcatcaagaggagaagaagaagaaacataggggtggacactggacactttcagaggatctcaaactcaaagagcttgtggcggtttttggtcctcagaactggaaattcattggagagaagatggaaccaagaacaagtaaaatattgttttttttttctttcgtacttactctatttttggacatgaaagttgaatctttttttcttgtttttctatgtgtttgaaggtctaagttgtagacaaaggtggtttaaccagctcgatccgaagattaacaaaagaaatttcactgatgaggaagaagagaagctgcttagagctcacatattatatggtaacaaatggtctaagatcgctaagcttttcaatcgaagaacagaccatgctgttaagaatcattggcacagtctcatgaatagaatcattaggaagcaatcagcttctgacataagatctttcgataacatccagaattatcaaacctccaactttcttcctggtttgtgtctccttaatactaaacaatagatttaaaacaccacacagcaatatgggttcaattctgagttcttgatgtttattttttcttattgtgtggtttacaggtagtgtaagtcatgaaagtactaacctcaatgctcaatatctccaagaaaagaattattcttcatgcatgccattgcaacactcatgtcatcatcatcacttctctaccttccctgcaaattccttggccttattcacacctcatgtctccatctctcaaccatcatcatcatcgttactatcatcatcagaagcagaagatataatgactacaacaaccccgaggtatatagattttctcggggtaggagattcttgaagaaactacttaagaacttcctaactgtaaccttaattccaatgatgaggactgtgaaacgtaacctaacaaggttgcatttttacaaacaatgaaaagcaagagtttgttcttctatttctcgaaattctagtttcaagatagtgtcaaaacaaagagcttgtttttctatttttttgaagtttctagtaaatcataagtacatgtttacc

SEQ ID NO: 27294 - DNA, 1871 bp, Arabidopsis thaliana landsberg
  unsure (1)..(1871): unsure at all n locations
atgaaaattggttgatgggtttctcttagacatccagattcgagcttccaatgcggtatttctccgttaaaaaaccctaatttcacgaattacgtctgatctgtgtagaaattagggagtgaagtgtccgcaagtgtttnnnnnnnnnnnnnnnnnnngttttgcatttctcctcgaattcttcaaatcagtcggatcactctatacccgacaaaatcgccaagcttgaggcccgcttgactggtaagaccccttcctcggccaagccaccacaacaacaacaacagcagcagcagcaggtctctctctggtcatctgcttctgccgctgtcaaagtcgtcacttccacaccgccgggattgtccgaaacctctatcagtgattcagacgacgaggtagcttccgatgtttgtttcaaattcttttgtttatgtctatgctatgattcttgtgagtctaagggtcgttgctaatcgaattgttgatgtccctatcctccttgtattgatcagtttgtgcctaaagattgatcaaagttgtatgcaatgctggctacatatcctggcattgcagatgcatctatatttctttcttgaacaagaaatacagtctcttttttagctagatctcattctccttgttactgtctcagaatactggagatttcctaatccgagcaaatacaaaaaagcgccagaaagttcaagaatctaacaacttcagtgttgttgatcatgttgaggtattgatttttcataaagagttttcttttagtctcttatcgggattgatgttttttatatcaaataatggtgtatgatgtaagttttgtctcctagtatttctcatcaacttataatgaagaatattgttgaattgaagccacaagaggcagcatatgatggaaggaaaaatgatgctgagtccaagacaggccttgatgtaagtaagaagaaacaaggtcgaggtcgggcttcgtcaacaggtagagggcgtggttctaaaactaataacgatgtgacaaaatctcagtttgtggttgcaccagtatcagctgccagtcaactggatgcctctgatcaaaaggttagtattgtttacctcatcggaccttacatggaaccactcttctcatcatcgaggatttacatatatgagacttaatttcgttgacaaacgtggacacaaattatatgttttcctgaagtaaaaccttttaattggcctgtatgaaaaaattaagcaggacaagaaagaattactatgccttttcctacctttttttttgctgtttgcattgatgttgatgaccagacgcagtttatcaatgaatattctgcattttattctccaggattttaggcctgatggacagctcaggaatggtgaatgctctctccaggatgtaagtttctcctataatgtcttttactctgtaatattggagaatatgtttgtgtctcatcgtctaggactaagctgcatgttctaagttggttagaataagtgaacgggattattatatatgattatcctacaacaatgaaactgtacaattatatctttctttattcactattttgttccttgtttataaatcaggaagacttaaaatctttgcgtgcaaaaatcgctatgctggaggaggaattgcgtaaatctcgacaagattcttctgagtatcaccaccttgtcaggaatcttgagaatgtattgtgtgaatgcctttcagatttagctatttgtgcctatgctattaccatttttatctattcccattccgctctgcttataatcctagtaatgatatatgcaggaggtaaaagatctgaaagatcaggaacaacacgggaagcacaaggtacgcaaac

SEQ ID NO: 27295 - DNA, 1474 bp, Arabidopsis thaliana landsberg
  unsure (1)..(1474): unsure at all n locations
agtttcaaattctctcaaaccctgaatttcttgctgagggtactgccattaaggatctttataacccagaccgtgtgttgattggtggtagggattctgcagcagggcaaagggctattaaagctttaagagatgtttatgctcattgggttccagtggaacaaatcatctgcacgaacctgtggtccgctgagctctctaagcttgcagcaaatgcattcttggctcagaggatatcatctgtcaatgccatgtcagctctatgtgaggcaactggcgctgatgttacacaagttgcgcatgccgtgggtacagatactagaattggtccaaagttcttgaatgctagtgttggttttggtggatcatgtttccaaaaggacatcctaaatcttatctatatttgtgaatgcaacggcttgcccgaagcagctaattactggaaacaagtcgtaaaggtgaacgactatcagaaaatacggtttgcaaaccgggttgtttcttcaatgtttaacacagtctcgggcaagaaaatcgcgatcctcggttttgccttcaagaaggacacaggtgacacgagagagactccagcgattgatgtttgtaacagattagttgcagacaaggccaagctgagcatatacgacccacaagttcttgaagaacagatcagaagagatctttccatggctaggtttgactgggaccaccctgttcctcttcagcagattaaagctgaaggtatctcagagcaagtgaatgtcgtctcagatgcttacgaggcaactaaagatgcgcacggcctatgtgtcttaaccgaatgggatgagtttaaatccttggacttcaagaaaatctttgacaatatgcagaaaccagcttttgtgttcgatggtaggaatgttgttgatgcagtnnnnnnnnnnnnnnnnnnnnnnnncgtctactccattggtaaaccgcttgattcatggctcaaggatatgcctgctgtggcatgaaggtgccaacttcaaccaaactatatgtcttttctaaaatatagtatcttaagattccttataaattctgttgcaaccaagctgaaacaatgatatgtatttgctgaatctgcattagctggaatagcatatgaatttctttgactatttgccttaccataatagtatgctaaaatcctcaacaaattaattgaaattttggattaagtgtgtcattggaagagataagtaatgaagtgtaagactgtcaaagcgataaggccttgataaacaaagtgtattgcttttcaatttggggtccagctcgattttagggaagtgtgcgggtcacaattccaatctagtgttttgggccggctttgcttagataatatagatccaggatcctagatccacttatttgatattatcttatggtcgtcttcttcaccaaaagtttcattgtaaatccaaaatcttcgtctggttcgcta

SEQ ID NO: 27296 - DNA, 7104 bp, Arabidopsis thaliana landsberg
attttttgaagatagttaaatgtcaaatatttaattcaaagatttactttctaattatcaaaaataattattaaatgtcagtggcagccactgtaaataagtcccaacttgaggatttatttcacaaagtgactgcaaaaatgtatatatagatatatgtaaactttagctgcaaaaatataaaaataaaaataaatgtcaattttatttccactaaaccctattcgtacagtcgtaacatatttgtacaaaataaagttccacagaccataaacatcaaaaaaaaaaaaaatggccatcttcgatccgtttaagctccaccataagccgccgtcgatttttccggcaacaactgtaaaaccaagccatgttctttccctcgtcgctaagttcttcttcaccatatgcatcttcatctccgttgctatgatctccttctacataatcttcttcggttgctccgattgccaccacatcaccggcctccgtcgcttaggtcctgaaaatgtaaacttaactaccaactcctcagcctcctcctcgactatccgccggccgaatcagtcctcggaggctactgatatctcccacatagctttcgggataggtggctccattcaaacgtggagagatcgcagccgctactccgagctctggtggcgtcccaacgtcacacgcggcttcatatggcttgacgaagaaccgcctcttaatatgacatggctctcaacttctccaccgtaccaagtctcggcggatacctcccggttcagttacacttgctggtacaaactatttctacttctataacatcattatttcaacgagatgatcttagtcaagttaagtcaagggtcaatgtttaaccattgtgaaaatgtatttggatgaatacctaaccatacaaaacctataattttattcattcgatttccactttttgttttaaggtatggttcaagatcagctatacgaatggcgagaattatcaaagagacttttgagctagggttaacggacgtgagatggttcataatgggtgacgaggacaccgttttctttgtggataatcttataacggttctaaataagtatgatcacaatcaaatgtattacatcggaggaaattccgagagtgtggaacaagacattgttcactcttacgccatggcttacggtggtggaggaatagcaattagctatccattggccgtcgagcttgtaaagttactcgatggttgtattgatcgctacgcatcgttatatggatctgatcaaaagattgaagcttgtttaagcgagattggagttcccctgaccaaggaactagggttccatcaggtatattcacattttcctttttgtttttctcatgattactggaaattcacttattttgacctaatcaataaatggaaatttactattaattggtttctagtttttagctgcaaatactgaatttccttttatttgaaattttgaatattcagttttaaatttcaaatcgttcaaaatttttatcccttgccagatttaagattaaaataattatcaaaaaaaaaaaaaatgtttagacgcttcaatgctcagatttcggtgtcctgtttttatcaacgatttacttcttactatgtgaaattttaaatttttagtcttggtgtaactatataactaactaagtgacatttctaattataagatcgggatttaattatttttctttgcatggtaaaatccaggttgacatacgtggcaatccatacggcttactagctgcccatccggtggctcctctggtttctttccaccatctcgactatgtagatccaggggtttcggggacgactcaagtagacgccttaagaagactcgcatcgggctataagacggatccaagccggatcctgcagcacagcgtgtgccatgaccagacccgtaattggtatgagtccgttgcatggggctgtaccatccaaatttatccaactgtggtcaccgctaaggagcttgagacgccatttcttacgttcaagtcgtggcggacttcgagctctgagcctttctcgtttgatacccgacccatcattgaagatgcgtgcgagagaccccttgtctatttcttggaccgggtttatgaggtcggttcgggtcagacgcttacgacgtatcggatatagatgtttatagaagagatgattttattacatagtgagaatcacaatatatatacaagagtgagtagctagggtacatcaacgtaatgaatgagagtatatacgactttacatatgtgtatccatgacagtagcaatctaggatatcaatcatatcctcaatacgcccccacaagatggagggactttgatgactccaatcttgcgagagaagttctgaaaagcgacgcgggacagaggctttgtaagagtgtctgctaattgatcatgagtggagacatggacaacacgaagtgcaccagattgaacttggttacggatgaagtgataatccaacgcgatatgtttcatccgagaatgaaacaccggattggcacatagataagttgctcccacattgtcacaatagatgaccggtggatgtgacaattgaataccaagttctgtcaataaggaacaaatccattgtagctcagatgaagtgtttgccactgacctgtattcagcttcggtagatgagcgcacaacacctttctgctttttagaggaccaagagatgggatgatgaccgagataaacaatgtagccattagtggagacatagtcatcggtatcgccggcccaatccgcatcagagtatgcgtgtaatgataatgtgttgcctttcttaagaaatatgccatgatccggagttccagctaagtatcgcagaacacgtttcagggcattccaattgtcatctgtcggcatatgcatatattgtgacagacggttgaccgcataagagagatcaggacgagtgaatgctagatattgtaaactgcccactatgcctctgtattctgtcgggtcaggcagtttggtaccggagtgcagtgtcaactttggtgatgttgccattggtgttgcgaccggcttcgcggttagcatattggtgcgagcgagaagatcaagtgtgtaccgacgttggctgaggtgaagaccttgtgggactcgttttgcttcaatacccagaaaataatgtagatcctcatgttctttgacagaaaaacgctgagacaatgcatcgagagtatgttttaacaagaccgtgtcattccctgtgatcaatatgtcgtcaacatagacaagcatatagataattgatcgacctcgttgcaacacaaaaagtgacgtatctgagatggaattcacaaaacccaccgttagtaaataagtccgaagttcaacataccatgctctaggagcttgtttcagcccgtaaatagctttcttgaggcggcagacataatcaggacgatctttatcaacaaaacccggtggttgcgacatgtatacttcgtcggtaagtgtaccctgtagaaatgcattattgacatccaattgacggataggccaagatcgatcaacagccacacccaagacgatacgaatggaagttgatttgattacaggactaaaggtttccgcataatcaagacccggtctttgattgtaacctttggcgacaagccttgccttataccgatttagtgagccatccgaattgaatttcttagtgaatatccaacgacaaccaacgatcgtgacagatggtggtggaggcggtacaagatcccatgtatgattgccgatttgagcatttatttctgatcccattgcttgtctccaacgatcatctttcattgcctgtatcgctgtgcgtggttctgaatttgcagccagtgacgtggcgtaagagtacttttggttgggttttctaatgccatcctttgcccttgtagccattgaatgagtattgaccggagcttgagcgttgacttgaataattggtggagcaggtaacacaggaggtaacggaggcgtagaggttgatgaggaggacggcgagtttggttcagagatactcgtcgaaggtgttggtatgtggggtgatgagattgggctttgtggtaatgggctattttgatttgggctatttggacttgggctgtttggatttgggttatttaaaattgggctatttgaatttgagttttgtgtttgatgtggctgggccgtgggttgcggcccattatgacttggagcagtgggctcagaggaagagggagaagaaatcgaagaggaaggtaagttagaagacgatacctgagtggtgcatagtggagacggcaacgacggtggacgaggcgacgtatcaaggtgaggacccaaacacgggggagccggcaaaactaacggtgttgtgggtagagttgtatgagatggccaattcggagctgaatcagaacgctgttcttgtgacgtggatacaccgaaatttgttgtagagaagggaaagcaccgttcgtcaaactgcacgtgccgagatgtgtagagtctgccagtgggaatgtgaagacacaagtaagcactttgagtaagagaataacccatgaatgcacattgttttgatttgtcttctagcttgtgacgattgtacggtcttaaccatggataacaggcacatccaaaaactttgagcttctcataattcggcggttgtccaaaaagtttctgaaacggcgattgaagctgaagtagcggtgtgggaagccgatttataaggtaaactgccacagaaaaagcatacggccagtacgtcttgggaacagaggcatgagagagtaaggtgagacccatctcaactatgtgacgatgctttctttctgatagaccattgtgttctggagtatgcggtggagaggtgaaatgagagatcccgtgttgcgataaataatcccgtaagaccacaaattcgcccccattatctgaataaagtgtaccaatccttgtttgaaaacgattttccacaagactcttgaagataatgaacgtatctttgacttgagatttctgttttaatggatataaccatgtataacgggtgaaatgatcaacaaagatgacataatagcgataattatcaatagaaagaattggggaactccacacatctgaataaatgtattccaatggtttagacgaagtgattgttgaatttgaaaaaggcactttatgacttttattgataaaacaatctgagcaagaaagaagtttatgagaggggtttaaaactggaagtgaatgattggaaataactgaatttaaaatcgccaatgaaggatggccgagacgggaatgccatgaagaatgagtagctttagagcatggagacgcaaacatagataccgcttgagacgatgcaataggccactcatacaactcatctttagttttgccttggagtaatgggacccccgtgttgagatccttcacctgaaaggatgcaggaaagaattccacagagacacgattagtgttgcataagcgatacacagagattaagtttttgtttatatttggaacatatagaactttgttaagatctagtgagcgagaactagtaggtagagaggcagaaccagtgtgtgttatgggaattgtggatccatcggcaatcataacatcatcaccaccggtgtaaggttgatggaaagacagattgttgaagtccgacgtgatatggtgggttgctccgctgtcgagaagccagttgttggcattgtatggagagttgacagcgagattggcgcggggctgccatggagtgaacggagaagtcgattgctgttgattggtggttgattggaattgatgaagttgagggcagcgtttggcactgtgtccttgcacgctacatatttggcatcggcccaagtagggtttgggctggcgattatcggatcgagagccagaagacgatggctgccaagagtttgagcgattgttgttgttgttgtagttgcggttgtctccacgattgttctgattacggttggtgttggtgttgcggtgagtaacgacattggcagtgattggtacgacctctgccgagttcaaagcaagaagtttgctctcttgatttatcagcctctcatggatctctgtgagagacggtggggtatctttggcggcaatttgatctatcactggtttgtaatcatcaggcagattttccagcacacgttctacttgctcgtcatggtccataggttttccaagaagcgcaagttgatcgaatctagtgatgaatccttgcatatagtcatcgatggttttggcacccttcgtccattgcttcagctgcgtacggagttgagtgacatgaccatagcttggattcgcatagatcttgcgaagtgtctcccagatctgagccgctgtagtggctcgagacaccgcaggttgtacggacatagagatggctccaaggattgcactgtagatgagcttgtcttgtcttctccagcgagtgtagtcgggattgacacgaggaaccgcatctgtgccaatggttgcaggcggcatgggtgtagagccatcgagaaataccggcgagttcatagccatcgaagagcgcatgaacctggcggctccacatgaggtagttagtgctggtgagtttggtaacgttactcatgttcacgttgaggatgttggtgttgacgagaacgatttcttcagcgtgagtagccattgaaggagagagaacgaagaaagaggaaattttactttttatatttatagtaatttttatttttttttattttttatggatctaagctcttgataccatatagatgtttatagaaaagataattttattacatagtgagaatcacaatatatatacaacagtgagtagctagggtacatcaacgtaatgaatgagagtatatacgactttacatatgtgtatccatgacagtagcaatctaggatatccctcatatcctcaatatcggaaacatgttgaaaaggaaaagagtacacaatgtaattcgcctgattattctcgtgccaacccggtcgagttcatcgacgt

SEQ ID NO: 27297 - DNA, 1187 bp, Arabidopsis thaliana landsberg
cagagtgatcattgaagcactaaaactaatactctctttttaatttctcttgtttcattaattaacacgttcatgtgtgtcagttccaacttaacctcggtacgaccaaagatggccacacttcttgtttataaaaccacatcaattaaaagagttacgaaattggcaaagatgaccattgaaatggttttggccacgattaatttgcattttttagttgccatttggtttatgaaattatattgttgattttctttatataggccaatttaaaagtgtttggcaatttctttattgtgtataagtgcaacttgggacgttactcgcatttcggaggtgcttaaagtaaactagggttagtcagctcagctctatttctcgtatataattgccaaagtcagtgaccttgatacttcgtgtttatgataaatgttgatgtccaacattgtgatgatatataaagtcctacaatcttcagcataaagatctatgtaaggctcgtgttctatagtatgaacacctagacagtttgtttcgaagaaaattggatcatgatcaaagaatggcaaatgaatgagtagactatataaactagtcatagggtacccgaggattcgaattctataccaacaagctgagttactcgaggagcggacttaacttgtttggactcaacatctttgtgactctttaaatatacctaacataatataatgttttacattttcatgcgatttaaaaaaattgttgtgaagcgaactatgtacttgtgtgaattaaacgcgctagaaacatatgttatcgatatcaatttctagttcgagataaataaattgtagaaccgtggttggaatcgcatcatcagaaggaaaaagaaacatagatacaaaaatttaataagtctttgaagtagtgattcccacgtcctacattactcttaaccatttttcttcaccgccacacaatttctccacaacatcttgtgtacgtgtaagcccgtttcgtcgctggcaatgaaaatcccattcccatcccttgcttattacgcattgacattgccgagtaaataccccaatcagaagagaagaaggaagaagaagaaagtgtgtttagaattttgggtgacgtggctgtgaaggagagataacgcgagtgagaagacgcggaaagcccgaactctcgcggtt

SEQ ID NO: 27298 - DNA, 528 bp, Arabidopsis thaliana landsberg
aactacgccttacagtgggtcgatttgttctttgaatattctcttgtatttcataagactttattaaattcataatcataaccgatggcagcccttcgcgcgagacttgaccatccttttgtctcgtttcttttcaactccgtgcagtcattttaagactacaatttacaggttgacagagtttcggaagttcttgccggcgtagacggcgttctcaccgagctcctcctcgatgcggaggatctggctgagcttcgcgacccgctcggaacgggcaggagcaccggtcttgatctggccagagcggagaccgacagcaatgtcagcgatggcgacgtcctcagtctcaccggagcggtgggagaccatgacaccccagccgtcggcgtaggagtccttggcagcctggatggactcggtgagagtaccgatctggttaaccttgagcaggagggcgttgcaagacttgagctcgatggccttcttgatgcggagggggttggcgacagtcaagtcatcaccgacaat

SEQ ID NO: 27299 - DNA, 1380 bp, Arabidopsis thaliana landsberg
agattatctttgtgagtccgtcctttacttacgggttttacgagtttctctctcatgttcctactaacttttgattattttttacttttttttattgttagggcctcacctaaaagcctccggttggggatggtctttaatacattaactttcaaatcaatatgggattgtattcactttcttttcgggtcttcaaaaagttcaaaaacctcaagtaatttccctacttaaattatccttataatctgaaaaagagattaatcaacttcttaaattcttcttatggttttggtttacttttactttttttggcatatgatttatttattaacattgaaaataaaattaaaacatcttacaaagttgggtttaagttttttttgagctttaacacttgaaaaatgaaatcataagacttttaagttataaaatcgaatatgggcttaaatatatccggatatccagtatccggaccaaattctcggattattcgtatctatatctctattccggctatacgccgatttactatctgtatatgttggccggctatccgtttgtttggataaaaatccgtggtaaaatatattaacctcatgcgtactttggtctactaataattagactataaatattattctaattttttggtgtgttattattggagttgtctcctaccaaacaaaaatgcgaaaagagtcaattttgaattttgatcattttgataaaaagtaaaagaatcgttttattaaatatttttaaatgatctttttttttcaaaatcaatcaaacccgttatatctagatatctattaaccggcctaaattctaggattatttgtatccgtcgtttaactattcgtatatctggccggctatccgtttgtttggttcaaaaaccggatacggatatccacggtttaaatagattaacctcatgcctacctacttttggtattctaataattagactattctaattttctggtgtgctattggagttgtctcctaaaaaaaatgcaaagaagagtcaattttgatcatttaaaaatatttaataaaaacaattcctttagttttattggccatcaatgggaccgaccaccaagagttgtgcaagcaatcggattatttagcgtttttgatgagttccagtaatctatttgcttttctcaatagcttaaaatggtgaattcgaatgaagaagacgaaaggagaatccttgacgttgaagaatctcttcttacacaggttttgacttaaatctatcaatttgcgtttgccaatttctcttcatttatttaccccttgacatgtttctaattatagctatactttcaatttttagaatccactatgttcaagatttcaaccaccaaa

SEQ ID NO: 27300 - DNA, 1297 bp, Arabidopsis thaliana landsberg
tcacctgcatttatcacatacgacagaactgatacttggtgattgtgcaaaggaaggcacgcggcacttcatgatattcagaatcattcgatgggcactgatccaatttggggcttctcgaatcaggtgcagacaaagcctataacctcgatgctctcattgactcatcggattccaaattggcggtgaggatacacagacctactcctcaaatccttaacgtactcgtaagcccatatccgatttttcttttcctgtaaatttaaattttattacaaatttctcaaaatcgcaaaagctttgccgctttcttctctaatcgaactaaatcttaaaactttgctgattgattgattttcgattccggtatgtatctttctttagttttcaattcgctgcttgcttcttccctgggaattttagggtttttagggttttgtaatttccgattgaaaagtttcgtgctttacgagtctctgtaactcaatttttggcagggagaagaaaaatggtatctgggttgattaatgagaaccctatcatttacccaaagaaagagaggcgtcttcgtactgatacaagcattactgatgagcttacaccagaaccaattgatcaacttgagatttttgatatcctttcttcatcaagttttcttagaactactctaattgcaaaccttaattggtgaattggtttgattgtgtgtgattgtgaggatgtgattatcgtcttacagctattagcatctgaaattaagagtagctagtgtatgcataggttttggaacaacttgacatgcctctcagcttgaagtttgcttctttacactattagaagtcatgaatcttttgttctcatatgcatatcttttcgaagtaggtgttggaaccatttgacatgcttcttagcttaaagcctacctatgaatcttttgttctcgaatgctaaatttcttgtaattatgcgtggtatcggtttggtaatctgtgaacaaatggaatctatgttttagttgatacagaatgatattggattatttctgttgttttctttaacaatacacaaatcatataagagatatcaaagatccagagcatcctaatactctggaagatctcagagtagttacagaagactcagttgaagtggatgatgagaacagttatgttaggtaaaatgttgggattgaacgttttgttatggatttttagtgttcctttgagccaatctgttgagctctaccatttcttttcagggttacgttcactccaactgtcgaacattgtagcatggc

SEQ ID NO: 27301 - DNA, 1482 bp, Arabidopsis thaliana landsberg
aatcgatcgataccatgaatgagtattgatcgactgcctcttgagcctgactaggccgaccaagacctactgtcggcctaatgattgacatctctattcatgttgattggcattctttaaccgagagttttgagtctcgttttgtctaaagtctccctattttgacatataaccaacccaattgatcgttttttacatgcctatttggtaaaaagaaaaagaatactatcgaatacatttgttgtattttttttgtagtttagaagactattgtatgtcaactactgttaagtaataagtataatctagtagaatagcaagactccaaggcaaagcacatgtttgtaacagaaaaggttataaaattgagtgattaatcaatgcatcataagttccacacggtggaaacatactatcacacaatgaatccatttattttcctaatcttgattgtactaccaaacaacctataagacgatctgctatataaagtgcgttagtttagatgccatcatactcaaatgttacgaacattttttttttgaagtgttttctgatggaaataaattggcaacaacaagcgagaaattaaaagctctcctctcacaattaaagagacgcagatattggcattagaatctggaaaattacggacaacaacaacatcaactttaaatttaataacaacaacaaagaatcagcggcgcatcaaaaagccgagcgagaattcttcagaaacgtggcacaatcacgaggacgcgcggctcaggaaccgcgttttaatgataacgcgtgacgatcacgtaagccgtttcgacaaaagagcgttataacgtttttcttgacggtgacataagctcaaatcagccgcccctaacgctaaaacccaaaatctctacatttttttattctggattttcttatgccacgtggataataaagacacgtggtacaaagataaaaggatggagacccgcgtcggttaaccgcaaagtttaacgaagggtgggaccaccgtcaagtcgattctttttcagtttcgtaaagacggaatttaatttgacggcaggagaagatcaagaccgtgacgtcattatccattttattttactttcgttcattgttttttgttttaaattattttcttaacgacttggtcaacggtcgacacttcacaccttacttgttggatctttacgccttgattaatggactgggttatcttttgtgtgtgtccacagattaaattggtaatttacgaaaagaaataaacatcatcatcattagtctgtgttaattattcaaaattacgtctatatcacgttgaattcaaaaaagttattgttcatttcctaaaaggaaaactataaaacagttggattttaataatcaaacctttgagaatttcatgccatatcaaatataaattacatactatactacaaactgtatctacataattccacttatcccaccaaagaa

SEQ ID NO: 27302 - DNA, 1601 bp, Arabidopsis thaliana landsberg
ctgtttccaattttcatctaaacaaacaggtacatatttgaatgtaatattgtatacagaccaggggtaaaacaggaactaaagaaggctaacaatcgagtctaaccctctatgtgaagccacaggtttagtgcaaattgtaataagttgttcagagagactcttgactgaaacaaattgagaagcatattcgattttaaaatcaaaatttgagtgtcgagcgggaaagtaaaagttccgctccaatcttttaatcttttcgtatctagcgggaaatttctcagcaggtgactatcataatcgcagctttcgtcgatactattgtccgattttacgattcctttctctctctcatggtgcgatttctccagcagtaaaaatcaatggcgagaaccaagcatcgcgttaccaggtcacaacctcggaatcaaactggtatcttaaatctgctttctctttcaatttttacttctgattttacccagaattttaggttttttatttcgattttgttaaccctagatttcgaatctgaaatttgtagatgccgccggtgcttcatcttctcaggcggcaggtccaactacggtacggcatctttttccgtcttagggtttccaatgtttcttccttttatcgttatgatcaaatttgtttatctatcgaaattgaagaccccgacaaggagaggcggtgaaggtggagataatactcaacaaagtgagttttttatatttgaagtcttttttttccctcttttcatctcttttgtttgtgaagttattcttttgtaacatctgcagcaaatcctacaacttcaccagctactggtacaagggtaagatttttgtgaccattgcttatgaactgcttcaactttgatttcgttattaagctgacaaaattctcgttttggtttgtcaagagaggggctaagagatccagacaggctatgccacgaggtttgttttaaaaaaaaaaccaatctcttgtgatatccctgagaatacaggacacttagtgtgtttaaaactaatcttcggtgttgtccttgtaggctcacagaagaagtcttatcgatacaggccaggaaccgttgctctaaaagagattcgccatttccagaagcagacaaaccttcttattccggctgccagtttcataagagaagttagttactctttttcttaccagccataataagtttcacagcttaacaatattcatatatactaacagaggcacaagccttttggtgtttaatgtggctagttttaggatttgcacaccccacacatatctgagcatcaatgcagtgtacatagtgagtgatatagcaatttaactaaaattcagagtaatcgtgaggccaaccctccttgtttaaggagtgtgtaatctagtttgtctttgaggttatgagctcatagattcagaaccatatgattcctgtagctacaaaactcaacatgaatcgtcagtgatgtggaaatgctgatttgtgttacaaacaaactattttacattgtttttaaaggtgaaaagtataacccatatgttggcccctccccaaatcaatcgttggacagctgaagctcttg

SEQ ID NO: 27303 - DNA, 1383 bp, Arabidopsis thaliana landsberg
cacatgtgccatgatataatctcacatcatctgtcgtgaatcttgatgtctttgtctgtttgaagtgataaagatagagttgtctttatatgcaattggaacaccgaatgctattagtcaaaggacatagaagatgttacctaatcgcactcaaatcaatgcttaaggcgtgtcttcaaaatcaagtgaatacacttaagaattcaaatccataagcttatgtcacatgtttagttaggtttcataacctttgaacagtttttgtctgagtatataatgacaatgtccttgtcacaacttggctttgctccatacattttttaatatgaatcacctcacagactaaagtgtggaaaatattaagcaaaaggacaaaaatagaaaaaatatgaaacacttccttgtttctgctgacacagtttacgaaggagaaataagtctttggagttaaatttttgaactcccaacagtttccttaaatttaatgccaaatccaaaaaggcatcaatcaagttcacacactcttttgctcttcttactcaatatagagtttatatagcagcataaggaacctcaaagctcaagagacttaaagagagagaaacattgatctctgaatattgtgaacatgttgaaatcaagtaacaagagaaaaagcaaagaagagaagaagttacaagaagggaagtaccttggagtgaggagacgtccatggggaagatatgcagctgaaatcagaaacccttttactaaagaaagacattggcttggaacgtttgatacagccgaagaagctgcttttgcatatgacgttgctgctcgatccatcagcggctctctagctacaacaaacttcttctacactgaaaacacctctttagaaagacatccacaacagtctttggagcctcatatgacttggggatcttctagtctctgtcttcttcaagatcagccttttgaaaacaaccattttgttgctgatcctatctcttcttctttttctcaaaaacaagagtcttctaccaatctcactaacactttctcacattgttataatgatggtgatcatgttggccaaagcaaagagatttctttacctaatgatatgtcaaacagtttattcggtcatcaggacaaagtcggtgaacatgacaatgcagaccatatgaagtttggctcagttctcagcgacgaacctctctgctttgagtatgactacattgggaattatcttcagagttttctcaaagatgtcaacgacgatgctccacagtttcttatgtgagcttgtattaccgatccttcaatttatgtaatataaaaagtattgtatctttaattagtgtcaaatgcattcccaaaccagagttgtgtattaag

SEQ ID NO: 27304 - DNA, 1707 bp, Arabidopsis thaliana landsberg
ctaggacgcttaacagcgacgacaagacaaattaattatacttgtcaaaacgatttgcaaataaatgagtgattatgattaaccatgacatgtttaatatacaagaaccataaaattttcacaattcaaggtcaggctcaaattttgaattacagcccaacaacaactaaatagaacagaaggcccaataaatgttaattgagaaccaaagctgaaaatcccaaagcttcgcaagcacgatttagttggaattagatactttgctaattgcctaactatttatgggctcggcgggaaaatcatcgaattaattttctctttcttccttttttccctcaaaaatatcaaaaatccccaaattcaacctgccgttagggttttcaatttctccacttcttcttcttcgtttcgcttcttcaacgtctctccttgttcgacagttctaaattcaccatgaggaagacggtgaagcgagaatcggaagccaccggcgggaaaagagaagccgacgacgagccggagaagttgaggtctgtgaagaaagagaaacagagaaaaaccgaagctgactccgtacgacccgacgagcctcctccgcctcaggaggaagaacaaggaatatctgatcggagaattctcagatccaagtatctctctcttcaaaacgaaatcaacggtaccatttctgtctcttactcactctttctttattatgtcccatttgattcgttttaattttagggtttatcattttttgttttgaagattgtaaagatgatttgatgaagattgattctgacaaattctccagaattattaatgcagttgaaaacttgcaccaacaaggtaaaatcacatgctttaacttagtgaaattgatgtcttttgagttaacaaaggttgcaatagacgaggagcttatgattttctcaagttgtattgtattactaacgaaaagaccttttttttttggtttggttacaatgtttcttgtagttcggaagcctagggaacaaattgcagacgcagaggcacttctggatatagcaaacactttaatgtcatcggtgaagtctcagtctgctcatggggtttcaccggctgagtttgttaatgctttgatcagtgggtttggtcaaggttctttggggattgatactgatgaaactgctcaagtatctttaaagtggaaggatcttgggtttgctgtttgttctactgttttagtatcatgtggttgttctacaatgtgagttctcataataactattttatattgatttgctttgctgtaattgagtatattctgtttaaacaaaggtttgtttacctgttttgttaccaggttgggacctatggatgctgaactgaagcaaagaagaagggcacccaacagtaaacgtacaaagcctggtgaaggtgttcgtccagatgaggtaagaaatgttttgcagaccccattttgtttgagtttatcaaactgattccacttatgttgtacctgtagtcctattctcctttgagactgcacatattaacaccttgcctagattcattgaatgcttttcttatcccagcctgatcgatcagtggtgtttaatagtcgtttgcatgatatccaatgtgaaattgtatatagttgatttgagtacaaaaaacaaactcaccctacccgccctcgccttttgtgtgatatgaaaaatcaaa

SEQ ID NO: 27305 - DNA, 1684 bp, Arabidopsis thaliana landsberg
  unsure (1)..(1684): unsure at all n locations
ttccccaaggtccctagttaataactagtaatttgaaccttttctatttttcaagctagggtttgatttttattttctgctatttttttaagtttgtagttcgaattgttaaagattcagttggatatgtttatcaatcagttggagaagtttaatattttcagttctggtattcaaataatcaggcacaattatagtttggggattgaattgtctaagcaaacgacaatattctcgaacttcagtttttaagattcctaataaagtgggacaaatcactaagagatttgtgcatatcaatataatctatattaactattcaaaaataactatatatataactaataaaatcatgtaatttttagttttaaagttaaatttactcttgttgaaaagaagaagaagttaaatttactctttataccacttacacataggtgtatgaaatacaaaatataactagaaaataattcagagggaaagaaacgtaaatttgttttacatataattaagtaaaatgttgaaaaacagaaaaaggttaagacaattttttattgttttgataatttgagctaagacaaagtaaaaaaaaaaattaaaacaaaattttgttttaaaaatacaacaacattgaaagaagaatgccacaaagtgagtaatgagtccatccctaaaagttgatatttctgaaaatcgtctattgattatgaaaaaaagttggaaaagtaagtggaacaattatacaacaacagaaatttgttggagtagaaagacatgaaaatagattttttgtaacaaagaagagattccatttctctcacgactcgtcgccaaagcaacatttccacagaagtaataaagtatcctaacaccaaaccaacataacatacgtactgtcatcaattccaaatacaaggaatagacaagtcccaaaatacttaatacaacaacagaagtgagtgattgatgtcaacttcaagtaagtagagactgttatgggctgacggatctggaggtgcttgatcttgcgctcctcgaatgacacattgaagattgcctgtcgtgcctccgagacttgcttctgctctctttccttcccttccttggggatatgctacgtgacatgcttctccctccagggcttacgcttcccgataccgacctgtgcctgatttcatacgtattttcagaaacaacaatactaagcagtntcagctgatctgtatatttatgttgactgcaccataccttctgtagtaacgactttcaggtgagtaggatctgtctctcccttggtagtgaggtgaataagaccggtctcttccnctgtagtagggtgagcatgatcggtcacgtgctctgtagcgaggcgagtatgacctggatctggacctgtacctccgcatgtagtaaggtgatctgtcccgtgctctacagttacgtgagtaggatcttgacccgtcccttcgcctgtagtaaggtgagtatgatctgtcgcgtctcctgttgtaacgatcatcaggtgaaggagatctcgaaggagagtagaatatgcgtcgtcgatagaagggtgagtacgaggatgaccttcctcttctccatagcttggagataagatctgccccgatcagatgagtagcttcgactacgactacgagagcagctaacagacctgcggggagag

SEQ ID NO: 27306 - DNA, 1181 bp, Arabidopsis thaliana landsberg
aatctagtagcagcttggcaatacactactctcactctaattgacaaagaagagatacctggacaaatgtggaaacggatagaagaggcttctctccaactttttggtgcctggcctacaatttgaacacaaacacgtaagtattgatagagcatccacggttcttacagaaaagcaagagactcaagaaataggtaataattcaaaaatcaagaaattgtctttacgcacagaacataatgggatcctttcacattcactttactggtttatcaacatcatgaacttctcatacttgtcaccttcttatgaagttagaaacatctagcaactagtcctagatactagagtacaacttaaatgtcacactaaatgaatcgagattgtaagtcagttcagaaacatacctggattaaaagcatcacaatcgcaaaaataacttttgcgatttctgtcaagaagttgacgctaataggactgaagttgaatttcccatccaccttcgacatatacaccaagacaggctgaaaaaagaggaaaagtatgtaacttttaagtgatttacacaaacaaatgatgagctgagaggaaaaagaagaacgctgataataaatatggaaaatttgtcaaacggagatgatttacctggagaccaacaagcatgcaatcacctactaccaaaaggacattgaggacacgttgttttgaggataccctaatcttgtggtcgtcataagccctagaaatagttttgctaccaggagagaccaattttgaatgacatgcagggcactcaactataccgttcttcatttgttgtctttctcaatctgacaatttctatactgatccaacaagcctgataaacaacaacaacaactcatgagtcgcgttccaactaagaatcgcaacaagatatcaactttatgtggaattttagcagagaaggcaaatcaccaaatctaaactcacaatcagatctcagtagctaaataaaatcacaatctaatagaaacaatgagcgaaaaagaaaagatagatcttaaaaacccaaacatggatctaaagccgccattataagacttgtcgggtcattccaaaattctatcaaaatcgggatcgatctaactaacctaaacaattagcttttacagaagattccttttcatccacacgggatc

SEQ ID NO: 27307 - DNA, 1613 bp, Arabidopsis thaliana landsberg
atctatcttcacattataaaaacaaatacgtctaacgttctagaaattttaaaactaaatataataaattaaatgaaaaaattagggtgaaaacaaagaagtattaattacctggtttatgaacatgagagcaaatggtttcacgagaagaattactcttaatcccacacttaccacctttaatctcacacctactacatcttggaaccctccaagtaagccagaggttatcactcaaatccgaagacgacacgatttgctcataaaacggccaccgaaccggaacataaacggttttcattaaccggcatgattgagacgacaagtagtttatcactctaggcgaaggagtagcaaacaccgtgctgtttttaccactcaaacacgttatcggattcaacggcctaaaacggagatactctgaagtaggacagttaaagaacgtgaactgacgcatgtaaacgccactaaacggcgtcgagttgaggtttagctctaagatccgttgaggaagacagttgtttgggtcgttgatccaaatctcttgagctgcgtaatcgatctcttccacggtgaagttaccggaaaacggtaacgttatggttgttctgttaccggcgttaatatcgcacgttaagtcgaagcctttgtcgtaaccacaagaatgagattgttgatgttttagacggaatggaaaacggatgatcgggccgtcacggcgacaaacggcgttagtgcatgtaacggtggaagtggtcgtcgtcgtcgtcgggattagaagagatagaaacaagagagagaatgatattatttttgttaaatccatttttttgtttggtttggtgttggaaactaaagcagtgacgaaaccctttttgtaattggattggtcccaaagtgtacgtaatcattttaattatattattcgttttaaaatattttactgtatttttgtgtgtgtatctattacgtaaaagatggatagaatgttcgtgacctatataaaaggttaaaaaagatttcgagtatatctctgtaaaagaagagaaggaggaaaatcacaaaaataagattcacttgaatgataagttttgggattataagagaaaggccattgacaacatgcagaaggcaatcagttgcaccacatccaccagtgcgatcaccagggacaaaccgccagaagacatgccatccaggcatcggataatgtctgggcggagaacacgtgagcgtaaagctgaacaacctgctgggtataagtctaatacttaactccaagtttttttcctcccagttattttcactcaaaaaaaaacaaattttttttgggtttaaaagtttgtttttttaaaaaaccccttaggggtttttttttttttttttaaaaaaaagaacttttttactttttaaaaagggggggggtaaaattttttcctctagttaccccttcaaaagtttttttgccccaaaaaacaacccagtttttttttcttttcaactttgtgggttacccacacaacaaaaatttttttttttcttttaaaaaaaacaattttttttttttaagagggggggggggttttttttttttttccccgggagtttttttt

SEQ ID NO: 27308 - DNA, 1645 bp, Arabidopsis thaliana landsberg
aattaacaccaactattggtttcacttaaacctgcaaatatatccctcgcaaagttgcgaggtacttacgtggaattttcgaacggaaaaccctagatattcctataatagaggagaggttcgataaaaagaaataaaatcgaacgaacccaaatatcaaaatttagtatcataaatttgttaccttcaattgattcctttgatggagatacaaaatttcttcaaattgttctaaggaagaagacacagtgagagagacgacagtttctctaaatttttttttttactttttgttactttcaaggtttccttttcttttttgttttggtttttagtgaattttgggattcagtgagtttatactaaaacggtttgctttttcgtaaataagaggtctaagcccaattactaacagttaaagtgttaacattacaataactttttcagcgctttaaaatttttttagaaacctttttactacaagaaaacaagcgatttgcgagaaacatttgctatggaaatggtccctcaaaaatttgctacgtaattgcgaggactttgcaagcaggtaagacaacctcgctaattcgtcgtaaaatttgcgaggaatatatccctcgcaaaattatcttcttcctcttttttttttcttcttctctactagaactgacaagaactcttttgatccctaaatagtcatccatctttccaactttgtacctaagatcttcacagttttcatagacaagtcctattttctcactaaaggacattgatttcctttttcttctgcgatacacaagtgtttcaattgaatgtttcattacataatcaattctaccttcatgtacttgttccacttcaatccatccctgtctctagtcattcttgctcattatataccctttaatcacaagatcaaaaacatgtaacagattcttgtcttcaggattcttctgtgaaaccaagtggtcatattcatgagtatgaacaccaactattggtgtcacttcaacctgcaaagataaacaaaattctaaactgtgtaaaaataatgcacaattcttaattaaccttttaaaatccgttgtaaatagtttaaattgcttttaaccctttgtaaatctttaaaacttgattgtaaaaactattgtaaaacatactctttatttataaacagtgtttaaaacaaaaaaaacagtgtttaaaacaaaaaaaaaaagccatatctaagaaaatgtaccttgtcaccatctgcaattattgttatagcttttgcacttggagacgatgttgatctccattggagaattaatggaatattttcactagatgattcatctctagtgccaaacttttctcccaacttcagaaccgatgataatgcccatagctgaattgcagaaacaaatcgaaatagaacatattgtttccttaacaaaatgtcaatatcgaatttcttcacttcagttaccaaatttgagtaaacaatctgcgcccatggatacttgaataacttttcgaaatcagtagctctctgaagattctcaattgccagcgtggtagtcgaatttcgagctaacaataacccctaaattagtaacaagcccgcaatctcattctctcctctggcgagcatcgtttt

SEQ ID NO: 27309 - DNA, 1393 bp, Arabidopsis thaliana landsberg
aatggatggaagcaaataagcaatgctcagcacaaatttcagaaaatggaaaaaaaaacactcacaaaaaagaatactttctcttacgtttttgtttttatatggcaatgtttggctatccttgtaagagacgagggtattttcgtcacttccgtttcttctctgtaataagtaattaatttattaataaccaatgcgtgcacctttttaatcataagttaaagaataaaatctatcgttaataaaaaatggctaattggcttaagttgatcatgatttcttcctagttctagattttagttgatcatcataactttaatttgaagagaggtctatgttttttaaatggttcgttaatcagatgattatgaaagatgcaacatgtgacaattatttgattgcatgaaattttaagattaaaatgaaaatggcatgaaactctaattagagcttttggggaatcaaagtgggcaggaacatggggaatggttgatgacgacgataaagattgccatcccacagttttttttttaattatgtcccttcattttgctttcaaataaactaatcaaatttgttatgaattgaataatcatttttaaaatcattcatcaaccaagtggaagatgtttacaagtacacaaggcattacttgtgcatccaaattattattaccaactttcataagcttacttttcttctttaaattaatcactttcttgccgtccaattattttatttgggtttttttacactctttagaaaacaaaaacatcatgttatgtcggttttatcctattagaaaacacatcgacaacatttaaccactaaattacatatatatatatatatataaaattacaactattgatcgtttttgtattattctttacaagtcaaatttccaccgttgaaattttgatttacaacattaatccagagtttaaaaattcggatcatctaattcatacataagtgaattaattaattaaaagcgtgacatcaaacgttagacacatgtggagatgagattgaataatgaatatcatccactaaccattataggttagagtcttgtagcctatgtaccaactatctcttttatactatttaagtttaactctcatcttgcaagaatccaagattaagcagccttactaaatcggggaaataaacttaggtttataatcagtgcaatcacatggccataattataaatgagcaaaacaattgtctgaaaaggccataaaatttgttgggcctacaatttgattaaaaaagacgaagcgccgcatatattttatcttaaagcccaataatgttttcggcccagtaggtgttctctgtactcctattctctgctataacttatcattgtggcccgtttcggagg

SEQ ID NO: 27310 - DNA, 1212 bp, Arabidopsis thaliana landsberg
  unsure (1)..(1212): unsure at all n locations
tatgaaattcctgaccggtgcgtggaggccatcgccatgaatgcttgcagaaagcagttagtatcaggtttatcagaggagctcaaggggagagattgtctcgagatgtggactgaagaactctctgctctcgggattgattactacgcccaagttgtatctgcgatggcgaggttaagcgtgcggtcagagagtatcgtcgcttctctnnnnnnnnnnnnnnnnnnnnnnnnnnnnnnnnncatcgatcgaaactgccaggaacagaggaaaatcgttgaagccatggttaaccttttgccgaatgacgaaaaaggatcttactctttatcaattattcctctcggtttcctctttggaatgctcaaggtcggaactataatagatatagagatctcttgcaggctcgagcttgaacgtagaatcgggcatcagttagagaccgcgtctctcgatgatctgcttataccttctgtccaaaacgaagattcaatgtacgatgtggataccgtccacaggatactcacattctttcttgagaggattgaagaggaagatgaagaatgtggttacgattcggattccactggacaacacagttcgttgctgaaagtgggacggatcatggatgcttacttggttgagatcgcaccggatccatacctgagtctacacaagtttacggctattatagagacactacccgaacactcacgtatcgttgacgatgggatctacagagccattgatatgtatctcaaggtaaacaaaaacacaattgaacaaagtctttttatgttttgaaaacatctgaaactgataatcaaatatggaaattaggctcatccatnnnnnnnnnnnnnnnnnnnnaagaagctatgcaacttcattgactgcaagaaactttcacaagaagcaagcaaccacgtggcacaaaacgatcggctgcctgtacaaatggtggttagagtgctttacactgaacagttgcgactgaagaaagctctgtcgggagattcagaagaagggtcgtgggttttgccttctggagtacaaagccgagcggtttcgccaagagacacgtatgcagcgttgaggagagaaaacagagagctgaagctggaaatatcaaggatgagagtgagagtgagcgagttagagaaagaacataatttgatgaaacatgagatgatggagaaatccggtcataat

SEQ ID NO: 27311 - DNA, 1862 bp, Arabidopsis thaliana landsberg
aaagtgtgtcatttcgtctacgagtctgcatgctgctcagtactcatagggtgcgaggctcggtgtttctcgatgtcgtccagcagcttcgcttctgtccgatctgtcctccttgtatccctcctatgctcaatagacttccacatggcgacagcttctttatcatcctcatcggactcagcattagcgaacaaaccagcatcattcccttcaaactcatcaaacgtctgattctcatcgtaccttttctcctcagcttcttcatcgtcctccgcttccgcttcacttggcttccctgctccacgacctactcctggagcagccgctgtagccaaagcagaccgatcaggaagatccggagcagcacgagcaggaccaatatcagatcgagtagtaaacccagtagcaccacgacccaaacccgctacataatttgacggaggcttagaattgaggaaatcaagacgaggcttcggcggagccgcttgcataccacccaaaagcgggacatggataatcacagtagagaaacgagaaacaccgagatcggacaataagatcgaatcggaatcctttgaatctacaaacacgcggctagggtttcgcatacggagagagtaacgaaggaaagattgtggaacatcactacgttggtgggccaattgttcgaaggcggagatggtggttgaattagggtttcacgtcgatcgataaagtcttcccgtttggaatcgagagaaacaccatcgtaacctaatcgagattctccggtcaaagaaacctaactataaaaatctctgctgttacaacgaatataaagggtggaaaaaaaatagtcggttcagaggtaaaggcggtgggatatgtagtgggctttttaatgggctttttgaacttcatattgtaaaaccaccgttagtataattcgagcttttcataaagcgacaccgtatatgactatctctgtgtgttttcgttttaaacgacgtcgtttgcatggctttgggaaaaaaattaaatgactaaatattgcggtgagcgtggatcgaacacgcgaccttcagatcttcagtctgacgctctcccaactgagctatccccgcttcatgtaacacaatcaatgagtaaaagatatatagaaagaaaataaaaacgaaaagacaacgtaatgcggtgagcgtggatcgaacacgcgaccttcagatcttcagtctgacgctctcccaactgagctatccccgcttactgactcgttccaaaccaacgtaataaattactagttatgaaaacaacaactgaatcaaatagataagaagacatcctttcgtcttttttgtttcaatcacacggaccagagccagaggtgtgatatgtttcagcatcttcttcatcaacaaaccataatagcattcggagaggatatctgttgcccagtgacaacgaccaaagccaggaatatatgggacagtgtaataggcaagaagaaaatagagcacaaaataaaatacgcgctgaatatatttagtgaagaacgaaaaaaaataactagtatatcacttgttgtagcgagcacgccaaaatagaataatagaggatattttgttatttacatattcttaagatttgcatatatcacatatttcctattgttaaggaaacaacttgattctcaagctttgtatgtatgtatatattcgagacctttaggtcaaaggcaatacacagaaaaacattcattgatcgactatagatttatcatggtatcagagcacgaaacaattctttgattatcttcataattttcttcgatctgtttcttgttaatctcgacaaaattctggaacatgcgagcaagaataata

SEQ ID NO: 27312 - DNA, 2558 bp, Arabidopsis thaliana landsberg
  unsure (1)..(2558): unsure at all n locations
tatgcttattctgtggttttatctttaagggttgagatcgaaaaggaacagttactcaatatatatatataagttgaaaagatacactgaatgacagatgttttttaaaataaggaaatacgaatcgttccgcgggttctcgatgatgacgtcaatatgacatattgagaaatctaataagatatcatagacatagatgtataatgattacgaataagacaatttcctaatatctagacagttatagatgttaatcatagtgaatctatatataagattgtcaaaagattgacataatattgacataatattgacttgatcttttgtatagtttcattttatcatatattatgaaatctatattatatctaaaagattggaatagcaaattgttaatgaaactttaacttattgatacaggtatacactaaagtcattcattaaaagtctgaagccagttgaatacatatatacatcatgaaatggtaagtttctttggaccctctaacagtaacattacaactgagataatattgtaatcatatagatggctacaaagttaataatgttcgaacatataagcagaaaaagaatattattaagattaactccaaacttaaagatgaaacataattcataacatgaaatcctataacttagaaaccaaaaacacgaacataatcccaaaacaaaaaaaaacaaaaaaaagcaaaacatagcttcagtgaccaaacacagttcaagaagcatcacttattaaaagaaatagataagcagatcacttgttcttctccactttgacccttacagaagccatgttcctagccatctctttcttgacttcctgtttcacaacgacagcagctgggacaggtgcttggtcattctctgttgcaacagtaacatttgatgttttgacttcagttggaacagtaacttcttnnnnnnnnnnnnnnnnnnnnnnnnnnnnnactccatgttcagcatcctcagataaagacttctccaagtctaatggtacaacacacaccttctttgaacttgaagaaccttcagagccactcgtttctctaccgtaaacacgctttgaagatggagtagtagagtctggcgatccattaccattctctagcataagtagaacctgcaaaatataaaaaattacaaaccattatatttaaaaattagattctgaaatagaattgtgcatatagatgagtacattacctgatcgccactaacaattgatgacgagttcacatgttcagcagaatcctctaataattgttcttcgagtagtccatcattcaaaagcacctttgaaaccttgtagatttcttttccatcgaagatattctctttctcgacccacaccaaaaaaagaaatgtctttccaatcagattctttacaggattaggaaggttatgtggatcctcaatctgcaacagggtaatataatatagatttaccgttagctatatctcactttacaacaagtacctaactaataacaaaaacatacctcattaacagatccattaagaacagaggttgcagactcgccaatgatctcaaagcaaattgaatcaaacagtagcaatttggctccaccattgttatccataacctttgcataaatcatgtaccttacatataattttttttgcaaaaccacttagattataaatgaaaaacatattctcaagaaagagatgaatgtattaaatactctgtaaatttagtgttaaaatcatatttacctagaggccacatttgtaacaatagacttgcatgtggcacatcataatctaggcttcttccccttgttgttaacaccattaacaccaacatgtatatgattaaccttcttattacatgactacagctgatgtaagaccaagcctaatccgtatctattacatagattgtgcacagaactctaactttgccaacaaatataaagttgataccatattagattatagtcttaatgtctttatctttacaaagtatctgattaaaaacaatcctcagtcgagttgagcagatctgagatggtattccttgcaaactcactgtaatcaatcattttcactgcaaccatctcaaacggtgggactcttgcacagaaaatgcaaatattaccatcagctggtagtctgcaaatgccaaaccgtaggtcaatagcacataataaaaatcaaaacaaaagtatcatgtgttgagagtagatgcatttacgattgactgaaagccacaacttcgaggaagtcaggattgacatgtacttgagatgcatcaaaagagttggataaacttttcacaccagcaattttataaacggttaagttaccatagatcacatattataaaagtaagcactttaatgtaccattgatagaatttacccttgtatgccttaattttggcaaaacgaatgagaaaaatcacattctttccttcagattcctaacataccctgaaaacctgttgagcgtatgatccccacaatgtaacttgcattctctcatccctagtccgttaaacaaatgaatag

SEQ ID NO: 27313 - DNA, 1062 bp, Arabidopsis thaliana landsberg
caaaagcaattctagctatcctggtcgttctatgtttcaaaacttttgtcaattctagaaatatttttgtggacattcagggggaaaatgcaaaattggtttactttctcgtcttggtctttgtctgcaagttggatcatgtaatcaagagccatcataaaccctgattccatttcatcaacccttttccctataactccttgtgcagccaattctacagcaacattctcagatgcttcattcatcttcatatcttccaactacacatcagagacatatcaagccattacggaaccaataattcccttaataaacaagtaacgattctatgtattaaaaagtgaacaatatgccccaaaaactgctaagcctaacgccgttaagttgttcgacgaaaagcctagcttacaaaaacaacactaaagcaagcccagatgaaaacataactctatggaaacgtagaaatacgtactaacgagtaagtaacgattacatgtaacataaagcttagtgcctataagtctgttcgacgaaatgccaagcttagagaaacgaaacaaagcaagttttgatgaaagataactcaaactacatacgagggtaatcatttcttcaagaacggaagtaacttgttcgcctcctttaagcaaagcttcatactcagctggatctaatttatctttgacattagtttgattttgctgagttccgtatctttcgaacaattcttcatcggtgtatccaccgccgacctcgtaaggagcgcaaaattgaaccagacgcttcagtttctgggtttgttttggacggaacgaagaagaggtgaaaggaaatgagcaaatagcggatggaattatgagagattctctttgagaaggtgatggtatggaggagaaacgaagatgaattgactgtaacatagtttgttttctcgtttcggattcaaaaagtttgaggttttgggtttatgcaaaggaaaaaagataaagaatcgaagaagacaacggggataaattggaaaaaaaataaatcgagaaaaattaggaattacatgcgccgcct

SEQ ID NO: 27314 - DNA, 1003 bp, Arabidopsis thaliana landsberg
gtttgcagattgagcttttatggtagacaaattcgtagcagataattctgttgtggaattgtgttggagaatatctctctctgtctccttctctgttatttgatattcgattcaattaaggataaggttaaaatgttttattaacttgggtacccttcaattggccaatcggctctgttgcttattagcttgtgtgaaaagttaatcacgttttctgtttcaatactcttacaatcaattcatggcctgattttgctttcagattcactctgacaatttctcaagctaaaacagattcataaacacatgttcttgttctagtaataaaagaaaaaacatttgtaaacaagataactagttctaaaattctaaaggaaaatacaagaaatatggtaaattaaatgaccattcactatagcaaagatgagaagaaaaagcgtgataatgacgaagctgaactagggttttccgtgttcaaacttcatacaacacatgagactaaaaacctgaaaggaactacttttatatgattgccgacgacatgagtatctgcctcatgagattgttttttctctggtcagagattttttcctcctcaagctttactttgctggtttgttcaggcatctccaaaaacatatcgtagtttgacggattctgttgctgctgctgcatctcttgttgttgttgcatgttctgatgatctaaaccatccacattaacgtattcatctccgtcttgttgtaatagactttcgaaggaattgcagcgatatggaagattttgcctttgcctatgctgctcctgagctagagagcgacacatatcgatttgctgacgagttaagttaagctcagtctgaacaaactcgatcttgcacttaagatcacagattgtcctgtaaacccctcctactggatctagggcacgagcattagcgtggtagataagattctccatagcgatgtctcgttgagattcttcgattcttttgagcatcttg

SEQ ID NO: 27315 - DNA, 4269 bp, Arabidopsis thaliana landsberg
  unsure (1)..(4269): unsure at all n locations
aacgacacgcttatcattgttctgttaaacccagcttttggaacttggaagtgatgagctttatatctggaaaatgtaaaatgttgaaccttttttcaactgtagtgttgttcataaatctctaatgattgtgttgtgtccaaaggcgttagctttgtttaagaaacgacgacgtttcatcattgttctgttaaacccagcttttggggaacttagaagtgatgagctttatatctggaaaatgtaaaatgttgaaccttttttcaactgtagtgttgttcataaatctctaatgattgtgttgtgtccaaaggcgttagctttgtttaagaaacgacgacgtttcatcattgttctgttaaacccagcttttgggggtttcctcacttggaagtgagctttatccctttggtttccatcaatggaggttctactaaactccaatgatggtttcttcaatttctcgtctttctcgtccaattcgaacaggagactcgctaaccaacgtcgattcaacttgcccatctccaaattccactactatcgcgtttcaattctccgagtctcggctcggttcggagagacctcgaggcgacgtaattcgctgaggaagaagatcatcggtgatgagtattggcgttcgactccgaaatcttctgaaccaggtacgaaacctctaaacgaaagccataagtttggtcactgtgatgatttaagtagcaccgagggattgaaagatagggttgctcaagattcaaatttgctgaatgagcttgaagattgggttgctcggtataacaaggaagcagagttttggggtattggttcgaatcccattttcactgtctatcaggattctgttggaaacgtagagaaagtagaggttgatgaagacgaggtcttgagtagaagaagatcagctcttggggatttggaatcagtgagttctaagcttgtatatgcgaagaaattagctgaacaaatggagaatggggaacatgtgatccataaggagagttctcttgtcaagttcgtttcttcttcttcttcttcttcttcagaggaagagtttcgtctcgttagctcagtccaaaacgcaattcttcgtcttgacttaattccaaagttgccggcgattggaagagctgttttgtgtggttacattggactctggttgctgaagacggtgcttgtgtataggaagagtaatgaggttgagtgtacagagttggagaaggagatgatgaggagaaagatgaaagcttggcaggaaagggatatgtcggagaaaggtaccgtggaagttttgcacaaggagggtttggaaaagccattgatgtcatttgagaagcctaagtttgatcgaaatgaacttatgactagtatttctaaagttaagggttcagagaagaaactggaactcgtgaattctcctcatgttgagctggactttgttgataagatccatgaaatcaaagcaatggctagacgagcacgggagatagaagctggcatagaacttaatgaaaagcagaagctcgatgtgaacaaagaaacaggcgacaatgaggaagatataagcattcagtcacagaagagtcttccacatgaggctttgacacacagtgaaggtgatgatgataaagatgaacgcttgggaacttcgactgacagtgagaacactgaactttctggttttgctgttccgatgttgaatggggctatggtagattctggttttctgaatcatgaaatggcagcatctgacaaagaaaaggtgagtaatgtggtaccaccagttcctacagacggagtcatccaagcttctgatgtcactaaggatcagttaagtatgatgaagaatagcactggtcgaaagtcacgggtcatacggtctgtaaaagaggctaaagagttcctttcaagaagaagtggtgagaaagagcttactcaggaactttctcagatggcccaagacagtgatgaaatcttcccaaaacagagcgacgaagagcgtggtgtagctagaaaacacaaattggttgacaaaaataaaatccttggtgcagctgtcaattgaaccttgaaatctgcacttgagtctacttcttctgaaccgttggggaaggatgttgattctcaaccccaaaagaatgactaccaaaaactctcagaaactgggaatgcagttaagggatcgagttcaaataaaagagaagagctcaaatcagccaaaagctcttctggtggtactaaacatatagagaaggaagaaccatcaggaaaggagaattggatagagaaaactaccatgaatttgagcctgttgttgaaaaactgagagcaggatttagggataattatatggctgcaagagagagagagaaactcaggagcctggtacgattgctgatattgcagaactttaccgcagtgaatataatgatgagcttgagtggatgaaggacgaaaagctaagagacattgtcttctgtgttcgagataatgagctggctggtagggatccatctcacctgattgatgctgaagataaagctatatttttgcaaagcttggagaagaaagttgagaaagaaaatgagaaactgtctcatctgcatcagtgaattcattcaaacgttgaaaacctggactacagagtaggtaatcttctctacaactttgattgagactaagtttgctcaatatcttacgtacacaaattattcattaatcagcttgtcaaaatatatctcaaccatctcccttcctcttattattcagatggcgtcagtgtgtatgatccactagaaaagatcataccgagatggaaagggccttcgcttgataagaaccccgagtttctcaataactatcatgaacagcgtgaagcactgttttctggaaaagctgcatctgtatctcctgtgaaatatgaagaacagagctctcatcaggaattatcagagtctgcttcctctgagaacactctcaccccttcatcagaaattacctcaagccagccaaagattgttgtagaaggaagtgatggatctgttagacctggtaaaaaatcaggaaaggagtactggcagcacacgaagaagtggtcacgtgggttccttgagttgtacaatgcagagactgatccagaagtgaaagctgttatgagagacatgggaaaagacttagaccgatggattacagaagacgaaatcaaagacgcagctgatataatggaaaagctgccagagaggaacaagaagttcatggaaaagaaactcaacaaactcaagagagagatggagttgtttggtccgcaagctgttgtcagctaataccgcgagtatggagaagataaggaagacgattatctatggtggttggacattttattactaaaaagctcagttcgagcaggcacttatgcaagagatgctgactgtttgtttttaaccgaaaagagcttattggtaagagatgtttcttgtggataatataactcttctttgtgggtaaaaattggtttgttatgtaaactagtaacttgaatattgttttatctcagatgttatcagtgctgtttaaagtgtatggggctatggtagattctggttttccggagcatgaaatcgcagcatccgacaaagaaaaggtgagtaatttggtaccactagttcctacacacggaatcatccaatcttctgaagcagagtattgtggtatttgttcaaatcccattttcactgtctatctggattctgttggaaatgtggcgaaagtagaggttgatgaagacgaggtcttgagtagaagatcaggtcttgatgatttggaattagtgagttctaggctgcagaaggttttggaagatcaggtacgatggaagttttgcagaaggagggtttggaaaatccattggtttcgnnnnnnnnnnnnnnnnnnnnnnnnnnngacttactgctgatgatgtttccggatcagctactacttcatatctgttactgctgatgtttcggaagattgatctggaggttatatcccacaggcttattaagggaccaaggcatcatatttctatacgatctttttctgaaacttatggtcatttacaggaccatgcatgggtcagacaaggattgatgtatccatttacggaatttatgggcaagtaagcacatgagacgctcatatatactggattctttcatatttgtctgtttgtgtctgttccttagcctttcataacttcagatttcaaaatcagac

SEQ ID NO: 27316 - DNA, 3582 bp, Arabidopsis thaliana landsberg
  unsure (1)..(3582): unsure at all n locations
acatatacttcataagtaagtttgcgaacaacaaggcgcccattcacactctttgctagtgcatttgacttctcaagaatgattttcttcctttcctgtaaattatagtaaccaatgaaatgactacatagatccataactacaaattcaaattgaaagaaatctgacaccctgctgaaagttaaaaatatttttttaataaataatggatagagaagaatgcacgaaggacatgcctcaatctcaatattgattccagaattcctcatagtatcttcataggattctgcattctgtacctgccaatatatagaagaccataaagcacacatctgaagcatgacatccaaatatgcttacagccgacaatgcagggtatattcttaccaacagtgatgatgaagcagtattgcgaagtccacaagatacatttccactgcattttgaagatgaaacagatagttactttatttacaaatattttgcatattaacatctttccgaagccatataaagcatagagaagcaagagtagccaagtaaacgtaccttgagatgccagcaaaggagaatggcacaaccagatcaccatgtaaggccataacccagcgaatcggcctgctaaacattacctgttaatcacagcaaaagataaagcagtaattcaaaccccttgttttacaacagagtctaggcaatatgaacgaagatgtatacaaatataagttacatactgaagagttccaccgcattgactttgggaacgatattttagccagtataccaggtaaatcttctgacagaacctataaaatatacaaggtcccaaaaagaaaatgtatgcttagcaaatagttgtatttttctctccacgaaaaactcagaagccaatatagtgaagtgtgaggaaaagtgtgagcatcatacgaaaagtaagaggaaaagagtgagcatcaataatttgctaagttgggtttttgtccaaaaaaaataaaaataaaaataatttgctaagttaatggatatactatgtctttcatgaaagatgaaaataacagtcccttagcataacaaaaagagtagaggaaaagaacctccaaagcaagtcgagctggctctgtaactcgtgcatgtacatattctgtcttccctgaaataaagacaaaaaaaagataacaatgaaaagaactatataaaaaaaagcaatatcacaacctagaaaataaagaaaaaggaagaagtctgaagttgggtaacaagaaacaagatcctgctaacagaatatgctaatatggatgcacccaccagaaacttttctgtacaatttttccaatggaacgccatatctgcggctaaaaccctcagcagcctggcagggaagaacaacgagaaaaattatatctacatatctttaggcagtcaatacaagctacaaagaaaaaaataaacatagcataaacctaagcggcgataaataaatgaaccagatactatttctttaattccaccactgtctcccaaaatactttgaatagttaatttaatatccgtgaccaaaagaggaccaaagggaaaacaaaaaaaaacctttgtaggatttccttcatcatcaaaagctttagaagcagggggtcctcgaacttcaacctcctcttccagctgcttcgaggacatagcatcaactaaaacctgaaaaaggagccttcacttaaaactccttaaaagaagaagaanaagaataatgaattccagaaaagcttcaaggggtgccatgattcatttgaaaaaaaaaacgttcagataaatcaaatttagttnttcatcctcacatgaaaagccagcttttaaacgtcataagcgaaaattttaacagtgaccaataatgctaagcacgaaaaggaagtttgatgttaaccaatcctttctctgtaagattggattcatgcttttatggagttgacatcaattagcaataatatgtaaatgtgaaaagatcttattaattaccactagcctgcgaggtgtgccaaatgctttcgcagcaccatgccgcaatctttggttctctagtaattctagcactaagaccctgagctgcaatattaacaaggacagttacttgatgttctattaaaagaacgcaggaaaaatggaaaaccaagaagcacataatctagggagtttgggaagttaaaatggtgcagcatgagcgagcggcccacaagtgtccatgagtgagtgatagcgagagaaatgtcaagtttctccaaatgaaatgaaattttacttgttcactagcattgataacatcttgaggtggcatctcttcagtccctatctcaataataaacgatcttggatcttcagaaacctgtaacgattgaacaccacataaacaacaaaaaaggaaactatatcgtatttgacatcttcagaaatatatttctatatcaaaatacccagcttttgatgcgtaaatagaccatataagcaagtaatgctgaagatggcgacaccaaaaaatttcacaaactaatatctcacaagtcacaactcatcaaaaggaaataatcattaatcagtaacaaaagctccaattgtaaattctctaattagaaaacaagccaaccttttcagccactttttccagagcagctctgtgacaaacgggaggaactggttcggaggcaacaccaagaggatgtccaagagactcacgtgtcgctaaccacagttgggcacattggcgagccaagctattctttcaaagaggatgcacagaagcaaaaaatgcacatcataaatatttttacaagtaacgacttgtttaaaagcatttcctctctggttaatcaagctcgttggattgctcaataatacactctaaaaaaactggaacagatcttacctacgcattcgaccgaaataacgagcacgttcagttacgccaatgaaacctctagcgtctaaaatgttaaaagcgtgagatgtcttcagaagctggtcatacctagcatgcccccaagcagcaatttgttaaattcaagaggcagtggttaaatatggacaagaaaattgacgatcgtgagcattgtgataaacatacgcagggattggaagtcctaaggcaagcaaggaacgtgcttcttcatcaaaataatcgaaatgcttttgaaggcgatccacactagcatgctctaaataatatgagctcatttccttcctgtaatatccacccaactatcagtctcaaaacacagaataagttcgataatgtttgataaaaatccataaaagtatatcaggcttttactcattttccaagaaaagctccccataggtgattccatcagcatataagatctttttgaaatggtcaacttcctgtaggttaaaacgaaaggcttacttaaccccaacataacggacctaatacggaaaaatggggaccaccaccattagggaggaataggcttgccttgaggtacaatgatgaggcgctcaggcccataggttatttcaccagatactgaagccaccggaagccttccagcctagaaagaagcaaacttcacaattata

SEQ ID NO: 27317 - DNA, 3793 bp, Arabidopsis thaliana landsberg
tctatgcccatgcattttctcatgcgagggaccgtatcatgttatgtggcccctcccaaagtatttgaaaattgttgtcaagtcctatcatttactttgatggttaatcttttttttttcctctgatggttgagagtcttgagacttacgagtagacaattcgttttatgtgtgtttttgtttaattatgtgtcataaactcatactaaaatagaatctcatactaacaataacaacaaattcgggaagagtaatcaaaattttcatcgcttcatataactctcttaatttcaccgctatggttgagtcgatagaccaaaattttatttatgatttacttcgattttttttttttttaactctaatcattgattataaacctaaaccgttttcatttttataaaatacatatatatttttagtcaaaaaaatccattctttaccatttatttttatttttttgaatagaatataaattttatttaaaaactcattttacattaaatgtaacggtaacttaaacattttgactaaacattactaaatggttgaattttttttttaagatctttcttatctcatagcaaactaaatcgccatatatcctccctcgtatcttccgtctccttcttctctaccacttgtatttctccatatatctatattctttttacttggtcaattccataaatttgtatcactcaggtgttattgaacacaagttgaagaaggaaaaaaaaacaagttgaaagaaaagagaaaaataagcaaaaagtagcaaaaccgaaactaaaaaaaagaaagaaaatagtaagaacaaaatgaaaacgctaaaatcagaaataaaagaatcaaagaagcaaagataagcaaaacaagttttccaaaattgttgactctcttttacaactacacaaaaacctttcttcaaaatattctcagattctcttcttcttccttcgagctttcacagttgattcaattcccgatttcaaactcaatcaccttcagattccgatctccattctctacatcaatcacaatggagaatccgaatccaccagcagagaagctattgaagaagatacgagagctagaagaaagccaagaagatctaaagcgagagatgtcaaaactcaaagtatcagcagagattaaaaggcgttcgcattcttcatcacctaaacgaccttcaaggagaaacagtggagaaggaactccgttatggagaaaaaccggcgccgcatcgttccgtcacgcttctccgttacggaaagagagtcattctaaagacggagtagctggtggtggtgatggaccatcggcaggcaagttcaccgataaacagtatttgaatattttgcagtctatggctcaagctgttcatgtcttcgatcttaatggccaaattatcttttggtgagtaggtagaacttttttggttcccattgtttcttcataattagtagtcaaatgctaggattgtgatttggattcatataggagctcttggaatcgattgattagagagtgttggtatcgtttgtagtataggatttagtatctgatatgttagctaagttatgttcacagttcaaattttcttggaatggttgttttaggaactcgatggcggagaagctttatggattctcagctgcagaagcgttagggaaggactcgattaatatactcgtagatggtcaagatgctgctgttgcaaaaaatatctttcagcgttgcagcagtggagagagttggactggagagtttcctgttaagaataaaatgggagagaggttttcggttgtgactacgatttctcctttttatgatgatgatggtttgcttattgggattatatgtatcacgaatgattcggcactttttcaagacccgagagttcctcccgctaaaaacaggtggcaagaaggggattcaagcttttgccgggggactaatggtgttgcatctaagcttggttttgattccaaagaagctgttgtatcaaaacttggccttgattctcagcagcctatgcaagttgctatagcttcaaacatatcatatttggttagtctaattaggaagcatattctgatcttttcgtaaactgtcgtatgactagtgtagtctaaatttcaggcatctaaggtgggcagcaaggtcaggtcgaaaatgcgagcaggtgataataacgctgcaaaccttgagggtggaagtggggacagtcatcagtctgatcagggtttcttcgatgctgctttctctgaccagagggaagatgcagaaacaaatgatgctagcacacctagggggaatttgatccagtctccttttggtgtgttcttatgtaacgatgataagtcttcttcaaaagcctccggagaatccaatgatgaaaatgatagaaactctgttgtccctaagaaacttacctcaaagactgaagagtggatggtaaagaaaggactgtcatggccatggaaaggaaatgagcgggaaggtttggaaagaagaaatgctcattctgtgtggccttgggtgcataatgaacaacaaaaagaagaggctcatcatagtaattcctataacagtgttaagtctgaaagcctggcaagtgaaagtaataaacctgccaataatgagaatatgggttctgttaatgtgaatagcgcaagcagtgctagcagctgtggaagtaccagcagcagtgttatgaacaaggttgacatggatagcgactgcttagactatgaaatcttatgggaggatttgacaattggagaacaaatcgggcaaggtgatgtactcctttgagaaagatatctcttttgtgaaagacatatctatccttcaagacatcataccatttttgtttttttttatctattctgctaacatgcttgttgtaatttccctctttatgcatacaggttcatgtggaactgtctatcatggtctatggtttggatctgtacgttcttgccacctgttgacattacagaatatgcatcatggattgtacaagcctccatgaaaatcacgaacttaaaaaatctattactgagagttgctaatgtgactgcaggatgtggctgtaaaggtgttttccaaacaagaatattcagaagagatcataacatctttcaaacaagaggtattattgttttctgtcgcttctctaagcatgtttggtaaaagaaaattgaacttttatttgctatttatagagagtcacacctgccttcacatatctcttagcttctttcgttagaaaatttagtccctaaactaccacaatttccccatatataatcctcttcggaactgcatctacccgaaaagtctatcctttatgaaaccagcttagctactcattctcattttgatgtacatcggctgaacttggttttttctgaaggtatcgttgatgaaaagacttagacatcctaacgttttactgtttatgggagccgtgacatcacctcagcgtctctgtatagtgacagagttccttccacggtttggtcttattactttggctaatattacacttccttttgtgctattcgaactccggggccaaaactctgacttaccctatcaaataacatttgcagtggaagtctcttccgtttgctgcagaggaacacgtcaaaactggattggaggcgacgtatccatatggcctcggatattgtgagtattagtcacacactagttttccagttgtgtgactgcagagtctgcagacccactgttttctaagtaaagttgttctattttggtt

SEQ ID NO: 27318 - DNA, 1785 bp, Arabidopsis thaliana landsberg
tattttggttaagacaaattaatatgtaacaaaaaaaaaaagtggaaggataagatctagtagtaggatattagttatgcagtaagagaaagaaaaaatatatgtcatttagctttttggttgctttacaacttttcttattcccaaaaagttatgtttttgcataatagagttaaaaaggttccacccaaaaacatattatgtgtcattttcagattgtctgactttattttgtgtattaaacaaaattataagattctactaccaactagttcgttaggtgtgatttctatttgaattctaggtaacatacagtattttcattccaagatttttaaaagaaaaatgttaaacgaatagatcattatgttgtatattcaactatacatgtacttatcaactatcatatattggaatatgaagaagaaattagcttcacaatgacttctttcttcgtacacaaataacaaaataatcttttttttcttcttcccaagttggttataatttgataatatattattgagaatcacttgtcaatctctgcgaaaaaaaaaaaatcaaaaaatcaaaaacacaattagaggctgtattaaaatagttaaacttgggatgaataaaagtttgtgctgacgtgacgaataatgagactttcaagaaaactatgtgtcggatttttcattagagttccgaccaaaagaaatcggaaaaacaacaactctggactcccaatgtctcgaatatacctaaagttttaattggaaatcgaaatcctcaattgaaaaaaattaggaatgcataaacaatattttgattatagataatggtaacaatgaagaaggaggtaagtttagtaccgcaagaagaaggaaagacgatgatgtgcatagttgcgttgttaggaggaagatgcaattgaagaggacaaagcttttcgttcaaaggatttctacaccaaatcataacatcttccatctctgtttcttcctcaagcttcttctttagttctatcaactcgcttccatggaatatcaatgatttttctcctatttccttatttatgttcccactatcatctccggtctcgtaatatattagccttccttcggacttgagtggtaaactcacaataaacgaatcatctgactgatcatgtatcgatgaatgtttagtactagtattttcagaagaatggtattggcacgtatgtgtagtgtatatagtagtagtacctcaatccgtgaaaaagtggaagaactgtgggtagactctgcatcatctttgataactcgaatgtgaagaacgtcaacagtccacatgacccaatcttgtgtgaccgtacgactaggaatatcgtgtgtgatagagtttctccacggtggtacacctttgtttgccctcagatattgtccgtagcgactcttgaaccgtacgtgtacaccatcgtctgatagcggctcccactccgcagatgaatccaacttttcgggtagagtttgaagtaccttgtgaatatgaaacacacacggcttgtttagcaagaaacatttccacgtttaaaaaaattctgtttatgcgtttttgtttgcgctatagtcataagaatgggttttctcgttgttaaacatttgaaatatctcttgggcaagatttactttgtcaaagtgtttataaatgttatcaatggatttggatgccttgtttttcaagaaatttattgaaaaagaatcctaattttgatttgagatggcttcttgtaacccaatctcccctagataaacctac

SEQ ID NO: 27319 - DNA, 1887 bp, Arabidopsis thaliana landsberg
aacaaacactaagctttaattttattttattttggtctaaacactaagctttaattattaacgaattatgcgtattttacagttttgattattttctgacgttaaaattgactttattattactaatggtaataatatgatcgatcattgagattcccatgccaaacataaagatagggataataatttcttcaatgattttgttaaagtcataatttcttcaatgattataaggataaaaatgaaaatggatattggagaatcttgagagggagcttctaaagttgggtggtgcgtaaattttatgggctacccatgtggaattgacgtggcgcacatattcttatgcaacccaaaaccacccactccagcgaagcacacgtgtgtgtagtgacacccgcacgtgcattccccacttacatatagatttccagtcaacggtcaaacatccgtctcttatttttctactcataagaataaacgaaatgtttgtttaatgaacgtgtactaattagattattttcatataatcttgaaaatgatgatccagaagaaaactattaaccttgaaaatgcaaagtatcaccaagaagaaaaatcagattatgctcttctcggcttataaatctataatgatgcaaagttgtgaataacttaaacattgttgttttgtgaccgttcactcttaaattcaaaccacaatctcttcactcttgtgttatattacatcgaccaaaagtccaaaattgtcaaatcttgtcgtcgtatcaacaatgttccactgtcttatcaaactatacatgtcacattatgatttcacaattagcagttagattagttagttttgtaaaaaaggaaaaatcaagccagagtggtctgggaaaggagatagtttctcttgtacacaaggatagcctctttcattgtctcactataaacatacaagggagagaattagggcatcgaaagctttcattataacacaagcaatatccttctaaacccaccagggctttttctccatcaagtccttggagaaaacataacggaattttgaactgtatggcaaccattcgacgacctgcgatgctttcttgttgtttgggtttgccttgtacgcatttttgtattgattctccaagcttttcgtctgcgttatctattaaccatctcatcaggtcatcaaagctcagagaagcttcctttgtaaacctctctataatcttaagtaataacactttcttctgcatctttacaaccacgtttgctccaagaaactctctttttgaagcatctaattcctctttaacgtttgatgcagtgtaggcttttagctgcaatcacttccatcatgtaatttcccattacaagctattcttttgctcaagtaaaccaacatattctgactgaaatgtgacaaactttggtatatgtatgtgaataaaattagtaataaagcgtcaaaagaagttaccactggatctgatagagcaccaatgcaaagagcaaaacagacaagtggctctggtttgtcaaggctaaacattgactttactttatcttcagctggtttcttcctcaaggcggtggaaataatggtctcaagccactgcaacatatgattctttcaatgattcttctttctgtttgaaaaaggataaggagttaagactcttacacgtccattccgtggagtctggaagcagaagatagagtattcaatggtgtttgcattgatgatgtgcccaccgatatatacgcagactgcactagacattagacaatggaacccattagtctctgctcaaatatgaatctgttctcatgtcaagcattgagatcaaagtagaataccttgtgaaacatagctaccttctgaggaatgag

SEQ ID NO: 27320 - DNA, 2566 bp, Arabidopsis thaliana landsberg
  unsure (1)..(2566): unsure at all n locations
agctaggttcatgcacttctagtgaattgatccatccctttgattacttaacttcacatttagggaacaaacaaagctagattcatgcacttctaggtgaaggatatcaggatttgccacatttctatcaaagaatacggttaagaaagtctataggaggacaaaaatagatatgttttcccaaaaaagattcaaagctcaagttaaatggaacaatgagttagcaaaaaatggtttaacgggaggagaaatagtggtagtgtcaaccaagtcgccttggtccagtagtaaagagaggtaattcctgtcacatgggttcgagtagctttggccactgggattcgagtaatttaacatgggttttttcgggttccagaattagtctttggacctagaaaccctttaagatcacctgaattatcaaaaaatatatatatagtagtagtgttgtgtcctatgttgaaaagtaatatggatcagctttggaattctccaggaagcaatgggatcatgtgggatcaaaaagaataataaagagaccacgattgggcaattactaggcacttatgtcattgaggtgattagtggatcataagattatgcctactgttatcctcaatttgaccgtatactattttcttctcttttagccatccttgaatacctaaccgaggttcaagaatcagtttatgctttcatgttgggttgacctttgttaaataggttatctagtcatgaagagcgaatcaagccaaactcttttttttttttttctctttaattaaaataggattgtctctaaaataaaattttatctaatccccgattttgtaattttacttttcatctcaaagaaatacaaattaatattacaaaataaaaaaaaatatgaaatataacccgtcaccattaccatcaagttttcaaagttttaacgaataatatatcaaatcaaaactttcgtgatgcagaattcaatctttagaattttaaacatctaatacatatgatcgtaataaattttagaatatacatataaaaatgcatattattttttacataataatatcgatttccgttgtttactatacacgtagcaagacctaaacagttttaatctgatatagcggaaactaattttggcaccttagacaattgattggtcaattcaaccctcaataagcccaagtggaaagacaaagaaatttagggtattttgtcgaatgagacataatcaacttgacttctccaataaactgttttcactagatgatggatagtagttctgttctaaacatggttaatagagatccaaaacccaatttctctatggactttattggtgcaactctttaagtgaaattgaaaccttacttcaacacatttcanatgtatctacctaattaactctttatataaaattaaaaaaaaccttagtgcataagtgggtaggtgaactcgagtctcttgcaatatgtaaagaggcgaatcaaagttgatcaacaattaaacacataaaccgttaagttgacgtggctgtatctcttccgactcttaaaaatcgaaaattactattatacccctcagaaaaatggcagagcgtgtgtctctcacactcaacggaaccctcctttctcctcctcccacaacaccaacaacaacaatgtcttcttctctccgatctaccaccgccgcttctcttctcctccgctcctcctcctcctcctccagatccactctcactctctccgcttcctcctctctctccttcgtcagatctctcgtctcttctccacgtctctcttcttcttcacctctctctcaggtatatcttcactctctcccttccaatttcctttatctctcctatatctgaagctgattttgtaattccacgacctaatttgatttcagaagaaatatcgaattgcgttggtgaatcggagtttcaactccaccaccgccgctactaaatcttcatcttcagatcctgatcagttgaagaacgctagagaagacatcaaagagcttctcaacaccaaattctgccatccgattttggtttgctcactcccactaatcacttctctgattcgattgatcgattttgatattatgtgttgtgttgtgttgaatcataggttagattaggttggcatgatgctggtacgtataacaagaacattaaggaatggccacaaagaggtggagctaatggaagtttgagattcgatattgagcttaaacatgctgctaacgctggtacctataagctttataccattattacgagttagtgttatttagttgtttgctataagcattgtttgttggttgttattaggtcttgtgaatgctttaaacttgattaaggatatcaaagagaaatactctgggatcagttatgctgatttgttccagttagctagtgctactgctatagaggtgaggttaatagttcttaaaggtagtttttagttgttgtgaataggtttagtaaagttttggtgagttttaggaagctggaggaccgaaaataccgatgaaatatggaagagttaatgcc

SEQ ID NO: 27321 - DNA, 1293 bp, Arabidopsis thaliana landsberg
  unsure (1)..(1293): unsure at all n locations
ctatctgatgatcacaagatcctcctgaatccgcaccaccacctgattccagcgactgcacactatatgttttcgatatgtcataatggttacaatactgctgaagagagaactagtttatgtttatcaatacgtattctacctaactatgcagatatgtacatcgctaacaaaataaaatctatctttacatctctcaggcatgtaagtaatgtttacatgggagtgtccaaagaaaagaatctagcacagaagtaacatgaacatgaaattaagagtctaaaggaaggtaaacttaccttgacttcctcactaatgtgtttctcaatggcattgaaggaatccacagcttccaattcattcatctgagacgtaatctgcctcatatcagtcttcattctagctagcctccataatctacgctgttcttgttcagcaacagctcgccgtctttggaaccaaggcgaaaagttgggtcctcgtagaaaccgcctgaaatataatgaactgtttagcaagggaactaaatattggtagcccagaatgagacaatattgtttatacctatacaagtcgggccagttagatttcatccgtttagacaaaaacttccctacacctctcccagataaatttgaaaggaattcatcagcaccaaatgatgggagcgcaggaggggtaacatatggggaagacccatctgaaggagcattgacctggaaatatggaccaaaaggggccaagaaatttgtagttaattccaggaaatggcgtcgcagaatctcattattcacaactgacatcgactcctcaacccttggcgacatcccagcatcaataagtctattcaaaatcgaagtgtctggcttggttactgcagagtaggtggtccagacagcttccttgtgttctgtcatgagacacagaggtccatctgnnnnnnnnnnnnnnnnnnnnnnnnnnnnnntaggagagaaccttcttaatgaaagctgttggacgcctaatccttcaggtttaacagataatttaccagccgacctacttgtaaaggctacacggtttgagtttggagcaggggttccaactgagacaacatgagggatgttacgaagagctttaaggaaaaagagattggtgacacccaaaaccattggcgggaaagtgtctccttctcggagtgagtttagtcgagcgaatcctggatcatgtatagagaaatatgagaataaagtcgacactacaaaatagcggcgcaaccaaactcacaagacaagcaactgcctgagttca

SEQ ID NO: 27322 - DNA, 1094 bp, Arabidopsis thaliana landsberg
  unsure (1)..(1094): unsure at all n locations
gagcaatcttgaggtctttaatgtctcatacaacaacttttcaggagcattccacagggaaaacagtttaacacctttgacatgcgaagctacataagcaatcctcttctctgtgggcaaccaaccgacataagctgcattggtaatacctttcaagaagcagattatggagtggaagctgttgaaagcacgatcgacatggtttctttttactggagttttgttgcagcatacataacaatccttcttgggttactcgcatcactctcatttgattctccttggtgcagagataggttctacatcgatgatgcttgcggccacaaggataggaatatgttgtggcaaaacactgcaggtaccaaatgttcttacgtgctagtttcattgtcgtccccatctgttgttgttcttctcaaacctcctgctttgtttcacaaaaccagaacataacttatgttttggttcctctgtactgtcttttgtctttaaataaatgtaatgcctcaaacatatcttggagctgctttggttgttggttcaatgcataatctactgaaatacaagaatttgcatgaaacaatagatacagagaattttccattagttgtctttcttcttttatgaattctctttctatatcgctttacagttttttctttaggtagccatctcaagaacttcagtaattacataacacaccatatgattataattctgctgtagaatacggaagacccaagaacgaccataagaatcagcaaagacgaaaaaaaggaccagagtgaaacataacacagttaaagagttagagaaaccacttgtgtatatattttgtcttcttcaacagacttagctactggtcagcaaaaagcgttcgtcgccttcctgactttgcttgcagacggcttgtctctgcatgcacgatttcattaaccagatccttgaagacaagcctctcaacatccagcaccaatcctgacatttctccactgaagtctgcccagttcccagatcgaatcgtcacatcttcagcangtatacttttcaagaagtcgtcttcttcttccaataaaanaagtttctgatctctt

SEQ ID NO: 27323 - DNA, 1819 bp, Arabidopsis thaliana landsberg
  unsure (1)..(1819): unsure at all n locations
tcctcctttactgagagatctttggcttcaccggatttagttttccttctgcagccaaatgcttttaaaatttttgctcctatgagtaaacacatcgtataaagcgtcactgcttaagccagcttaagtcctccaatgactgatctttttgtcttgtaaagtgctgggtttgcatcgatcgggcagcatatctgtagaaccaaagacggatctggtcatagtggcagctgacaactttccagaacaaaatgttcagttggcgcaagagaatttgaatatatccatccaagggagcttctcaaggatagacatcggtatctctcccgtcaaattgttcctcgacacatcgatagccacaaggttcttgatactcaaaatcgggatatgtcctgcaagatggtttccagaaacatcgagtgtactcaaatcactcagctttgagatctctctaggtatgtgaccagaaagatttgtgtttgacaagttaagatactctaaaccagaaagcatctcaatcctcggaaacattcctctgttgaatctattccaagctagatttaagtgcttgagcttctttagtagtgtcagattcttgataactccactgagctcattctcagacaagtcaagataaaccaaactaaaccagttggagtctacctgagatgagatatgaccttgaaaccggtttttgctgagatcagccacttctaaagtctccttgaacacacctgtcactgaaccatcaaactgatttcctgaaatgttgagaaaactgatggatttcatatcagcaaaatctgtgtccctgccatgaatcttgtttcctgcaaggctcaaagtctcaagctttggaaatgcagagccaaacccatcaggaagagacccttcaagctggttagaggagagatcaatagaaaccagggattggcaaccaagaagtcctcgtggaatcgacatctgaaacccattatgatcaagcttcaagactctcaaactaacaagagaatccacagcttcagggattgcaccagagaaattgttgtaagagatatcaagtaactcaagctgcccaaaattgccaacattactagagaaagacccagagatcttgttgaaagagaggttgagattcttcaaagtgttcaaactccagaaatcagatggtaaagcagagattttgttgttgctaagatccaaagattgaagcttgctgagtttaccaattgtgttatcagggatttgaccagatnnnnnnnnnnnnnnnnnnnnnaacataatcacatgctcattcttggaatcacagaacaaaccttgccatgaacaaaaaggagcagagaagttataagcttgagaagagcttaaacccatttgcttatagaattcagagacaaagaaaccatctgtgtttggttcttggcaatgagaatgcttcaagaacagagaaagaaacaatgcataaccccaaaaaccaagaccaagacccattgaagaaagcttggagctaaacaacaaaatctgcctccagaaaaaagaaaatctcactgaagctagtactcatgcaagaaacagttgaagacaaatattaaggagagatctgaagatagaaaaagtgtttgtttaactctgtggtgcttctcaagaacacgagagaccaaaggacataaaaacaagaaaaaggaggatttttgtcatagattaatatataatattaagcttcccctacctctgattatgacaagagtatctttttttaattgggaattctgaaataccaaagagaaagagagagagagaagaggtaatgtagacagttgga

SEQ ID NO: 27324 - DNA, 1835 bp, Arabidopsis thaliana landsberg
catataagttagatatatagatcgtccccaaattagacaacaaaataagttcaaaacagtataatcaatttaacaagaaaaccgataacccattattatacctaattattaacaaaacataccaaaatagaaatgtccagtctaattcaccgtggcaaatcagtctaaatacttgttcaaatacatactaaatataaccatcttattgcatacgcatataaactcatctccttcttccataaaaactaatccaccacccggtgttcagatcgcaaacacaagaacgtgtatatatacacaatatatatacgtttccgtgtatctatcatacacacgatgtctatcaatccctatgtgacaatctttctcctcctcgccgctacctcaagccaagcgttgagtatttctctagctgacccctgcacggtgtcggattttcccgcattgtgcagaagtaccattaagggtcaaactaatgtgaatgcagcgacagatgtggccataaaagagttgatgaagcggacgaggcaagccaagaaaatcgcggagaaagagctgaaacgcgatggaggagtcgcgacttgtttgtccaacttcaatagcgcgtttgataatttggaaaaggctcttacaaacattaaggaaaatgatggttttagccttaacattaaccttagcgccgccttgacggattacgatacttgcagcgactcgatgaaggaaactaaggaggtcaacgtcatttataaatccgccggggttttgtccgtatggctgataattgcttggcgctttcaactctcgttaaacattgattttaaggagacttggagatttggaagagaaattaaaaatggttttatgggtttatttatttgtaattttatttctttaatttgttgattcagttcgctttaaaaaaaatgaaaaacaaacaagaaaaaaagagagaggaggatgatcatgtgtgtatgtagatggaaaaatgtttggacaccgggtatctaatttcaaacatgcatgttcaattctgttccatgtcctaagtgttttaattcgtaatgttatattagttagatatactgatctacttctctttttcactcttatatttgaggttctaattaaatctgtaggtttatttagagagaattaagcattcaacctcaaccattgcatgcaaaacaaaagtctccaattaataggttttctttatttggaggagggagctcgtatctaaattcagattcaatgatgcgagattgcgagtaaaccttttgtcattttgaaagacaattactagttctttaatttgtttttttttttgggtttaaaggagttgtccatatatgagttgaagaagattttgtttcccctttgtaacactaccaaaaaaatctatttaaatgatagatattgcgtgttaagtgtgtatgtgtaatattacctatctgtaacattttcatggttacatcattaatggacaactcacaataggtatccatgatgatctaccctaaacaaagttcatgcatggtccgaacattaacgtccaacctttcacgccgctttgtaaatcatgtctcattatgtcatagttaataactccaacgccaaatcttactttgtttcaattaatagcccattgatgatcttaattaactaagatcattactggtatggttccagataatattggaaaaagctgagctctcgaggctgctttagagacactatcattgctcttacatcaaactgtttccattctccttttgttagctttaatacactcatctttattttctctttaacttttgatatctctctctctctat

SEQ ID NO: 27325 - DNA, 1405 bp, Arabidopsis thaliana landsberg
caaccgattgatgcatgatgcatctcaaaagaccttttcaatttatttttctgttatatatgttttaattggtgtagaaaacaaaactaatgacttgtttatgtgagttattggacttcttcgtattgacgtattacaggagcaaccccattgaccatagtgcgggagcgacggctgtggctagtggtgactaagaaaaataacaaattcatttggacttttgttttagaagtaaaattataccacatggttcttatatgaattgttggactacttctctatttaatatctctgttacttacttattagatattactagtcagcacgtaccctaaggttgtgttgtattagtgaataaacattggttaaatagttgtggtcgagctgattgagttttgtattggtcgtcgatgctaaacacaaaaagttcgactctgcatgtcatccacgacactagcaaatacggtttttttaattaattgttagattttcctaccatttaaacgagaaaaatatcatttaaatcatcaatttaccatttcgttaatttaaatcatgaattctagacctaatgatttaaatctttatttttatgtgtacttaatgatttaaatgctcaattttatgttgagttttaatttatcacaaatttttgttgattaaaccaattgagacacatcgttaactggctaaatggagcaatcagacgatgtcatcacatagtttttgaagatgaagaggaaactatgttggtgtagaagaaaaattatgtgatggctttgaagtgctagttatgcgataacttaaaccagttaacaatgtgattcaattgactttgtcaacgagaattcatgattaaaatgaaaatcaatataaaactaaggatttaaatcaccaggtctatagttcatggtttaaaccagcaaaaacggtaaactgatgatttaaatgatatttttccatatagagaaattagagtagtaaaatagagttaacaactactcaaagaagataattccccaactgctgaaatatattaatagttaactttaaaagaacaatgaacgattctatatagcttttgtatttatcacgcttcatagataaattttcatttatgattggccaaatctgatatattttggtttcatgtgcctagatattaacatgttcaaaatgattgctatgattcataacatagtgaattttgctctacccgtgaaaacatgtttttctacgataaggaaggtaaagaggcaaaatagattagtagatatatgaacgaaattgatttcctgaaatcacatagagcatgagatctaaaattggatcagatacatgacttaccaaaattatgcttaaagagaaattattatccaatggtggattccttaaaagacaagcc

SEQ ID NO: 27326 - DNA, 1883 bp, Arabidopsis thaliana landsberg
gaaaatatttaaattttgactgtggtgattatgttctatactttcgataatcatccatggtgaggacacacgtaaacggctcacgcgtgcctgattcttgtggacattgcatctctgaaatttcaatgaagcgaagaagagtcattatttgtcactataagataatgaatgattattaaaacgtataaaactctcttcacatctatttatttctctctaagtaagtacaaatacacattatttatatacatgtgggaatgatattaggaacacaatctcagagctacacaaacaaagtattatcttagattataaaaaaaaattagagccaaaaacgatgaatatcatcaagttacttgtggtggtattcattgcagctttgagtggtaatgttggagcacgtaagatcggaggaatggccaataataccaaactcatgaataaaaaacagccaattggaaactctactaacaatgttactggtggagccacaaatggcaccaaagctcctcttagtggtggcattagaggagttgctccgtctcatgtaacagaaggcggatccactaatggcactaaaactcctgttattggtgtcattgtaggagtttctcccatcaaagaaagtggagccactattggcaccaaagttcctcttaatggcgttttaagaccagctcctctacgtgaaggtgaagcaactcttgccactaacaacactggaaaacctagtgtttccgttatgggagtcggtaccaacgtacaaagcgaagttctttttactactaaaaactttgaaacgagatttgtcatcaatgcaaaggtgagtgaagatggtagcaacggtgggagtggtgcaaagccttgaaacattataaagcgtaagtgatcatgcttaggcttatatgtacgtataaatattctctacaaagtcacattaatctcttttgtatgacaaaacaaataatttagagattgtgactttctatttcttcattttaattttcaacattataaaaagagttggctacccgataccccgcaaaggtttaaagtcttatgtgtaaatcaaatatcaataaatatttccatattttgtcttttgtaggattttttattagaacttgtgtcaatagctttggtacaagaaacttggaccgggcgcccttttgttggtgtagatttctatcaatttataagattttgtcatttgaaattaccatattcaggaaattctcgagtgtaaaaaacgttatctctaggtttaaagaactttatgaagttgctaacttaaaatgctcgaaaaaattctgtgtggaaagtgagaacaggggattctacaagaaaacattttgtttccgacgaacttaatggtcggagaatttctaaattacgaggaacttgaatacgcttgaataaccattatccaatataaagcaccaagaaccacatgttcaagtctcgaagataatgtttagcataccaagagatgacgttggagtctaataaaaatattttttaatactgaagaaaattaatataagatcataaataatgcatttattatatgttttaaataaagccattacagacaaaagagtagcatttcatagtaatatttagaggtgattttatttatgaacacaaaagagattgtgagattgtagttttaaggatattattaataggattgatcagcaatatgcatgagagcacctcacgctcaattcttgttccctttgcggcctttcttctcagaggaagtgccgttcacaatggagccggaacctactgtaccttttgcacgtgcagcagcagctttcaaggttcacttgtagctgacgcatttcctttagcgtaagaaccactttttagaagaaact

SEQ ID NO: 27327 - DNA, 1640 bp, Arabidopsis thaliana landsberg
gtctattggtattgaatgcaagacaagtaccttcctctcgatttattattaccttattattgcttttggctccacctcaacgacttactaaattttgtcttttttttagttataaattaaagtagtatgatttacatttctttttttttaccaagtcatgtatatactaatactaatactggttagaaatgttttttttctatgttataggttttatactagtaacaaaatctatctatactaatatgaatcatggttgatatatctactatattttgaatatcatcccactttttcacatgataactctttttttttcaacatgtaaaatatgcatacatatttttttttgtaggcagtaaatatgcatacatatagcttgtaacattgtctccctattgattgcgtatttaataaaattttgcatataaattttttttttttggggacccgttgtttgttatttagggtacgtctgagaggctcaggagaaataccgaagaacacgtcataacaaaccaaagagatagaaaaggaaaacgaagatctggacgttcattcatagttgaatcggacggtggagaagaaagttacctgggaaccggacatgtcggtgtcagcggaaaccaagcaccaagaaccgagaaaaacagcccggtttacgaggaagttagaaaggagttctctttttcactgaccgcttacgtctgtctccggtcccattccttgcctcatccttcatttaacgcacccaaagtacacaacaccaaaattaacaatctgtattttaataccagaggatctagagtttaagaataaatcttaatccatgaaagttctgttcttatgaatctacactctgaatccatgtcactacaacaaaaacatctagatttgttttgttctgtcactgtatcatcccttccaataaatcactagtctaataatttcatgagatatatagactggacaattagttttcttgatagtacatcatttacaatctagaaacaagaatactcgacgtgcagaaaaaaacaagaatactcgacgtaaaattagccataaccaatgtcacaagtggggtaaattgttacaatacaaaagttgaaggtacaattgaaaaaccaactaaacttcaaggactggattcagaagtttataatttttacgggacacacacgaaacgacgacgtatgtagaaaaacagagcaaacactgccaccataacaaccatgatcatcattatcatacgaaaataaccaaattcatatatatacaaaacacaactagttatgtatatcatatcatctattacacaaatcaacgttgtgtgtttgcttcgttttccccacctggttcaatacaattagcagcttaaaatactttctaagtttatcttctgtaatgcaagtttgttttcatagatatctttctctctctgtttcttcttcatcttgctgtcgataatcggatagattcttgatcaacggtggtttcttcttcatcccaagtagccggtaaagtcggaagcaacaatgcttctttgttcctaacttcttaaagttgttcccattcagtccatttctcagccaaaccaccagtcccttaagcattttaccactcagacacgctggtct

SEQ ID NO: 27328 - DNA, 1136 bp, Arabidopsis thaliana landsberg
tagagtaaatcttctgtggctgttatagtaccttttaagtcaccttattcgtttaccactaacctctttcactttttttgctctactgtagaaacctgaaatctgggttccaggtcaaacgagaaatcctgaagcatatgttctgaaagaccaggtaatttttacaaaggtctattgagaatgttatagcctcttacattgttaaatgtcatttttttgggtggttcactctgttgcctgtcggtggcttagattctagtgactctttctatccgagcaaacttgtgatgtctttgtttgttgtcaggaatcaagatatcgtcagcgtcatcttgatatgattttgaacgtggaggttcgtcagatattcaggactagagctaaaatcatctcctatgtccgcagattcctcgacaacaaaaatttcttggaggtgttcaatttctcccaagaaaaatctttaccttcttttgatattgcctctggttcaagtgttctttcctgcatttgatatccttaaattttatttaggtcgagacacctatgatgaacatgattgctggtggagcagctgctagaccttttgtgacacatcacaatgatctagatatgaggctgtacatgcgaatcgcacctgaactctatctcaagcaacttattgttggtggcttggaacgtgtttacgagataggaaagcaattcagaaacgagggtatagacctgacccacaatccggagttcaccacttgcgagttctatatggcttttgcagactacaatgacctgatggaaatgactgaggttatgttgagtggcatggttaaggaattaacaggtggttataaaatcaagtataatgctaatgggtatgaccaggatccaattgaaatcgactttactccaccattcaggtttgaccacaatatcttcattgattaaacaccatcttcaggataaagctgtttgtaggcactttccttcggtcataatctactcaatttttgttttatgtagtagcattgagttgataggagagttagagaagggtgctaagctcaatatccccaaattcatggctagcgaaggacctaacaagtctatgattcatgcatgtgcgagctttgatgtcaaatgcc

SEQ ID NO: 27329 - DNA, 1446 bp, Arabidopsis thaliana landsberg
  unsure (1)..(1446): unsure at all n locations
tggaagaagctaaattttgtaagcagaaagtggcgacatgatccgagaaccgagagtttcgtgtttcgatatgttaacagatttcatttataaaccatggtaactctataattttgacagctcatccaccttagtaaacatttaatacgtaggaattaagtggttatgtggtccatgcatatgtctcgatactaacacgtaaatggaaatatggtttcattcgtacctatgtttctgtatccacatacgagtatatttacttatgtttttttttagttttaaaattattaatggagtatatgtctaatatatctgaccgaaactaatgtcaacttgtttaactaaaaacccttacatttttcttctatttcttcttcttttttgtactacgataaaaaaaaatcataaaatatgtaattatagctttataactttactcagttgcaaaatagataagagttaaattgaagtaagaaaaaaaagtcatgaccaataatgcactaattactaaaggcaaaagaagaaaagaatcatcaaagtcatcttttatagaaaaacaaagaacttttattgttttcgaccaattaaacggtgcgagtnnnnnnnnnnnnnnnnnnnnnnnnnttgtcgtattctctagcaactccacctctagtttacttcctcaagaaagagtcatatcatacgttaagtctatatcggcaaatcttgaccaaaagaatatatcaaatagaataaaatatattgagatcgaaaggaatagactcttattccaaagattagaaatcagaatgaaaatggatcggcaaacggcgccgtatttgttgccggccgccgggaataaacaagaaaagtaatggcaacaaacatcaaagtaatggtttggatagatcgatgaaaccataattgaggacgctagtcaacgtattgtagtaacatgccatgtgattgccagcttcatgcacagacaccgacatgtattatcatgctactattcatatattaatatcaatatattagtcttatgtaggaattttttagttaactattaatgcacgataattaaggagtgatgatgacaaatcctcatgcatatatagttggaacaaagttccaattcatgcactaaccactagttaatcgtcaatgacagagcgagaggcagcaataatcttttctgatgattggcttccagattcaacaacttaattatatcaatgttttttttgggtgcaatttgatttatatatatactagttatttagcatctcaagacattcttatcatatttaagttgataacttgatattgtaatcagaatcatcaaatattgacattgtacgatgcatgcatttcattagatccacactgtctgatccgcttcttccatttggagtttttgtatactaatccctgatactaatataactatttaattcatttttt

SEQ ID NO: 27330 - DNA, 729 bp, Arabidopsis thaliana landsberg
gtagctcatatgaaagttctgaatatgatcatcctactactgaagaatttgtatgtgagaggagctttttggggtaccatgaaaggccatcaagaagttttcagccgcaacggtccattagaaagggtgagaagcccattgatgctcttcgaaaggtctgtgggaatgacaaatgtgcggattgtggagctccagaaccagactgggcttctttaaatctgggggttcttgtctgtatcgaatgttctggtgttcaccgtaatcttggtgtgcatatatctaaggtaaaaaatctccagaactcttaattgcttagaaaatatatgtaggctctataacaaccaacttatggaaggacgtaaagaagtccatgagaattttgaagtgacactaggcttatattcaatagcaattcagattatagagcatgtgatagaatttgaactttggatggctcggccttcaatttgacataagttatacagcagtctgaagttggctgttgctacaggttaggtcactcactctcgacgtgaaagtatgggagccatctgttataagtttgttccaagctcttggaaatactttcgcaaacacagtttgggaggaattgcttcattcaaggagcgccatccattttgaccccggcttaacagtgtaaaaactccatttatgtttgaaagtgatgataactttgatcacctagaaatcataatgttaaaattactc

SEQ ID NO: 27331 - DNA, 1787 bp, Arabidopsis thaliana landsberg
atcataagcggctgcaactgactaaagggtgacctacagattcaagatgcaaaaatctataacaaagtcaatcctaatagttaactatgaacaaaagaccaagactcctgagaggagcaagcattgtgtttgttcacataactctgatgcaaggtgcagttagttcacctttaatgacaatgcaacatcatgatctttagacaactccaaccgcgctccatatgagggtttcgcttctagtgtatcactctgagaacagacctgcatgaaacaattaaattattcgtttcctgaaaacattatgaaaagcgctaaaatcgattttaataacacagactacggagcataagttacacctagattgttcataccaccttactaagcactagtctaatattgttcatgattttagatattagcaattattaacaatatggcataggtgtaacacaatattaggacacaaacccttttcatggttaaaatttctttcccattgtgaggatagaccattcttccagaaataacagataaaatcatggctgtagaatctttccaagacttgcattcaacaatcacccccaaaatgtccaactctgtaataacttgagaagaacttctgtggaataaataagataaagaagaatgaaaatacaaactagttaaggcagaggccatgagataactgagaaattgtaacttacccacttatatgttgcaaagtagcagaaaatttgcgtacgttgagtcgaatggagcacgtacagatcttaccagttgcacttgtatttctaggagatgaagaaagagggtaaaactttgttgccttgtgtatatcctgcagtggatgaacagttactaggatgtttcgaagaattctagaattctgaaactctactgctattaattagtacttaaaataccttgacaacttcatcagaaacaacaccagaaaactgacttgaatcctctgtgcctccggcaccaagcattccccgtgacaaccagttcaaccacccacgcgacttatttaatgtaggatcgtcactcggttccttttcaggggcactctgatccttttcggatctagcggcaccagtcgctcccatgtttactgtcaattctgagcaagcttcctgcatagtaagatccaaggtaaaaggacagataagaaattgccattgctagggcatcaacttatggcagatatctgaacagactttggtatcacagccaaagtataaattgctacaacagcaacctaatttaccatacctgcatctcaccttccgctgcagacctataacttaagatatcatcaatatcagacttcttctccaattcttccaaacccaaacggatggacttatcgattgactgtagccagaagcatatagcacagacatattagtagagaagccacatgacaagaacaactcaggtttgaaaatgctatagaagaaatatatataatacaccaattcatttgaatgttatgaaggttacgcgcattagttgaacaaaatatgtacaaatatgtcgaccgtaaagcatcttagcaacatatatatgatggagactatggctaagcaacaaaaagtttagggacgaaaacatatgtatttctttcagtcagcgatttcggaacaactacatttttacgatgataacctcctatagagtactttattgatgttagaagaagagaaatgtttcttcaatttccatattttttgaaatgtatgatgacgcttagaccaagtattctacaatttctacctctgatt

SEQ ID NO: 27332 - DNA, 3094 bp, Arabidopsis thaliana landsberg
tatgaactggatcgttcaaactttctttgatcactcgcaaagccctcactaaaaccaaaaaaaacatcaatgatcagtaccaaatcagtcgaaagctaagaaaacccattgtcacagacacaaattgtctgaagatctaacaccaaagacaaagccttttaacaacaacaacaacaaaaaagaaaccttcaacgggattggtgatgtcgtcttgagcaaaagtagaagaaaagcaacagaagaggaagaagaagagcagaggtatgaggagacgagagacatgatgggtcgaaaacatatcgagagaggaggaaacagaggagacccaaggaaaaaacgaaatctcgagagagagagagtttagaaggaaaaggccatgaccaagtaagaaacacaagacaaagaaagaggaaagtagttggtattgggtgggagcattgaagagtgataatacgacattttctaagtttgactatttcaggtaatggatgagaccgacggaagagcgtcatcataagtttccgttgcgccgccgccataacttcaccaccttcttccgtcaaaaccattctacttgctatttttcttcctttgtttaatgattccttgtctgacctgtctttgacctttttgtcgtttttttaatccttttttaatgacagtaggtaaatctcttgccaggtgcgatgaatttccaaatattgtcaataaagttacctttttatcccaccttgattttttttttatgtattaattaaaatttaaaaacgtataccattagcaaatagtagcaatcattggtatattggaatcatatagtatatggcaatttggtcatcgatatcgtatctttatgtgcattttggcccccacgatactaaaagtcacgaaattttccaaagtagtatcgacttttattggaaaatggtgctgattatcaactgatttgtagaagtgtgattaattacctgtagtcattatgattttcttgaacaaaaaaagaagaaacagaagatgtatgtcactatgtcgtatcattacgagagggaaaaaaaagaaacagctggaataaattactcaaataagaaaagaaatacaatgggcactattaaaaagcatagacatgagctatatattatttatgtttagagaagaactttccaacacaatttggttttaaaaaatacccgttaggtgacaataaatgggagaaactatatcttaagtatgttcattatttatatataaaaaaagggagaatcacaattcacacttatgctgatcaataatcttaaaacacttaagatgcctgacccaccagactttatctgggcaaggatagcctcattaggggctcaagttgcatcactataaaatgacgccggaccgctactcgcgcgtaagacaacctacagagactcaactaaataccttattacttacagcgatcaatacgaccatgttttcaattattttgaccgataaacagagggatgcccaattgccacattaagagacggcccaaaacctcctcctgtccactacaggcgcattatatgctcgaggatttcttaaaacaattcaattcttgtcttcttgtatgggcctgataattaaggcctccgtatgatttagatccaaccaataagtatttttcactataagtgaattttacttgtttcccaatccatagatagttccataccaagttaccaacttattatctcacaaaacattctctcagactctcagttcatacaaggctttctgcctattttttacttgttaaaattttgactcaaagatacaaaaatattaactcagacgtggggagatgtattgccataacagcttaaattaataaatttcgttgaagcaactacagaatcttgtaatgaatgctacaaagaagatttaaagttaaacaaatttaaatcatgaaatcgaataattaaataaaatacaaagaaaaaggaaaaaaaaataaaaaaaaagggagggagacaagatgctgcgatggttcacgtgccaatgtgccttttacttttcatcaactagttttctttttaattattaataaatcaactcaatttcgcaattttatagttagtgacgtcacttctctctcctcacagagtcgagtttctctcctacgctcttcatttcatttcatttgatagagagagagagagagaaagagcttcgtcttcttcatctccatcattatctccattgacattgttctcgattgcgaataataatcataattattcacacaaccaaagcattcatctctcagattctcttaaaaaaatggagaaatcagatcctccaccagtcccaaagcccggcgccactatcatcccctcctccgatccaattcctaatgccgatccgattccatcttcttccttccaccgccgatctcgctccgacgatatgtccatgttcatgttcatggatcccctctcctccgccgcaccaccttcctccgacgaccttccctccgacgacgatctcttctcttctttcatcgatgtcgatagcctcacctctaatcccaatccctttcaaaatccttccctctcctccaactccgtttccggcgctgctaatcctcctcctcctccttcctctcgtcctcgccaccgtcacagcaattccgttgacgctggatgcgccatgtatgccggtgatatcatggacgctaagaaagctatgcctcctgaaaaactctctgagctttggaacatcgatcccaaacgcgccaaaaggtccttcttcttcttcttcaaatttgtttctctttccacagaattgaagaattgcaatgaaattagggatttgattacaggattctagcgaatcgacaatctgcagctcgatccaaagagagaaaagctcgatacattcaagaacttgagcgcaaagttcaatctcttcaaaccgaagctaccactctctctgctcagcttactctctaccaggtttccatattcggcgattcctcgtttgatcccaacagaataggaaagttctttcctctgttttacatacatagacagatcttgatttcaatggtgttttgattgat

SEQ ID NO: 27333 - DNA, 1649 bp, Arabidopsis thaliana landsberg
cttccgatttgatagcgtctctctatctttttttctttctttttaatttcaagatagcatctctctctctatctagagcgtatagaaatggttctataaaataatatttatttacaatatacaatgtgtgtgttgggaaaaaatgaagagtgacgctattggtaaggagatagtccacgtggattataactttccgtagtggtggaatagatggttgcgactgattggtccagcactctgatttggaccaaaatctcaaaatccccccatcacgatagatacgcttatatctatatcttgtcgtgcatgcctttttgaattttcaaaaaaaaatcaacaattaatattactattgggttgcttttttttattaattagtttatttgtacttgtttggctcgatatagtcctgaacacgtgtgtatacatatacgtattacacataaaacatagatgtacacatcgaatggatcatagatgcatatatgtacaacactaagaaggtgaaaacgtacaattttttttgagatgataaaaaactaacaatgttaagtataatatgatttttaattaagcattgttgtatttacaatgatgtaattatagaatatgtaggccttttaaatctgtatatatagatagagtcctttatataccaatccaaccacattcgatgttagctagttccctaaacccttccatttataataaataaacaacttctgtggatgattataaattgcagactattaagtacttacttagttaattacttattcttctaaaattccaatcataattcgaaaaaaaaaaacacattctcttttgagtgagattaaaccataattctaaataaacttgtttctctccatttcattaaacgagaacaacctaaataaataagcaattaataactaacacctaaattcttataagtgagcccataaaccatcagaaacacacgttgaagacatgacatatctttgaacttgaaacccatctattgtatatatatttgatgatatgcaaagtatttaaacgcatagtcatatcaagtttggtttataggaaccgttgtcaatttacattagacggattacgtagcattttaaatatcaagagtgtatatatgcatgatatatgattcacttcacagtaaatttaacactgtgacgatagtactctacattatttcaaaacttaaaatatgactgtttcatctaattcaaaaaagactaccattcaattatatctttttgttatattacattaatacttatttagatttttttttcaacaattcgtatatataatacgacgacaaagacatatatgaagtttttttgctggcaacataaatatgttgagatgcattttaaaattgggacccattccataaatatggaaccaatcatcaaatcttttatactagtatgctaaacgcttgccctagccacgtgtttatgtactaactttcctcttcatatctctcatactctctcaactctcaactattttatttttcccaacaatattgagcattttcttgtatcaaacacctaaaaattttaacacaccctggagagatagtgatatcgaggcagactcaagttatgcatggcaacggaaagccagtgtcaagcttctaa

SEQ ID NO: 27334 - DNA, 1139 bp, Arabidopsis thaliana landsberg
agtcgttaaagtacctttgcttttattcccacattccgaaataacaacaacatgaatacttaaatcttccatttcccgaagggactgaaacatcataggcttcattccatgatgtttattcctactcatattcatccaacaacaacatgaatacttaaatcttccatggatttcaccttcgatcgtgtcatctccatcgaatcaagctttcgtttcaaatcccccaaactcaacatagcgtgagattcgaaccagtttcaccgcaccaatgttaaggacgataaaacagagatcaacattgatctctcttcaagcacatcgcttggctcaagcacatcgctcgactatcacattcaacataaagcataaaccagaaatgagtgagtaatgactaatttatactcgattcccttcaatagcaaagcctctgtttccacccaagtctttctcttcttctttgcctttgtccatgtcatcattcaagtcaacattcttcttctgacgtggcatcatccttacatggatcgtatcaatacatctcccattaagacaagcttgtcctcaagcttgaagagagaggaaattgcagtggctagtctctaacgccggtccaggtgctctcatgtatagtcttagattccatgttccaagtggtccaagagtgcgtctctgagggcgcccaagaggaggtctctgttggcttcttagtttgcactacttcttccttcacgtattgtaccaggtttagacgcgattacgggatatgcagaggatacatgggcacgatccatctatgccctcagtgcaggtgccattgaaaggcttgaagtatcagctgtggactgcaaattatgtaacttcaacaacgttctcgtctttttctgtttcagccaatcaccacagtgttgatttaaaaatagtgaagctgcttctacatcagtaattttaccacctctagttgtaccatgatctgaaaatataggtccaaaaactaaccccacaccatttcaataattggactgcagggtcatcaaactcattataaaaaattctgaaccctaagccttcccatgctgccaacctggagtcggaaggacctttggttttatttccacctttcggaattaccaccacctgga

SEQ ID NO: 27335 - DNA, 2035 bp, Arabidopsis thaliana landsberg
  unsure (1)..(2035): unsure at all n locations
ttccactgattatttggatagcttcgttatcatatttatcgatgatatcttggtatattcacggagtgcagaannnnnnnnnnnnnnnnnnnnnaaagtgttgggcagacttagggaacaacggttcttctctaagtttagcaagtgtaagttctggcaacgagaaattggatttcttggccatagaattttaggacaaggagttacgacggatcctgaaaagattgccgtaatacaacaatggtcgcaacctacatccgttacagaagtacggagcttcttaggatcggcgagctattaccgtaagtttgtcaagggattctcgtcaattactaagcctctgacccgacttactggtaaaggtgtacccttcatatggagtaagaaagttgaggaagccttcgtaaagttgaaaaagacattaacgaccgctccaattctagcattgctagagccgaataaaccatatgatatctatacggatgcctcaagagttggcttgggatgtgtccttatgcaagaaggaaatatgaatgcctatgcgtcacgacaattnnnnnnnnnnnnnnnnnnnnnnnnnnnnnnnnnnnnnnnnnnnnnnnnnnnnnnnnnngcgttgaaggcgtggagatcatacttgttcacgctgccagacctgaatctacgacaacggagatggatggaattaatcgccgactatgatttggagattcagtatcatccgggaaaggctaatgtggtggcagacgccttaagttgccagaaaatggaagtaaatgttggaaaggatctagagtcgttaactgatgagttaaagaaagtaactctgttagctctagagggtgaatctagtgagcccttgggtttacaagccgtgactcaagcaaacctacttcaccgaatccgagaagaacaagtacaagatgaaaagttataaaaaattgcggaggagttaaaaacattagatggaccaaacgctagtggctaccatctagctgatgacgacaccttattactcaatgggagaattacagtgcctgatcgtaaaggattacgacaagaaattttaagggcggcgcatacttctttattgagcattcatctgggaagtacaaaaatgtacaaggatataaggaagtattaccattggcctgggatgaaaagatcagtggcgaaatgcgtaagccaatgtgattcatgccaaagagttaaggtggaacaccaagtgccggtaggtttattgtgtaacctagcaattcctggatggaaatgggagtcaatctcgatggattttatcactggattaccaacaagaccaagacgtagcaatgatgctatatgagcagtagtagatcgctagaccaagatggctatttggtatcaatgaaaagcacaaataagtcacctatcctggcagaaaagtatattgatgaaatcttaagactccatggagtacctgctaatatagtatccgatcgagatcctaagttctcatctatattttggaagacctccagcgtgctttagggactgatgttcacatgagcatggcattccatccggaaattgacgggcaaactgaaaagaccatccgaaccataaaaaatatgattcgactatgtgcactagagtgggctggtgattgggaagactacatgcctttagttgaattttcttacaataaccactatcactcgagcatcggtatgtcgccatttgaagcaatgtatggaaggccatgtcgaactcctctttgttggactgaagtaggagagaggatgagttttaataatcggttgatcaatgagattgcggagaaaattcagttcatccgagacaatatgaagaaagctcaagatcgacagaaaaagtatgctgaccgaaagaggcgtgaagtggaattccaagaaggcgacatggtttatcttaaggtaactgcgttaaaaggccaagatcgttttggaaaagttggaaggctaaaagtaagatttattggtccatacaaaattgagaacagaatcggggaggtagccta

SEQ ID NO: 27336 - DNA, 1138 bp, Arabidopsis thaliana landsberg
  unsure (1)..(1138): unsure at all n locations
attgctctttccacaagtaaagaaacctgtatggattaaaatcttcatcatcctcttcagcacttcagcagactcataattagcatgatctctcgcaattagcttaaaataaccttcatcccaataaagtctctcccagttttctctaacctcattatacaactccatgtacttcttacaccatggctcatgctcctaatatttctactctagtctagtcagtaatcaaaaactacaaattcaaattcaatcctcaaaacccatacattgtgaaaagacactgaccgattctttaagaacgagacgagttcgtcgcatgaactgttcacgaagctgtttccggcgcttatttgggatattgtctctcgggattgtgaaacgctcacgcagagggacgtgatctccgatctcgtgcatctctccgtcgacgatccaccactctgatttctcctctttcttctcgagtggcgatagagagggagatttgttccgtcgtcttggctgacttgcctccgttctcatgaaccggagtaaggaagctccgttttgaagcgacggcgtcgccgaaccgagccgtcttgcgacggagagcatagctggtgaagttggtaactgagcgttcactgagtaaaactatttgcatatatgattgtaccaaaccaaaccggtattgcatttatagcaaaccaagtcggtttttgttagttcgtttattttttccactgatgcattatgatccgatgatttgtatgcaactatacatgttggagtctagaacataaataacttggttacttaattgtcttacatcttaaagaaagaaacataagcaaagagccttattttgcacacatatacatatactctttagaatcaaatttactcttttattagactatgtgattacggagagagatgaacggaagaaattctaccaacactaggaccggttttagtcggatcaagagggaagtaaaacggataaaactcgtaccggacatagcaactactatacaaaacacgacaacctttcttgttgtggcaagttgtcatgaagctaaacgaaaacagnttgcaaagcattgagcacaatccaattcggataagtctctcgtgcattggaccaaaccgtttagtg

SEQ ID NO: 27337 - DNA, 1153 bp, Arabidopsis thaliana landsberg
gagcccctaaggttaaactatcgttgaagttcagatattgtaaacgtctctggactttacgacaatgcaccaacactctttcgggcatcttctggcgaatccgaaaattataagggtgatattgactgggagacctaccgtaaactggtcaaagatacattttacctcgtcaacaagaagagtgattcagctgttgcatttattgatggttttccagaatttgtccggaagccaggaaatccattcaagtttaaagtgtttaatgaaagtttggcgactcgtagtcttacacctgtggtaccctctgagatccatgagtctgaaacgcattctgtgatggtggactcttctcccccttctattactgtaacaattgatggcgtatctctgaccatcgtccatgaactttcagaaacaagggacagatttcccctttttcgtggttcagtcaatatcactcagctaactgtacaaatgctatcttctaaagtcaggattatgagcacatcaaacatattagtgctgtactttgatgctcagacaaaccaatggttagtagttttctttccctgggttcttaatatgcgtatggcttccctgatcatgcatttttctagcctttatagaattccgtcaagcaactgtttattttttcttcctttctctctgttgaaataggcgggaatttattcatccagttgaagttagtgctttctaccgttcaacttttcagactcgggatcttaacaatactatgcacaaagtacctacccatatttactgcagaattggaaaggtacttaaagatttttacttcattttccatgaagtattggggatatataataactcgttacatatttttccctcgtatgtgcagtggaggtgtttctaaccgagctgtcgttggatatgctcctttttttgcttggaaaactggagtttgctggtccattttctgtgaaaacctccgctattctttccaattgttgcaaggttatcgtttccttgatttctgttcaacttttataattttcatacttttgatatacacctgttctatagagaaacatgaaaaagttcttcttttttcagatagaaaatctctctggccttgaccttatttgccgtttcaatgagaaacagactgcca

SEQ ID NO: 27338 - DNA, 1238 bp, Arabidopsis thaliana landsberg
gcaaaaacaagaacacaccattgcactatgctgctggttatggtttgaaattgtgtgtaagcctcctcctagagagagggtggtgcagtgtaagtttgcaacaactagaacacaaattcgatttccaaacaacttagtaatggttatataagactcttttaagtgtcgtttcattttctgtttgcagaactcagcaaaacatggacaagaaaaatcccattgatgtggccaggctaaacaatcagctagatgtggtgaaactacttgagaaggacgctttcctctgagctgctttgactcttgaaggatatgtttcttctctgtcatgtaatagtgtcacagagtctgattgcaactttgtcttctgtggggtttttcatcattaaatctggaaaaaagatggagaaaatggatgtttattatggttttgtaatgaattattttcttcatgaattggttttttcttttggctctcgaagtcttttttttttccttctttaactgccacagggcattagtgttgcaatcacaaagaaaaaaaaccttaaacttttattttagagaaggcagagactgtttaatcaaatcagtgataagataatttggagattcttaacatgcagaccgtaaattagaatgaatagtagaaaggcagtagaggatatcgtgataacgatactgatagatgagatttggacataacttatgtaatgcgaagtcgatagaataaaagtggaacaataaaatgcaaagtgaacagcaaagttgatcaaacttggacctcaaatcatctttggctccttgctgttttttgttggtttgttttctctctcgaaagtattattgaagtatcagtacaagcaaatttcaaaattgatacagacattgttacttcaatttaacaatagtataatcaccaacacaaaaaataaaaaataaagacatcttaatctaaaatggatatacaaaaatcatagcattatcttgcacctcggaatttgaccactcctaaacgttttcagaggcaaatttcccggatttatgtggactccaaagattagtgtaggtttcggcataaaattctcctggttactttttttttttaaagatatgtatacaacattataatttaatcatacgaacaaaataaaaagagcttgcaaaaagttcaatattgttcagaaaattatttcaaataaattctgaacagtctttttaattatttatggtgtgtagtc

SEQ ID NO: 27339 - DNA, 1117 bp, Arabidopsis thaliana landsberg
gatgtgcgtataatgactgatgatcgataatattcttcatagcagagtttgtgtttttggtatacacaaaattttggtctgaatgtgttttcttcttaggctaaacttaaaattcggatatcaatatagttgtttttaatttaatatcatatgttatttcatcgggtgggagtataagtggatctctagttttggaaggaagccaagagagaacattccaagagatcatcgccaaagaagaaattgttatggggaaattatggtcccatcgatagagagaatttgcacaactgttggaatgtgcgtttgtatcttctcagtcgtcatgatcacattgcaccgatgttctcaccaaattttatcaaaaaaacaaaaaacaaaaaactactatgagatctttgatgatgatgatcatggtgatgtctgtgatgatggtggtgatagagagctaatgagatgaatgttagtgatgctatatgactagtcattttcactacatctgctgtgttttctttatgctccacacttgctacacattacgaaaaacttacggcttctaataattacctttacaatgattacaaattcgacatatacaattatatgacatatagcagttaagtaatatgatctcaaagatacacggtatacttcttggattggagtagtctaataacaaattttcaacttagaacaatatattaagttgtgtgtatctatattaggacgcaaaccctatatttcatcatggttggaccgttttattcaatggccacacacaaagacgagctgatatctattttcaaccatcatttcctatatataaactaagatacatgtcaatcatatccctaggagactaatgaactatatatacattataattcaaccatttgtgtattttgataaaggaagattattaattaaaagggttgattcatccacacgcagtgatgataaaaagcggcacatatggttgtgtattcataatctcttcatgaaaaaggtgtttttcttttcggccaaactcacgagagtacaatcaaactctaaaatggtgtatacaagtctttgcctcgttgatcattaaccaaaaattcatatcttaaaacatcaa

SEQ ID NO: 27340 - DNA, 1240 bp, Arabidopsis thaliana landsberg
ttttcgtttcaaatttgaaaattcgcgtattttttgacatttttctcaaaacaattttcccaataacaggaaggattatgtaagcccaagaagcaattttcctacattctagacacttctaataaaagcccgtttcaaaattaatttgttaaatatactttaagaaaaaaaaaggcaaattgtccccaaaaaaaaaaaaaaaaagtttctagaggcttcgttagcctaattcattaactaggttctcctagtttctgctgctaattcccaaatctcagcgaaatcaaacttctctgctctgcttagctctcagctagctgaaatctctctcaatccgtgtagcttagcttccctaatccaaccatggcaaagttcggtgaaggtgacaagagatggatcgtagaagacagacctgacggcaccaacgtccataactggcactggtccgaaaccaattgccttgaatggtctcgcaacttcttcaccaaacaattctccggcgttgatatcctctccggcgaaggtaatcttttcatcaaggtcagtaagatcgagaaagtcgaaggcgaggcttatgtgaatgtgaggaaggggaagattatccctggctacgagcttaacgtctctttatcttgggaaggtgaggctaaagattccgatgggaagacgcttttgaaagctgatggattggtcgatatgccttatatctccgatgagaatgctgatgaagatccggagattaggttttcggtgaaggatgagggaccgattgggaggactttgaaggaagcgatggtgaagaaggggaaggagattattctggagaaggttagggtttatgtggaggctatggcgagaggaggcccgtgtagggatgaattggaatcgaagaaggttgcgccgaaatcggtagcggctggatcagctacggtggcggtggagaagtctggtgctgccccggtggtgtctgctgctgcggtggagagtaaggtagttaaggagaagaagaaggcgaagactaaggaagggtttaagacaattactatgaccgagaagtttaattgcagagctagggatttgtatgagattttaatggatgagaatcgttggaaaggttttacgcagagtaatgctaagattagtaaagatgtgaatggtccgattagtgtctttgatgggtatgtggctgggatgtattttccccttgaaaccaacacacactttgttcagaagtggagat

SEQ ID NO: 27341 - DNA, 1487 bp, Arabidopsis thaliana landsberg
ttccacaccactattaccaaatcatctaatctctcatctgcctacttttggcaattaacaccaccaataaaaaaaggaatttaaaaataataatcatgaaaagaaagggaccaaacaagcaaaatccaaaatgaaaatgccaaaaaatccacaaacacacacagaaagatactgacagaataacaagaaaagaagagactctctgtttttctcacttttttataagttttgttaatttataagctttttatataaaacaaaattactgtgaggtaaaaagaatagtacattttttttgtttatgttttcatgatttcagtttgaatcctttttattttctgctttcggacaaatgtttcaagaaaacactttaatatacaaaaatgtgattagattgaagagatgggtcacatagatgataaaagaaaaaacataagaacaaggacatctctctcttattttaatattttgctttttagaaaaagttaccgagaaaaaaaaaagttttttttgatgggcagatcacgttcatggcctgtctcctatcttgttggctttttcaggcttcaattattttacccctttttgagtttttgattaaaggataacataatacttctctttactacacaaaaatgtaagcgtagacgaattcgtttacacaaattttgtaagcgtagattatgttttgcccacttgggatggctaaatagatattgcaatctctttccatgaccagaaaaggcccagctcaatgaaaatatccagagctatcactaaaaacgggccctgattaatagaaaaatggtccaaatttttgaatagccaagtctaaaaatggacatgtctatgactgtcgatatccacttcagcaaattgcttgcatcgtgtgtaaaaggcttaaatgcttgtgattccatatcgttatttcctagcagaatttttggagttgctagacaaaagttgattaaatacgttttcttctgatctaagtcaagaagaagatgagaatcaaaagagaaaataccaagtaagaaaaaagaagatacttgttctttatttatgaatagtaaaatacattagaagtgaaacataatctaaacacaagtctcaaactcaagaaacgctaaagagtattatgaaagtaaatgataagattgtaaaggcttatgcagccgcggtgatgtactggattgcctccttgcatatacctgtcattgttgcttcaggaccatacaccttgaaatcaaacagacatagttagaaactgattaagcgggaatgtcttgagtttattcattatgggtctatatacctcgatggggacaccgatttcatctccaagtgatctcattttagcaagttccttttggtagattgttttttgtgacaacacaaatatagaaatccctggggggtggtagatttgatgctgccaaaagttaaagcacatattatttgtacttgtagttaaggcgaaattgttt

SEQ ID NO: 27342 - DNA, 1686 bp, Arabidopsis thaliana landsberg
attcattcactaacaaaatgtaaagggacggtgcggtttcacaaaatgtaaaacgtcaccggttgagaattatcattcatattggtacgaatcacttattagcaataagtgttatttagttaaggtgaattgtgtagcatagactaagtatatgtgtttcgttgtttggccatttgaactaatcttaagaatgttcaaatcgatcttaaaaccaatctttagttgttttatccaaacggtaatttacttgttttgtcttaggttttttagctttcatagagaaatttacaagctagaacaaaattaatctagtatgatacgtattaaggtacctatggtcatggtgtgaggcgcattgacattgtgtggtttcattgtatgagtcaataatgtcttgttgttgccgtgtgagtgtggaacaacttaaggttttcaaataccataaagggcttggaattgtcaagtgggaggtagaacatcattcaatctttaaaaacctatttgaacaaatattattttctgtttaagtacacaatcctatcatgatccacccttttctaaaattctgatttgggaaagtcacatactcatccaaattggctaaagcgaaaactaaaaggagaaaagtctctttatagtggctttatctaaacaactcctttaacttcatctttgttgtgtgcaaccaagaaaaggtaatggtgtctttcattcataaccaatatatgtgcttttccttttctttttcttttccacaagaaaatgtttgattaataattagaagatttttatatctttcctatcatgcagcatgcatgttgttaaacccccatgcttaaacttcaatgggatatgatcatgacaccacgttaatttttaagttaaaaaaaaaaaaactaacaagataaagcgtaaaagttttaagtctctagtttggtttaaatcactaattgcaacaacaaaacatttttacaatggaatacttctaatgttgaatgatttgagttaagacgaccaaagattaagaagataaaccagagagagtcgatagagatagaaaggtaagttcatgtgctgaaccaagattattggagaagctcatcatatactcttttctttttgttaaaccgtgttacatcattagctagactccaattttttttaagttttatgatcattgtgatttgtaaagaaatttgttatagacattgaacttgtaatctcttatttaatttgcaaaaaacaatatttaaccaactgatcaacaacggtcatttaatcgtacaatataattcttataaaatatcatgtttatttgcgaacatataaagtcaaccccgatcagcaacaaccttctccaaaatttgtgtgaattcaattatttcttcactatatttgcaagaatgtggctatactatacttttgtgtgatattttcaattaaaatagagtttagtgatatgatccacatgacaatatcccttaaaacatgattagtcagtcgaattaatcggtcatgtggtttcactagtggtgtgaatgtgaatcaatcagtatgtcaactatgaggagattcatactttaatcatgcttgtaacttgtaagggattatcatcatacttggttttaaaaggacaatgtgcaagggatattaaaactttaaaaggctatccattgaatgggaaaa

SEQ ID NO: 27343 - DNA, 1744 bp, Arabidopsis thaliana landsberg
  unsure (1)..(1744): unsure at all n locations
gcagatcggcttcttggtggtcgagtggtgatcgagtggttctgatggggtgattcctccttcttcgcgattgagtgaaactgagctgcttgcttctccggggttgcgatagagtgatttgccctggcagggctccgaggctgcgatagagtacttttgctgaaggcgtcattgggcattccgacttcatgttctgtttttcctctgtttgaactccaaaagcatccaaagtacatgaaaacaaccaaatatgccatgcacatgcaatcctgatgcaaaatcgtcgtaagtatgtaaaacacactgaaacgactcctaatgagatgatttgtggatgaaacaatgacaaagtggtgaagaatgaatgcctaaatcatgcaaattatagacatatcaatatgcattcttaacgagttcgattgttcaccttagtagctaggccgattcttattacgcacctaaataccaagctcatcaaataatagattcaactacagatacctatggcgggcatatctattgtctagattcaagatccagttaattactctagatctagcattaggcataattaaagatgaagaattctacagataacctagcaaagggggcaatctactaaaccatatgaatccctaatgagaaaccctattcctagcaagcagattacaaacaacatatttgagggtgaaagcataaacacagtaaatagagaaggggaaagaaaggatctcttcactgtatatagatctgaatgaaactctgaaaaacaatggatgaataacttatgtctcttacaaaagggtttgcaaagaacttgataaaagaaacttaggtcttaaaacaatatatatagaccctaaaaacgtccagagactaataatgcaaatagggaagtcttatggggcaaacttgagcttctgaaaacttgaaagcgtctagggtttttgttgggccgaaactggtgtcgatcgacaccaagagtgtgtcggtcgacactcctcgctgattcctgagccaaaatcgtccttagcttcctttaccttagcttttcctctaaaatgtctccttatctccattgttgtcccattgcatagaattcttgaaaagacactaaaaagactcgagaaataacataaagacttaaaatcctatacctaaaacatannnnnnnnnnnnnnnnnnnnnnnnntatcaactcctccagacttagcttttacttgccctcaagcaaaacacaaaagccgaacccgtggaagaggttttgaaaacaaaggaactcccaacattctctagcctattgccatgatcatccaaactaaatccacatgcctaacaattctaatcaaatcctaaccaacatgtccttctctgcaagcttacacaacattctaaatttcatacctaagttccacaactatatccaccaggctttcatagctgggtctcatcaaacaagctaacattcaagatccttctagactcattcttgtactataccatgataaatcgaccattctttatatttttttctttggtgttctttttctcccccagatttattcttttaagagagtaaacataggggaactcgcatactggatcgacaccctcagcatttttccaacctttgtaattgatcattctaaataatgtataataatggggtcatagggaacattcctacccctatacactatatgaaaatcctatcaatctctcattttctttttatttttataag

SEQ ID NO: 27344 - DNA, 2641 bp, Arabidopsis thaliana landsberg
agacccaactaagaatacctaagcctaattctcttctctgtttcttatcactcttacgtgaagacaaagagaactacacactcatcttcaagcttttgcaatgctctgaagtttacaatcgtatgacagtattctagagtgctcgaagtgcctcacactaagctctagaatacttatacctactctccagaaccctaaacctaggatctccgagaatctcgttttaaggaatctttcttgttttctccaagcttattccttcctaaatcttcgagataatatcttccatatcttctcggtgattcttgtctttgacaccatgccaagtcagcttccatccttggctctccacttcatccgccttcagcttgccacgtctgctcttgaattcatgtctgcaactcaagcgtcagatgggactcgatgcagcttactgaaatccatcaacgttctgatcgtcatcagctgattgattgaactctacatcttcaatctccccctttttgactgagtttgatactcaagcatctctcaattgatatgagaaactcaagtggggaacctaacacacagccaatagacatattgtagaaacaccatctagcataattagtataacgcgattagtctaaagatgagcaatgtgttaaacaaataacaaagctcctccacaaattaatctcccccagcatcctcaaaatccaaaggaaccttatctccccgcttgagtagataacttagtcaaaaatcatgtaagcaaccagacatattcaaccagaacacttacctgtatcgagagcagtctgcagaatttcgatggcaattttcattgccctgcggttggctgattccttgcgacgtactactgcactctgcttcaccttcttctgcttggtcgacgttgcggaggcatgagggttgacgggaatctgaaccgggcgttgcgtctggataacctgatagatcaggttggggaacggtaggaagagtttggtgtctggtttcagagccagctgaagaatgtgatcaaaagccatccttccaaagtcaaatgacattttgtgcatgatcatgtatacaagcttgactcggtcaggctgcgcatatctatcattcgatgttggagaccaattggagcagcagagttgtgaaggcactcacctgaatcttgctcagagaactgaatttcccaccagtcagaaaagcagccactcgatcatcaaacagtccagccatatccattcgctgttgtctcgcattgatagaaggaagaccatacagagtgttgatcttctcaggtgagacctcgtactcccaattccgcacaaggacactgaccttatacgtgtcgaccttcaccgttggcagatttgcccagaactcaaacaccagttcctccgtgaacggtttgaaaccaataaccgttcgaatcagccccgccttctcaataaactccctagccgcctcatctatcttcctagacagttctacttccccaatgaaattgcggtgagagaattgggcataccttttttcagcctccgcagagacgaatcggattccaacgaaggaagatgaagcggcgatccccttgcccttgtcctacttcatccgctttccactctgaccagtagcggattgcttctgattacgcaatcgagatgccacagatggctgagaaggagcagcctctggaccctttggtttaggcttctgaacccgatccgctgacgatggagtctcgtcctcaatttcgattattggcggtgtgggtctctgacaggtaccataccccaatcgggatccggcacagtgagctcttcatcggacatcacctcttgaactttcggttcactcctctatggaatttcttgcatcgagtcaccgggcggtgagactgacagatctgaagatgattcggactccgattgttgttgaacaagacgatgaacagccgagaaaatcgatttcctgctctctctctcactcgaattctgaaggattcgccttgagtgcagtgggttgccttctcgacttccaaagatagttgatttgactcctcaaaccctaactcctctttttccctccaatactcgaacaaacatccttgaattcacataggcttttgaaactcgaaatgggcttggacctaaactgttttaatattctgaaacacttaacaaacacataagtgcttctttgccaagagaattctcaatcaaacacgtgattaaatttcaaacacattcagagcaacatgaacattttatatcctgaactagtttagtgacccaaacagctaattgacacatgcgggtaaaagctttccaacactgatttcaaagattacctcttcctagtactcgaagatgtgctttgtgccaatcaagtgtttatgacttccgcatgaaactgtcacaaccaatcagatcgttgatgaatcagttcattattcagtgcctagtctttcacactgtcatgcctttagctctcatgaatctgatcaacgtgtaataggcagctgaaatgtcctttgaagatagtttgactaaacaggggcgcgatgatatcagttgaattgctccaatatttgttatatcagcaatatcacttgacttctcaattgcttgatactcgcgcc

SEQ ID NO: 27345 - DNA, 1102 bp, Arabidopsis thaliana landsberg
agtgttcttctgaataattgaagggtagcttaagagattatatatcagattaagatttcaataatttatattctaaaaaaattcttattttatgactatatagaacaaatgtggttgcagaaatgatacgtttgatttaagttataagaaattgattgaaagagtctaatgtcaataatgtaggccacactacaccattagtcaagcccatggacttttgtattgatatgagacgtcaggtatacgtttcctaaaccgatgctagaaaaatttccaattctagtaagtttcgaccaaacacgtactccaataaaccactataaatcatcacacctctcttagatctttttcataagcaaaagagagtaatcgacttgagagagagagagagagaaaaaaaaaatggttttgagtgttcatcatcttctactacacactatcggtactcttcttcttatattctcaatttcaacattttccattgttgggtcagcttctttttctttaaatacggacagacaagctttgatctcgtttaggtcccaaattagccaaagcccacaaacactttctttctcttgggacccaaacatatctccttgtaattggactggtgtgtcttgcaacacacggaacagaagagtgacttccattaacctctctggtcatggtctcaccggttccataagcccaagtataagtaatctctcttttctcacatctcttcaacttcaaaacaaccaacttcgaggtcgaattccaatagagatcacaagtctttttcgcctaaaggttcttaatttaagttccaataacttagaaggaaccttaccttccagcttaagcaagttagtcaatctccaaatccttgacctaacctcaaacacgatcactggtcccgttccaaaccaacttggtgatctcaagaacctcaatgtcttaaacttgggcaaaaatcttttctatggaccaattccaccatccctttcaaacatttcatcactcaccgttttaagcctaggcacaaactctctaagtggtccaattccttacgaattgggtcgtcttaaaggctaaaagtccttgatctcactataaataa

SEQ ID NO: 27346 - DNA, 1403 bp, Arabidopsis thaliana landsberg
caccaccaccaccaaattcaaaaacttagtgctttccaaaagtctttatcatttggtatcctattgtgttcaaaagggggagaaagtagtatttcaaaaatggtatatcaaaaccctcttgaacactaagaggtggatctcttttagggggagttttgtttagtcaaaggaaaagcatttgaaacagggggaggaaatttcaaatcttgaaaatgcttttgcaaactcttatttatttacctttgactatttgcaaaagatctatgaaatggatttacaaaaaggttttgcaaaaacaaaacaagtggtgcaaacgtggtccaaaatgttaaataagaaagaaacattccatgcatatcttgtaagtagttatattggctcaattccaagcaacctttgcacttacattatgcaaactagttcatttatgcatttctatacttgctttggtttgtgttggcatcaatcaccaaaaagggggagattgaaagggaattaggcttacacctattttcctaattgattttggtggttgaattgcccaacacaaataattggactaactggtttgctctagtgtataagttatacaggtttaaaaggttcacacttagccaataaaaataccaaatattgggttcaacaaaagagcaaagggccaaccgaaggctcctttggtctggtgcaccggactgtccggtgtacaccggacagtgtccgtgcaccagaggactcaaactcaaactcgtcaccttcgggaaaatccagaggcactccgctataattcaccggactgtccggtgtacaccgacagtgtccgtgctccaacggctccaaatcttcaacggatccggcgccaaattaggaaagcaatctgcaccggacagtgaaaagtgtctgtccgggcaccacccgacagaaggcaaggattgccttcctggattgctctcaacggctcctagttgccttggggctatacaagggacccctaggcgcatgaaggagaacaccaagcatactttgagaactcttgatcattcatactccatctttgcgcactcgattgacattcttagtgatttgagctctgttctactggtgaactttgtgctattcatttgagctcaagccttggctgtgtgtgtgcgtattgctgtggatttgtgtgtgttgcttccctcccttactctagtgctttcactttgatccttattgtaagggcgagagactccaagttgtggagattcctcgtaaacgggaaagagtcaaaaaaggaacaccgtggtattcaagttgatcattggattacttgagaggagttgagtgcaactctcgtccattgggacgccacaacgtggaataggcaagtgctatacttggccgaaccactggataaatcatcg

SEQ ID NO: 27347 - DNA, 2804 bp, Arabidopsis thaliana landsberg
aatagaaacttcgagcagagacaaatccgaaacagaaattgaagatcgcgagaacattacaaagagggagagaaaatgtcaaaacctcgagggcggtggagttaggatcggcggaggtatcatcaccgccggagcaagagatgagacggagacaagaagaagctggagatcttcccatgactggttcttacaagaagaagaagaagaagaagaagaccgttttatcttcttattggatcagtaaaataaacacaaagagagagaccagtagtactaactagtgtcgttggaaaatggagcaaaaggggaaagcggaactcaaagggaaggcattaaaatacggttaagtctgagatttggagtccgccagtctcctttctcttctgtccaaattaaaagcgaaataacgctgtcactgtcagatctctctcgtgatgactcacattttcttattcattccttcctttttttactaaccgatgagtattaattactatatagctaaagtaacaaattcagatagatgtatatgctttcgaattcatatacatcggttaaaaaagttcatgtaacaacaacaagtaaaacttatgatgatgaaacatcaacgattctataaactacatgttatcgaccgtattaacacttgtattttctgattatactaaaataacggttggattggttgaaataatgaattatgaattagtggggaattattcaattatggctagtcgataatgttggctcacctataaaaataataagacgcatgtgactgtcatgtgcttcatgtcttttttttcttttctctctgatcgctttgaggtttattagcttttttctttatatggggggtttattaactttatttattaaattgtctcaagcacaaacccatttcgctaaagacgtaaatatgtttgataaatctattttgttgcagtgtaagcaatagtgacaatgatatgtgttgtaagtaaaaagtatcaagactaacgaaaaaaatggttgtttctttaagcttttctttccattactcatcttcgtcgtattcatcctgaatttggcaggtaaactacttcatgtctttacaggttacaaaatttccatattttagaaaactagagctttttatattcgatttgaagaagaaaaatggatattggaacagatgggctttgtaggcccatagtgggccagcccaagatagaaaaaagaaaagccgtggattcgaaagaggaaatggaaggtgtagggtatctctctgttaccaaactgatcaaagtcataaccactactcatcgtaatattgacaatgcctattcttttgtacaatttgtgccacgtgtcctatccatagtactgccaggtaggcgacatgtgtaattgttttgttttgtagcattacgacaaaagttacaaaggaaaagctgtggacctctctgcgaaattgatagtgaatgattttattctaacgttgtgattgagtcatatatagccactgcctcatatgctcttagaatatacatatttttgcaatttgttaatgcaaatactaaatacagacgatgacgcaaacaaacgaagccgtagtcggcaactaaaagccaaaggtggaaaatgttagaaagtttgagcgataaactcagagattgcgtgtgaagatgaaacaaacctttcacgaccttaaccaaatatgattattcttaagaccaaacataaagtatggttatattaatattataaatcagaagaagcatcactaattgcttccatcttaagtcaaatttatcaatcgtgcaaactcatttactggtttcatcgcactcaccgacagaaattgcaacttcaccacatcaaaaaatttcaaaactgaatataaatcattattaattcagtaagtaactaactataggagaggattatgaatcttatgcataaacataataattacaaaaatacacatgcttcagacaaaaaagcaacataacacatgcttcatgtcatcacaaatcagtcaaggacaaaccaccttctttcttttcctgaaaaattttctgaattctgaatatcgaaaatgttatcactagaaataaatcagtcgatgtggtttacattaaaatacagaggccgatagtaattctccagggaattatgcttaaaacaaatgttcaatagaaaagaaaaaaagaagtgatttttagcctctcattgtgtgaaggaagaaacaaaaactgttaaaaagaaaccacatcgaggtttagagtcagagtagttctaagacttacgtggccttcctcttcttccaccggtcttcacgggtggagcctttccgttactggtgcggccgccacgtccacgtgctccacgaccacgtcctctaccacgagcactctgtttcttgccattggcctcttctccatcttcactgtagtcactgtctgcgtcactaccttgaacttccttctccttgtcgctgttatcttcatcactgtcttgttcagaatcagaggaagcttttgatgctttcctctttttagaagcacctcttttggtaactgcttgttgctttggtgccaaagtttcttccttgacttcttctacactctctgcttaaaacaatcaaatacatcaagaaatgtttaaactctgtagtgattattattattacgaatatactgtaccttctaatgatcctttcccgtcatagacctcgagctgcagacccagtaaacagtgtaaggaaacagatgaggagataccaaaccttgaagaaatagatctcttcagctttctattga

SEQ ID NO: 27348 - DNA, 950 bp, Arabidopsis thaliana landsberg
atcggtgatcaaatatccgccatggacagagcacaattgatcttgttaggtctacctctattcttattttgttcggatctcttcaacctcttcactcctccgcctcctaaacctcagcctcaccgtcctcatcagccaccgcatattcctcaccagcatcgtcctaatgcgatcatccccgaaaccctagactttccttcacaggttaaatttcttttatactttcgtgtatttcacttctattggttacggttttgatctctaagctcccattattttgcagaagacaagtggcttaggaggagcaattggatatggaaatacagtagagatcaacttctgcgtctcctgttcttacaagtaattcaatttttcttacttagattttaagaaattcgattttgattttaatgtttttacttagaatcggatttatagttattctagtgtagtcagagaatcttaagcagcttgtaagtgaggttttcgtggtgagaaagaaaacttagataatgtggaaactacataagaactatctgattcatgcttgaggtcattgcttccttgtagtcagatacatgaacatcctaattaacattgtcataagtttcagtgtcttcaataagcaaatcactgcaattagacagtttgagattttatttcataaaaacatcatctctgtgactgttgtttgcactgattatatctcaaggcttattcctgctgcaatgtctatacatgtatatgattttcagttcccattgactattgatttttataggattcattatagctgcaaggtgaataggattttagagatgtgtggtcgatcaactttgttgattggggatgattcttagatgctagaaaacctgaaaggcctgactttgggtcttatatatgattatgaatgctaaatgacatgacttctttggatactgttttgaact

SEQ ID NO: 27349 - DNA, 1503 bp, Arabidopsis thaliana landsberg
atttaaaaactcatagattacactaaatgataaggtctagccacttgataacactaactcttccaaatttcaagcaaaccaagcatttttcattcagaggtttctcatatttgtgcatcaaacaatgaaataactaacacaatcagtaacaatcataatctcacctgaccaaaatcagcaagcttaagaactccatcatcagaaatcaacatattcccaggcttcaaatctctatgtacaatcaaattccgatgacaagcatcaacaccggttaaaatctgaatcatccatctcttaatctccccaaccgagaatccatcccctccttctaccttcttcttcctcttaccatctcggatcaccgcagcgagatccgacctaagaaactcaagcacaagcacagcgttctcttcctcacgccagaagtattcgtgcataacaactacattaggagatccattgaggatggtgagcgcgtcaatctcccggaacgcagattggtaatcgaaaatctccttgagcgcgacgattagaccgtcggagagacggcgagctctgtaaacgtcggcgtaagctccggatccgactcgctcgaagatctcgtacttggcgattatctccggccgggtatggatactccaactggtcgccggttgtttatccatctcctttaaaacggcgtcgcttttcttcggatctttcctgatgatggatgattattcacataaacgctaacgaattcaccagtttaaaaatccagttcccatgttgtaatgactaaaatgccctcacaagttttggagcggacaagaaaccaaaccgcaggggagcaacttattctctacataaatgcggtccgcaatgattccagagcggatttgttctatttttctcaatatgcattattgctgagtatagtttatgaatggtaaacaaaagttggtctaaagcgcatacggatttgtccgccctaacagccgcaaccattccagtcctaacactttttggtttcactttggtttaatctgattttattgcatgatcaaaattcaaaaataacacaatataagaattccaaatttgctaaaagatccaaaacttgttaacaagacaagaatgttacagaatctgcaaatctatccacaaccataaacagagaaagaagcttcttcacatacaaataagagaaccaacagtttccttatcttcacagttggagagtttcatcctacgaactagaaaacaaccacagaaagagagtcacgaatacattgttgttgaaacttttgttgtgtcttaagcagcggtgcaacctccacagacaatactcctgcagagttttgagaggtgaaattggtaagagtcttgtttgtaaaatctcttcacatagtacaaaatgaagatcagtacaatctttaaaacgcttacgcaatgggtattccggatcttctatgattcatcctcctcctcgggacctctttcctccgggaggctaagaccacc

SEQ ID NO: 27350 - DNA, 1885 bp, Arabidopsis thaliana landsberg
actaatgatgggttatattttaatgttggagtagattaatataaggtagaggaatcgttagtgaaaatgatcctcaaacgacaactccaatagataagatcatgtgttcttgtatcaataattatgttttgtcgatagtgagttatttacttgattaaatatataatatataatataataattaatcttatctttataacatttttaataatatttattatattctaaattatatatagatcgttaacggtttctaatttcgaacatattccctttattgaagtaaccgttagtgaaaacgatcctcacacgataattctaatagataagttcatgtgtttttgtatcaataattatgttttgtcgatagtgagtcatttaatttattaaatataacacttgatattatctctgctccgctctctgaaaatataaatacttatttttaaaattatatataaatcgctgatagtttctaattttgaacatattctctgtattgaagtaactaaataggttagttttttatgggaacaaaaacatgctaccaaatatcgacattgataatatctaaatggtgaagtattaatataattaaataaaaacccgatagttagaatgatcctcaaacaataatcctattggtagatccatatatgtttatgtattagttatcatgtttggtattactgatgtgagttattaactttatttgtaaaatatatgatatttaaaattaattatattaatcactaacagtttataactttgagcattttcccttcattgatctcattaaattagatcaacctttctgtaaacaaacacattactattgatcattgattcatgagtaatatctagatgccggagttgattaatagtataatgaattagagattgttagtgagaatgatcccgaaacaacaattccaattgataaatgcatacacgtgggcctggagcattcttctggcccaattaaagcccactaaagatttagccttctctatctcatcgaaggccaattcattttttttccgatcaccggtcactgcttcgggtgtctcgacttcaactttccgatggatctcatctgcaattcgtatgccaatgactccgacgacgaacctgagccagtgaccaatgagcgattaacatctaaaatcgccgcagcaccgtcaattccttctaagcgtccatatccagtcccggaggagcgacaatacataccaccgcgtagaccgtatacttcatacggttcctattcggaatctcaaaccagctcgtcgttttcaataccggttccggttccggttccggttccaggccggtacgtatccaagagagagagatcacttctagcctccctttcaacgattccgactccagatcaaagttccgatttgagtcagaaaccttatagctctcctactggtaattgcgaaccatgcttaatcaattcgctgtttagaatttagtgtttgatgcttgttaatctgcttcactagctttgtggttgtactgttgccttatgctaatttgttattaatctcagttcttgggagcatctcagattctgatgtacctcgccatgttctatcttcggttagacatagaccaaaaggatcctcgttgcaaaccgaaatgcctagtagaatgtcgatttcgttaaccggccatacaaaggctgttactgctattgattggtctacaagtcatggtatgttcttgctcttttgttgtagcttttgggtgaagattggcttgaagttatcctctgcctcattcatttgtttattagagttattgtgcagttcatcttcttgcttctgcggggcttgatggtgctgtttacgtgtggaatgtgtggagtaatgataag

SEQ ID NO: 27351 - DNA, 1111 bp, Arabidopsis thaliana landsberg
  unsure (1)..(1111): unsure at all n locations
catcctagaaatcaaataagaaacaagctagtataagaacaccattcggcaaagcacattcgacatgagcacaagaagtcgcatacctctccgcgtgtaagtttattagtttccttgactggaaactgcctgcagactagtccattttgtagtttacatttcaaaatttcttcagatcgtttggaacgacttagctcctctacttcctcttcctcttctccttcttcatcatctcctcccggattgctggtttcaccactatcatgggaatatgtatcatcatcatatggatttggtgaatgtcttgatctctcagagccaccaaaacacccgaagcaactcatcgcttgggcaaatgcaaaactatcacaaaacattatctactccaaaatttatgaatttctcaagtagaccacaagctaacaataacgaaacctacaagaaacattgaaccaataatcaaaatccaaactcaagagtaccaaatctacttccctaaagatcaaaacgaaaccaaatcattactctgcaaaaagaggggcttcaaagcccggtaagcttcgttattccaaaggatgccattcagcaagatgaataaaacaacttgagatatcaaaaccactacaactgaatcgcaacatgtcgaaactcccctttatactataagataagatagctttaacatccaacaatanagtcaaagataaactccaagcttctgcaaaacagggtaatgtaacaaaagtcagcaaacaagaatcgatacacattaaagatcaaatctttcgaagaaagggataaacttcacataatccatatgatcaatccacatagaaatcaacatttgtatccaaaaccctcacaaaaatcgtaaatttgaactgatgaagaacatcaaaagacgaagactttaagaaacccaataacggcaattttgagtaagcccccatggagcacccacgccatcgactctagacgtaaaaaagtcccctaattgcaatacccatggcgcatgagaagaaatgagtaccgcgattcaccttctgctagatatctcacaagacctcatatgaataaggatgaaaatcccccatacaaccttgattttgat

SEQ ID NO: 27352 - DNA, 1425 bp, Arabidopsis thaliana landsberg
  unsure (1)..(1425): unsure at all n locations
acgatatttttaaggcttgtcttgtgatgtttctggggttgagaaactcagttatctgctaaaattctatcttgtcgagctggggacatgatgaagcttgtcaaaactatatcccaaattctatatcttgctgagctggggcagcattgatacaagattnnnnnnnnnnnnnnnnnnnnnntgagagtaaatgtcctttaagataaggcttgttaattgggtgcttcgagaataaaatattcaattatctgcttaaaaatttgttgctgggctgggacagcaatataatgttcaatgatctgcatattaaaggaggaacaaaaacgtactttcaaggcttgtctaatgatgtttctgaggttgagaatctcagttatctgctaaaattctatcttgtcgggctggggacatgataattcaacattctgcttaatgatgcttttattaaggcttcttgatagtctgcaaaatactctatatcttgatgggctgtgacaccatgatgatgatcaatgttctggtggagtaaaaatgacatctagtaagacttctctaatgatgtctgagcagttcaagtgtctgctctgctatattgtgcatattgatgggataaagaattcttttaacgatgcttctcgataggaagattcaatagtctgcaataactctataatttgatgagctgggacatcatgatgatggtcaatgttctgcttgaggaaaaatgttctttattcaagtttctcttgttgatgttctagtatctgcttaaacatcatgacaaaaattcaatattctgcaaaagctccatattatgattgcttctcgacaggaaaattcaatagtctgcaaaatctcatatcgtgatggactgggacaatcatgttgacgatcaatattctgcttgaggtaaaatactattgctgagctggggcagcattgatacaatattcaatactctgcttgatgaatcagagtaaatgtcctttaagataaggcttgttaattggatgtttggagcatgaaatatatctgcatattaaaggaggaacaatgtcctttcataaggcttctctatggttgcttgactgaggcagcaaaaaaacatccaattaaaggaagaacaaatgccctttttataagaggctcgtttatgtgttgagactagagttgagatatgagatatttcaggtcatttgcctgcttagagagatgcattgctaggacatcatgagaagatcaatattctgcttgaggtaaaaaaatatcctctattcaagcttctctaataatggatgactgaaaagtttgcttaaacatcatgacaaaaattcatattctgcatatcgctaaagggaaaaatgtcctgcaatataatactcaattgactggactgatggaggagaacaaccttttaataagggc

SEQ ID NO: 27353 - DNA, 1571 bp, Arabidopsis thaliana landsberg
attacttttgtatcgtacgaaaacgcatgaacttattgagggaccacgctatcgaggacgataaggtcggtcaataatgtgaatcataagaacaaaagcattagttagtacacttattcttgtcggtatttaccttgaaaatttatataacatccaaaaaaaatggtaagaaaatacttatctcacgtaaacatcttttgttcattgatgaaacattttccaataaaggagttacgtattagaacgtgttctgtttaagagataaagagatgtgcgtagaaaaggaagagatacgcaagtggtcaatatagattattgacaatgagattgtccaataattgagtgtttgagtttcttgatgatttagctagctagttgggttttagatttggtcagtatcacagtgacgttacgtatataataatagttacttttctagtgtctgtttcattcacaattatagaattatgatcgcatccaacttgttaatttctcttgcacttttttgtctttttcgtatttagttaaacgttgaacttaaactgttacaaatgctcatattactatattagggttacaacagaaataaatgatattaggttctacgtcactgtcactttcacctaatcaaggtaacatcacttttcaatcatatgaagtcaaacctaattaagactattgtaaactttattaattgtttgtatttgttcgcataacttcaatctatatatcccacactactgtttgctttcttcaatattaattaacaatcattcagtttcaagttatatattatagaatatctaataatgaagaatcggtttcaaaattaataatgactgattataattacattgacaacatgcagggactaataacaattacactcacagcatcgtttcctcaactccacccagcatcatgcaacagccaggacccactcagttgcggcggtccgaataagctccagatcggagttttgctattgggactctgtttcctctccgtagggagtggaggaatacgaccttgtagcatcccttttggggttgatcagtttgaccaacgaactgaggaaggggttaaaggagtggccagtttcttcaactggtattacatgactttcactgtggttctgatcattacacagaccgtagttgtgtatatccaggatcaagtcagttggattatcggttttagtatccctaccggactcatggctcttgcggttgttatgttttttgccggaatgaagcgttatgtctacgttaaaccagaaggaagtatattctctgggatcgctcaagttatcgtggcagctcgtaagaagcgaaagctgaaacttccggcggaagatgacggcactgtcacctattacgacccagccatcaagtctagcgtgttatccaagttacaccgcagtaaccaattcaggtacttaatatatgatttttgtttttattttttgcttatcactttcaaggtggttttaagacaacactgattacatgattttgtattaacctatagtctaactgaaatggcataaaattaggtgtcttgaaaaggcc

SEQ ID NO: 27354 - DNA, 698 bp, Arabidopsis thaliana landsberg
  unsure (1)..(698): unsure at all n locations
taagggaaaatttcagggattttaccgcaaattgcccaggaatcctagtatattgtcgtcttctttcatttccaaaaaagtcttagaaaatgaaagttgaccatccaggggtctctctatatatatccaaccttagatcctttaccagatcaaacccaagttatatgagcctatagctatggggacacaaacaaacaaagggcttttctatgatgaatttctgnnnnnnnnnnnnnnnnnnnnnnnnnnnnnnnnnnnnnnnnnncgggacagtgagaaggatgcagctatctctgctcataagcgtattctggttgcgacttcttcttcttcttcttcttctactttttaagcttgttaccattatctgatttagttagaatgatttccttgtaacatgtatagtctgcaagatcagaagtgtttgaggagatgtttgaatcagataaatacaaagcttcgtccaagctggagacaatcactctctcagagatgaaacacgaagagttggaggctttcgttgacttcacctacagcgacggctctatgctttcagagaaagctaagcaacacgctatgtcactctatagcgcagccaaagattatgaaattccgcgaatatggtgcttatgcagaaaggagcttatggcatctcttaacatgtcgaatgctcttcgagttcttcagctcgtttagag

SEQ ID NO: 27355 - DNA, 1444 bp, Arabidopsis thaliana landsberg
  unsure (1)..(1444): unsure at all n locations
aagaccgtgtataacacgcgcctgaaattggaagtggtgtttagaattttagctattactgttaacaatggagtgattaagggtttgccaaagttttttctttttttctacaaccgaccgagtcggagatcgaagttttgaacctaagaatctccgtgtcttcttcttctgcagagcctccaaagtctaaatcttttggttacgtctctcaaaccccaacctttatactcactctctttctttttctctcttacctccattggcttcttcttgagatctcgtcaggctctgatcccaatctatgttcgatctcactctcaccgagatctcatcttcctccattttttcaaagatccatatatgagctctaaaaccannnnnnnnnnnnnnnnnnnnnnnnnnnnnnnnnaatcggagccagattctaacaaatcaaagaaaggaagaagaagtgaagaacaatgggagctgaaaagaaatggcttttcacactcttctctgtagtattcctctcagtgttccttctcttactttattctatctctgctttcacctctaaaccattcccttcttcaattcgtcacggtgctcattacccacctgcttttgcttattacataaccggtggtcgtggagataatgaccggatctttcggttattgcttgcggtttatcatcctaggaatcggtatcttatccatctgggtgctgaagctactgatgcagagaggctagctcttctctctgatttgaaatctgttcctgctgtgaatgcttttgggaatgttgatgttttagggaaagttgatcgtttgtctgagaatggtgcttctaagattgcttctactcttcacgctgtttctattcttcttaagcttgatcctacttggaattggtttattgagcttagtgctttggattatcctctcataactcaagatggtatgttttaattttgatttctttctattttaatcttaaactagagaagaaactagctttttagtttgcttgtgattttgattcattttcactctagatctttgtttttgacctgtctttgagctttttaatgttctagtttctgctcttagcttcttgagattgcagtgtttatgatatactctagaatatatatactctttttctggaaataaagtggaaatgtaatcactttcactgatctctttatggcaaataatctgatttagaactttattactccactggttgtttgtttgtcttcttatgacctggattctaatgaattttctttgctcatgatttctctcagacctatctcatgtgtttgcctcggtgaacagaagtctcaattttattgatcacactagtgcccttgcttggaaagagtaagtaaacaacatttgccagtctcttgaactgtttcttgtacatttggtggggcattatgatgataatggat

SEQ ID NO: 27356 - DNA, 1749 bp, Arabidopsis thaliana landsberg
cttgatcaacgtcaaagcaaactcaagcggtgtctctattagatctcgatctgtcgctattgctgcggaatgataaacacatgtccgtagtaaccaggctctagcggtgggtttctaagcttggaacgcgagttgatgatgcaagttagacgcatctcagtgttggggtcaggattcaacgcaatagtccgacaacgccacaaaaatgacgacaaagcttcaaatgaggtattgtgtagatcaggcggaaggagtttccttatagcggagatctcttctgctctgaaaaagaaagaccggctaaccaaagggtgtccagtggcgaccacatcgattcccacctgatcatcgtactcacggtgtgtgtgggtcacacgcgcctccgaagcactcacagtcaacaagtgtcggttccatacgggtggaaccgagggtgcgtgaagcccacacgccaactcgcatagtgatttcagaaagagcgacaggccggctccatcggtcatggtatggttgaagcggagtgcgaagataaatccacagcatttcaatcgcgtgacctacacgtaactccttttacatcaaactaaactctgtttcattcttctctaaaacaaaaaaaaacaaaacaaaaaaaaaacgaaaagctatggactgacctggacgagaagcagaggagtgttaagcacatcactagagccttccacatcaaagagaagctcttctaggaaagggaatggaggaagaagagcatcagcctcttccagctcagcaagcgccacgtcagcttcagcttcgatgaacaaaacgccttcactggtgcagtccaccgcgagtttctggtttgaaagttcccggagcctaccagcgaacggatagtagtaaaccagcgcatcggcgagggctttctttatcacctggaccggatcaagatcacttgaaaggttaggtctatagaaaaatataactggaatttgaaaccttagtccttgttggtcgtctatgtcggagagaggcttgagctctcgtggcgttggtttagccggagtgactagctccggctgctggcgatgcaccttgaaagagagaccagtggtggtagattgtggcagagacacttgatggtccatactttgatactttgaagatagaatcacattcacacgtacgagatttttcttcaccacacatacatatatatatatacgtagttatacatattattgcacattttacgtgtgttagttccgtattatactattatgagatattatgagggtgtctcgactctcgaatgtattaaccttaaacaatagatatagataaacacatcaatactgcatgtagacacgaatattctttttttttctcaccaatcaaaataaaaggtgcaaaggaacgctttggcttaacttgtttttaaagatgtgtattcagttttttttttcagttgggaagaatgatattgtgtgattggctgtaatcatcgtaaaggacaataaacaagataatgctttttttgtgtgtgtgaaattccaatcataattgaaacagagcttttgagttttattaacactagagaaaaataaacgacatataattcttgaagctgtttggccccatcacatgatacagcaatttggcgaggactccagcatctctggagatctgtagataaaataaacatgaaacattggttcattttcaggtaagggagatccaaacccaattgagaaaatgagatacagagga

SEQ ID NO: 27357 - DNA, 927 bp, Arabidopsis thaliana landsberg
ctctgcgtttctcgacgattaaccaccagttatgggcgtctccttaaggaagtggaccgcaatgtccctttggtaatcctcagggcagcgggtagacttgaagttcctcttgagtctactcctccattcatcggccacaatcgggtccgtactgcccatgaagtgtctcgtgcccagccttgagacatgttcgagaagactcagatagtctccccttttccgcccatgattcggttgcggattcacttccacaacttccgaatcatcgtccttttggtaatccactctttggaccaccggatctgctacaacggccttggttaatatagctagttgcgccatcattcctttcatcaaatcccactgttcttgggccattggagtattgttcccgttatccgtgctgtcccttgcaccgctactctccggtgcttcctcatttatggacttcttctcggcctcaggtccggccgagtctgtcccatcgagcatcgtcccgactctggttttctcgttgatcatcgtttcctcctcaaccgaagtctcctcgagaatgcccttgtccttcttactctttcccattttgctgctcttacccatctgcgaaacctccaaagttaatccacataactcctagtaaaatcgcaaaagagtaaagaacaactaccgcgagattctcaagccgacgagtggtgataccccttaacccaacacctagtcctagaaccaagcatgctctgataccaacttgaaaggctccgatccggactgcctaagtcaggacgagttctctcgacccaagccactaagtgactcagccctaaccgtttatgaggttctttcctactctaatccgttccatatgattccgtgattcaatatatgagacgaatagagtaaacaaacaattggatactttattgatta

SEQ ID NO: 27358 - DNA, 1231 bp, Arabidopsis thaliana landsberg
ttggaaaggatggctttgaacaagtgtgtaatgacacgtttgatgaacaacctgatgtttaggttatatgtgcgtggggacatggaagagaaagtgagagagatatggagtgagatggagagaagtggattaggaccagatcagagaacatatactattaggattcatggtctgcacacaaaggggaaaattggagaagcattgagttactttcaagagatgatgtcaaaaggaatggtaccagagccaagaactgagatgttactgaaccagaacaagaccaagccaagagttgaagacaaaatgcttagatcgaacttaacaagcgaagagtttgaaagcgactaaatgtacattataaagaaacagattttgattttgatagatctagtaacaaaaacaaatttccgctatccccatgttcttatgcagccatgggcacagattctgatggtgctgcatcacatgcttttgggacgtaccaaccatggtgaatttcaacggcttttttcctcctagccaatcgagacttcctacgggcaccagtgttcttgtgtagtgctttaaccttcactgctttgtcaattgcagaataagcctctcctatcagtttctccaccgtcacaatctcatcagcatgcgcatcagttttcttcttgagcccctcaagtgcttccaagacctgtttactcaaatgaattttactctcatcttgcatgtatgtaaaaaagttacttacaacatttataagtcttagttgtcgaggataatgagatgttctaaactatcaagacttttaaagttctcccaagttctaataacaacatgaaaccgtctcaacagcttccacttgagttccatttttcgataaatcggttgcaaacaatgataactaatccacctacttggattccaatgttcagtgttgttcataggttgctacaagaattcacaaggagaaacattccctgatatatttccacctaacttatcactaagacttcagaggaacagcattacaagcttatcaacaatcttgtatcctatcttcaaacagaagctcaaattttcaaaagcactccaacatattttcacagaaagtatgaagtttacaacattaccttcttcatccgggtacgggcttcagatttcttagatttgctgtaaacacgcctcttctcagcttggcgagctctctttgcagctgaatcagctttcttggtaggagcag

SEQ ID NO: 27359 - DNA, 2009 bp, Arabidopsis thaliana landsberg
  unsure (1)..(2009): unsure at all n locations
tgcctcgccgacgggggagaggaaagtccgtgcagcggtgcgggccggcggtgcaccctcctgctgaggcagtcgcgggcgtcgctgtatattcctgccatcctcgcgtcctcgaacaaggggtggcagcgcgngtggttttacctccggaatgacggcgagttgctcccgccgttctcccagcgagtagtcaccactgccaccgaagcttggcgccatgggaccccgcacgaaagacagaagaacctcgaaccccttctccaggccttggaggcgttgcggaaggggggactcactgctgcgggagtgattgccgccatccaccgtcggagggtgcttcccttggcggacggacggctgtccgtttgggagatgaccccggaggctgactgggagggctcgcggatgtcccctgatcctcttcccttcgacgccctccaatggcgggtgtccgtcgcgttggggaagccggacccccacgccttctcccagcccttgatgcgccctgaccaagggtgcgtgactctggtgagtgtccgctccttccttcttcttgcgtcgggttgcccctggttcttacggtcgggatttccccccttctccaggaggtggggtggcacaagccttccctgccacgggtcccgcaggacgcggtggaccgagcagcgcggcgagtcgccgcgagcgagaagaagaagaagaaggacgcggagaaggcccgggcccgcgagcggaggcgtgctcgagacgccttggaaaagctccgtcgccggcaggagagggaggggctcccgagggagccgtcgccggaaacgcctgacgacgacgacgatgatgaaggtgatgacgaggaggacgacatggccgcccgccttggcctcagccccgacttggggtttggccaggagtcgtcaagccagcccccgagcgggctgacgccatcagttcccggagtcgggacgtcgaggtcccggcccgaggagcgggggcagaccgagggggtacttgacccctcggccagggaagtcgaggtgaccccggggagtcaggtcgaggcgtctgtttctcgggagccgtcgcccacgccggcagcgcaggagggtgaccctcaggtcgccgtggcaacgcccgggcagtccgtctcacgggcgtccaaggtgcccaaggcgagggagatgccgaagctggcggcgaggtggacctcggcagtgtcttcgggggtcgagatccgagagacctcccctcaggcacggttgatcatggcccggagcgggtnnnnnnnnnnnnnnnnnnnnnnnnnngtttttcattcgtatgtcccgaccgcgattttcctttcctcctcagcaagcgaagccatggcctgaccgatctggctccccagaaggcccttaagacggcgtcggcttccgcagccagtgtcgagccgggccttgctgttcagctggccttctcgcaaggcgctccacagcggggggctctggcggcaccagtcgccgtggagcgagttcccgaggccggctcttctgccgaggcagccatcgtgctggaggaggcgactgacgtggacgtggccccgagcccaccggacgtgccgccggtgctggcgcctgttgttactgaagccgctgccgtcccagtcggggagcgacctgttgctgccaatgctgagatggccgaggcgtcggcgctcggtgcctcggaggaggggggcgcggaaacgcgatccgtcccgccgagcgcagccttgtcactgtgcggcggactcccagggtcggcgccagttgctccggttccggacccgtgaggcctcagatcccttcttcgttcttgacgacgaacgggaggagcagtcttgggacgagctccgtgagtgtgccgaagcaacggtggggtcgctccggtcgtcgctggaggttttctgcagggacgtcccaaaatcctccaggtaatggtttcaggcatacctttttttgtgaccaaggcgtcttttgtgacgcccgcttctt

SEQ ID NO: 27360 - DNA, 1567 bp, Arabidopsis thaliana landsberg
gtatcataacgttctctagaggtttttttgtgtgtgaaattttaattgggtcagtatgaatataacttttttctttctcattcttataatatgtatgtatgaattgatacttggttttcacttttggtcgtatcatctttatgcaagtcacatgaaagagagcagaagaatggaaagagaatccaagcccaaaacttccacatttggatctttaccaagtgtatttggctttacgtacgcatgttgcttactgacaataatgatatacgagcctttttctttcttttggagttcttgtgtgtggcaaagccatcgcggaaaagccacaaagcatgcttagcacgtgtcaacgtcaacctaatatgttacttttatttatatcttgtttaacttcacaattatgttttaataaatgttaatagcaccgagcatgtttctgcattgtcattttggctcatatagtaaaacgcattaccgttcgtataagaatgtgtggcatcgatgtaaatgtataatagttttcttgtcatgttataacaaatgcttttgcaaaaaaaaaagattcatttgcagtgaaacgctcttgaaagcttgtggagctcctttcatagaacgacaataaacagtttcgtcttatttttgcatgtacgtcttcactttgtattctgttttccctttgatcatgaatatacatttcaacacataaactcttttgtttttcttttcttttgtctacaagaaggttaatccttccaaactttgctactttagtaacgagtttccagaaacaaatatttgaatctcacatcttcctatatcatgagctaggaggattggacagttaatacaattgaagtggagcacaatgaaaaaggtatagaggtagaattaaagacgaaaacaccttggctacataaatagagctgatcatgagctaacaggattggatagttaatagttagagacttagagtgggtatcaaagtagaaatcagaaactgtggggcgaaatcagagaaatgtggggagaaatgaagagtgtagttgcaatggtggcggttcagtttatcttcgccgggatgttcattttgtttaagataacggtcgacgatggtacgaatctcaaagttcttgtagcgtatcgtctgtcctttgctactattttcatgcttccccttgccctcatcttccaaaggtttcctactctttttcttacatttttatttttatcagtgtgcattttttaatgtataaccttatctatatatgcacatattcttcaaataaccccaacttcaccaagttatttgtgtgtatttgtattcacttattactcaatgttagtttattttaattataatgttttgttttggatttcttataatcaggaagaagcggccagaatttacatggaggctgctcttactagcatttgtttcggggttgctcgggtactcagaactagtacaatatcacttttcagctacatgattttatttatttatctattgatggcaagaatatactgaaatataatcctaaattccatagataaaacagtgttgcca

SEQ ID NO: 27361 - DNA, 1272 bp, Arabidopsis thaliana landsberg
caatcctcaatccaacatatataattaaactctcttttccacattccttcatgttatctaatattgatgtcttagttcatacttatgttattacaagattatgagcacacaagaaatttcatgacgtttggcaatgtgcctaatcctcaataattttcaatagaaaatcttacaccaagctttgcctaaatggaattattcgacactaagacaccccttagttcgacatcaacaaattctaatgaacttgagacttagattaacacctaatctaagaatcactctctttttctcaagagcaaatgctcaaccctctcaagtttttctctccttgacggctctaccagaaacctaacatagcatttctctatttattctcagagatcacgttaccaccaacagtaaatgaaaatatcctttttgtaaactaacaactattacgttttgatgttacttccaaatatatttcctttgatatgaaactatatatccacatacatatagatggcaaactctactctccaatagaattgagccacgtcagcctcgtttttttgctgaaatgttttatgcatcctgttatactttgtactttcaacttaagcgttggagagttttttgaataacacatgatcttcatctagcacttccccaagaattttgtacacaaggtaactaaaaacctttaataagctaatttgttttattcttacaaaaccaggcatctaaaaagattgttttgacatattatggcgtggaaaaactgacatattcaaaccttctttctcgacaaaagacacatggaatcatcttagaacaacgtctctcaccgtcacttggcacaaaggcgtttggtttactcatgatactccaaagttctcgttttgtgtctggttggcagctcataatagattaccaacgggggatcgaatgatgaagtggattggtggcgcaacgggaacttgtgtactttgcgataacaacatcgagactagagatcacctttttttctcttgtccctttgtttcagaaatctgggcagtgatagcaaaaggcatcttcaaggataagtattctacggattggtcacagcttctcgatcacgtctcaaacgcaaaccaaactcagcttgaaagcttcctctttcggtctgcgtttcaagctactgtctacaccatttggggggaacggaacgggagaagacacggggaggaaccacactccacaacttttttcacgacttggatcgacaagcatattataaacaagatt

SEQ ID NO: 27362 - DNA, 1744 bp, Arabidopsis thaliana landsberg
aagctttaaagcttttacgaaatctcatctttatctttttgttgtttccttccttcgtcggggaatcggagagccatgcatgagaaaaagagaggcaagagtcacgagtcgtcgcagcacacaagaatcacatgttcgatcgtgagagtgaagtgacgtgttttcttcattctcgagattttcagatttaagcgccgctcccttcaccattatcccatgcttcttccttcctctcttaccatcacatttaactcaccacattgttccctaatcccatttattttaatagtatatgacttgtacataattctacacaaatcccaaaaaataaagaaaaagtaataattgaacccattttcttctgtttcactaaagcacaaacacaaactgattatatttctatttcgtttttattgattgtttaatccaaaaaaaagagtgctaagcctaataaatttatctctgtattgacacatttgtcaccagatactaagcttttgctttagccattaaacaattgttcttcatcctaaatcaaaaagcaagctctacctctactgtcttttttttttgttgctaatagtagctagagattccataaccagtaaccaaaacatatttggtctttacattttacatgatatttagaatccctgtgaaaactaatccttcattcgctaccacatatctaacataccgattggcacgtgagagaacaaaccaaaagtcccaattatcgcaatgaataaatgggcttagctcattcacaactatgctaaagcccaaaggcccatacaatcccaatcttgttgcgtcgtattaaaccttctccttctacgacgaaacaatcacacactccggcggcaataaactctacttcatggaaccaatcccaaatgatctcattctcgagatcttctcgagattgccttcgaagtcagtgggtaggtttcgtacactgtccaagcagtgggcgtctatacttcgcagtactgatttcaccaagctgttcctgagcagatcctcgaatcgtccacgtctcttgtttgctgttgaacgatacaaatgtaatgagtggcaatttttctcatcgcctcagtcacagaatcggtatgagaaatcagctcatttagagtttcatagcaagttctcaggagatgttagccactacatttgtagctatgcctcaggtttgctctattttcctgctgtgcatatcgttgatactgagacgattgtgatttgtaaccctatcaccggaatgtatacgggcttacctgtgatcatgaaggacagaaggtctcgaggctttttagtgtttgatcccgttgataagcgattcaaggcttttgatactcatttcattctaacattaggatctggagaactcaagtggagggaaaagaatatcccttgtcctctgtatgagcgttgttcttcgaatcaagggatatgcattaatggggttttgtattacttagctaaaactgtcttagttgaaacagtttttggattgacgtttttgatagttcgctttgatgttagttctgaggagttcaagtttattgacgctgcccgctttaatgatcgtctaaaggatcctactagattgagtttggtccactatatgggtaaattaggtgtgactgaattgcaagtgtgttgacgaaggtggaagacgtaccgttgagttgtgtctgtgggttctagaggatgttgagcaactggaatgggtaaagtatgt

SEQ ID NO: 27363 - DNA, 1331 bp, Arabidopsis thaliana landsberg
ggccaaacctatgcctaccaagaggtgttaagcctttggaggttttaagccttttgaggttttaagccttttgaggtttcgtctttttacacttcggcccaaatccagtttaatgagttaatttgtggacctattacaattacatgttcattggttttaaaacctacggtttaggcccacctactatacagtatttaactatttatttatcttgcttcgagtgagactacaaaccagaggctcgtcttctgctgacaactattaaactcataagccaatgatgtagttactgtatcttgcctcaagtatcctgtttctactgtaaacatattccacatttctgccaatcatagatagctcagtgatgtcaatcagggcagtgtttttattcattccagagtcagttgatgagtgtaccaatttttttccagaacctttcattcacttttcctaaaagcagttttacataagcagttacagttgaaaactcaaacacgcaatgtgcatcattagcaagttacgagcaatgtcgtacatacgaggaaatgtgctctgaggccagattactgttgttcaatcatcgtcacctttgacttcattacttggatgattgtgtttctgagcttggtacaaatcagcaatctgaaaatgtgcagggaaaattgagaattagaaaaaggaaaagagtttcaaaaccagtctggtcttgtctttccagtattgaaaacatatgagtgtaattagaatgaaacttcacctgctcagatgatgttgcttcctcgggcttcttgtcttcccgtacacgaagtagacgaggaaaacgaagagaaatccccttttaacgaaacaaaattgaaaaccaatacgtaacaatatatcagcagagatattcaaaccaaaaaggaaaaagaagaaaataagtcggagaaagttaaaccttatcaggatccactatgccagtagctgcacggtgcacagggctaattgttaagtcagctgctttcacttcccagacctttaagcaaacatattttttacctttcatttcaacccatacgatagaatggcgaaactaataaatataagataacattttgagtacaagcaaacataatcccacctcagtgggctcaaaccaaacatctggattgaggctgtctccaactcggtagtattgctggatatttgaatcattacaattaaataagaattcatgctagagacatatatgataaggaagaagaaaatatcctacttttggagtagcaatcacttgagagcgaagactggacgaccgctcgtcaagcatggcatcagaaaatccagtacct

SEQ ID NO: 27364 - DNA, 1329 bp, Arabidopsis thaliana landsberg
gaatcttcataccaagaaaaaaggatcttgtgttaatcattttcagtaaaaaaacactaaccttttaagtcaatgatccaatctaatatctagtttaaaactaatggggctaaactaatttgaagaaaacagagaagaagatcaagtttttttattcaccaacatttggataaatttcttgttatacaagtttacaaaacatgctaattacaattagtcaataacaagtactttcagattcagaataattatatttccgagtgtttagatgctcttcaaattcatctctctaatcaaaagcatattgttaagaaaaaatgtataattcaatcaaaaacatatagctccattgccttgaacagataaaacaaatatcactttccaatcaaccaaaaacataaaacagtatcacttttgagatgtaactaaaaccatgttccaaaatcgaccaactggatataaaatcaaaactacctcgtgtttgttcgagttacgaactaaatccctgcgagtcgatgctcctcaaatcgaagcagccctaaccttcacagttgtaggcgaaccaaaggagatgcattcgtgtgatctggatcgagaacgtcgcgagtctaataataaaggaaagtagtgctttggtcgtgtcaatgaaaacgacgtagttaatgacacactaaacggcgttaacaacgatgtgcttttttattttgaccggtaaaattcttttttttatgtcgtctacaaaaaaagaaaagaaaattcgattacacatggtcattcatttatcaacctaactacatgcaatggaaaatggtcaaaattaaccggaacaatttgtcagatgaatggtcgtttcttacacgaactgataaactattcaaatttacaatctaaacttaacaacaatagatcaaaactaacattgattttgtcgtgttagtcaaccattacgttttgctgactgtattaccacatgtatcgctgacgtggctagatataaatcaaaacgacgttgtttttctcggtttcaacaatgtcgaagtcatcgtcttcggagtcgttagtctctggatcttctttggttggtgactcatgagtaagcggaggaatcgataatggcgaagaaggaggccacaaggtcggcggaggaagcggactcgacgtgtcaatgactcggtttagatctgacggttggacactgagtcgactcgggtaagtatcgaatggatcaggaccgtagattacggaatcgggattatcatgccaggtgtcacaatcaggaccgtctgcaacggagtctccaccgctgataagagtctacatccactcgtt

SEQ ID NO: 27365 - DNA, 1415 bp, Arabidopsis thaliana landsberg
  unsure (1)..(1415): unsure at all n locations
taaaaaaaaacctaatatattatatgattcgtccagagttgaattataaagatagattttggatttcgaaataaaatctcccgccagattcgagagaccacgacgactaacttgatgttctcgattattaccagcagctcccttcaaaaaccctaactctctgagctcgatcgacaagtgataatggccaacagtaatttgccgcgaagaatcatcaaggtttgttttccaatctcgatttgattccttggacaaactctaccgatctctgtttctatcggagtctcttaacttttgttttccttgcgatctgataggaaactcaacgtctgctcagtgaaccgggtaaaaaactctttaattcgtcctgccttgttgagttatagtgttgattttgagatgataatatcaattttgatggttgaattgtggatccgagacgtgaccgtccatggagtttggaatttggttgtagagtaagatttaaatctgattataacttcgattgatttgattggtgcagctcccggtataagtgcctctccatctgaggataatatgcggtatttcaacgttatgattcttggtcctacacaatcaccttatgaaggtagtcaaatagtcttctgataatctgagtattagattttttgctttgagagtacaacatgtttatgtcaagcaatgattgctaatgctcttgtatcttgtttgtgacactagctagtgttaagtatagtcctgaatatacatacacaactgtacttagttttattattaacacattcgatttgttctgttgcgtaccagatgctaagtttaaaacttgtaccttttttctttttctcctttgaatatgctctctcttaaaattttaactttttactgagtgatagattccatcttataggaggagttttcaagttggagctctttttgcctgaagaatatcctatggcagctcccaaggtaagttgcttcaacttttgtgtgtctttcttctttcatttcatgcttcacttgttttggtaacattaggattaccccacataacattgttaagtggaggtaaatgctctttaagtgaatgtctctctactcttaacactaggattttatttatgggtttatgagattggtgactatggatttgttatgactactccgaatgtcttttcttatattatattagacaacgtatccaagtttcttcattgatgtagagtttatgggtcttattgatgatatcatttgaaacacacgttacgtttctcaccaagatttaccatcctaacatcgacaaggactgttgtgaaaaatttccttttcttctcttactgncaagataactaaccagacacatggtcttttatacttatggatcatgttctgtttgcacttatcatgtatatata

SEQ ID NO: 27366 - DNA, 942 bp, Arabidopsis thaliana landsberg
  unsure (1)..(942): unsure at all n locations
aaatatgattaaatgatagttcaccatattatctattttagtactatagattgatgtatagaagaacagaaagttaagaattttctcgatacacaagaaggtaattaagatgaaaatctgcaaaaccttaaaaagatttgttttattatgttttttgcactgattttcaaaaatgttatcacttgaccattcagaattcatataagcatatcaatccaaacattagtcaaattttcgacatagatgaaaaacattataagtttctatctttaaaaaaaatcaaatggagaaaaagacaagtcgtaaaaacattagaatatttgtaaaaccaagaagtctcttaaaaagcctcatgcccaaaacacacacatagatagaactccataaccaacagaaaataaacacgtgtcgtctccacaaacttcaaactctattgtctctctgttcttcttgtttgctataaaacacactcaaaactcctctaactctctcaaaattctctttctctttctccatttctctcttctcaaagctaaacaatgcgcagactcagtggcattctcgtgatttacataatctccactgtcctctttggacatttcaccaacgtggcacgagcaagatatcattaccacaagggccgtcacggcgtaacgcatcctcttcctcctcctcctcctcctcctcttgaaacggccaatccacctgatcaagtcccttccgacccgtacccgagtccagacccggctccgggagattctgactcaggatgcgtctttgacgttacgtcgtttggagcagtgggtgatgggtcatgcgacgatacggcagcatttcaagatgcatggaaagccgcttgtgctgtcgaatcccgcgtcgttttggcacctgaaggcggcgttttcaaaatcacctncactattttttcccgtccatgtaaac

SEQ ID NO: 27367 - DNA, 1323 bp, Arabidopsis thaliana landsberg
tagtcaaatactcggattcttcacaacaatgcaagaacatcaacgcaacatacaaatttagatctatggacacgaatagaaactacgtttaaaagaagaaagaagatactcagaccatgtatgtcataccgacctgcatcagatgcgactgaggcacactcaaatttgcgatccctctcctgcagtttttcctcaggaatgtgtagaagtagtttatgactaacttcttgatgaaccatgaatcttttcttgctcttatatcgccatgcccgagaagatacaccacccctgattctttcgctttgtgtatgaacgataactctctctccaggctttgctcagcttcagatacagaggagtcagatgatgtgtcaaagggatggtggtttgtgtgatcagatgaagtgttcatttccatgatcggtttgtttaagtctctgtactcagagagaaggggaacccccatcgagtacatgcttccgttggggccaattacgactctagaacctgggaaatcttcctctgagtctgaatcatcgttcccgtcgctctccaaggaacgttcttgtgcttcccttcggatgaatttctcgaggctctcgatcagtagctgctcaaatgcttggtgggtctcctttcttgcgtctttataaccatacctacaccacatataacacaaagagtgtttatattcgatttgttcagcaacgaaatggaacagaatgaaggagataatatgttcttgtgtgctaaacagtggctctaagacgtacttcttatataatacaaaaagagagaaggaaatatcagatctacagacttgagtaagaatctctacgttaagtctaatcaatcatatatgaaccatgaaaatttgatcactgaaagggaaaaacagaccaacctggcaatgcaacggaataagtgatagcttttggtgcagacacgtctgaagaggaacctctcattctgtggtacaactggaaccgggacatattttatgcagacgaaaatgaccatggaatggattgcaggaagtgtagtcagaaaatggccaaatattgccggtactcccttcactaactcattgtacagcaaaccgataccaggagctcttatcgttcccaggttgcacccaagttctctcattaaatccattgacagcttttgttcgacttctgtttcatacctgaacttactttcatagatccaaatatacattataccaaacatgattacgggcaagaccaatattatccagctttcattcccaacactcgctttgactgatgagaaaaagactaattccactccgagaaaaac

SEQ ID NO: 27368 - DNA, 1272 bp, Arabidopsis thaliana landsberg
cctttccattctcatgtccataagttttgaattaactgctttcttaacatgtctctaaggctaattatttcatcaccgttgaataaacatgttaaagtagcaaacaccaactcatcccttaaagtacatagtcgaaagtttaagggtaactttttaaccataaattggttttataggaactcgcattgcgagagatagggaaatattaatcactcgcttcctatggtccttttagcacatgtggtatgactcacatgtcatagtgattacgttgctcatatagttcttgtcgatttaataaatcatacatcactatgtggatcaagtactactctcatacttatccagctttatcaagtgttcatgattttgggtctatcatgatcggtatccaaaaaatttatacttcatcttaaatctttttaaggtgacatttataagaaatacaaggcgtcctcccactgattcgaagcttataatgtctcatcacatattttcaccaagaaatatgtggcgattgttcatgcgagtgaatcaatctctaacttgataactcctttttaatatttgtgtaagtgtataaaatgaaaaacgaccaatgtataacatgctttaaatatcataagttatgtgtaaaacataaatacaatgtcaaatagcaaagtttacaagtacatcttctagatcctacgcaaacctagagctcgaacatgaacgttaaaaacgtctctaggaataggcttagtgaaaggatcagctaccatcttatgcgtagagatgtactttagtatcacttccttctttgctacaatgtctcttacgaaactatgcttgatctcaatgtgtttggtccttccatgatactttggatctttcatataagcaatgcaagcttggttgtcacaatgaatcataacagggtgcgaaggatttggtgtgacattcaagctttgtaagaaactccttagccatacagcctcttggaccgaggctgaacacgccatgaactcagcctccatagtagataagggtgtacaagattgtttcttgctactccaagtaatggcaccatcacttagcaagaaagtatatcctgaagttgatctacgctcatcaaggtcaccagcccaatcagcatctgaatatcccgtcaaatgtaggttactaccttgataacacaaggaataatccattgttcctttcaagtatattagaatcctttttaccgccatccaatgtttctttccggggtttgactggtaacgacttacc

SEQ ID NO: 27369 - DNA, 524 bp, Arabidopsis thaliana landsberg
gtgtcttcggattctttgagttaataacgtaattgtagcttccaaataaacaaacacgtttctcttaagtagatcgaaataaaatcttttgtcttattgtacttaatctatttcacttcactatcagcctgttaatttgtattcatatgactcgtatcatattatcacacaattctttcatatacggacaacctagagaaatgtttaaggataagtcagccataatttttaatcacaagtttgtttattgctttattgataaagaaaacttacatgcacaacagatgtgtattgccatcctttattttattgtaccacatgtgaaagtggtgatccacgatggttgttataagctgctacaaaatatgagacacctttatcatccacaacatcctctcatcatcaggagtataaaccatagaaccagaacttgttccgctcattacaatttacaagggttttaatacactaatgcgttatgatcatttggttatatttatatatatttcttacgtaatgctttt

SEQ ID NO: 27370 - DNA, 823 bp, Arabidopsis thaliana landsberg
catccctccgtgtgggattttgcgatttccagagagagagagagagagtgagagtgagattgagattgtaatagctggatcattataaaagtagtttgtgattgtgaattgaaacattcgtctggtttcggatttgatggtattgtggaacaaaattaattaactagttttgttttgctaaacttgctaagtttataaattgagttaaccagttaggtaactaatatgttgttctttttctttacttaaataccaaagtcaacaaaccagttgatgatagcaaaagcttttcagacataaccagagtaccaatacctcaaaataaataaatcgcagaaataagcagaggacaaagctgaacaatataatagttctgcacacctaaaccaagtaacaacaacactttgacacataaaatgaagatactggttaaatttcttaatgctgaggataaccgggaggcgggtaagatgcaggagggtagccttgagcaggcggtggataggactgagggtatccgactggaggagggacaggttgatcaaaacgagacatctgctgagctggtggcacacccattggctgcgatccaaacactccatctcttttgtccatctcaagtttgtgttgtgtctgcaagcagaaaattggattttgggttatatatatataccataagagaagatagtttcagaagctcagataagtttctaattctcgctttctagtacctgcatacatgcgcagaccctgcaagaaaacgaagaccgcaaaatattagcaattcgtgaacatgaatagattagagggagaaatctaaaat

SEQ ID NO: 27371 - DNA, 681 bp, Arabidopsis thaliana landsberg
tttacatataattaaagactttataaagattttaagagattttaaaatgatttacaagggtttttaacatctttacaaatgttttaaaaaactttacaaggtttttaaaagagttttggaaaaatttacaaggatttctaaatgcatgtgttttagctgggaaaaattttggcaggaaaaaaaactggcctaaatttttttttttgatcgggaaaaaatattttggcggaaaatttcagtttctaattacatgttctcattagataagagaaaataatttacgattttcggttattacagtttgtaaactttttaatttatttttttaccaatcaaatcttttaattcatttaccatatagatttttctatttgtcacattgtagtttgttttatttgtaagtgaaaaataaaaacttgaaaagatcagggaagaaccaatctcttaatacatctttcttaagataaaatttcattaaaatacaatacaatagatgtttcattaagtatgtttcgattttcataaaaatacttgtttgggtcagatttcaaccagataaccgagccgatcaccagcgcctcgggagctaaattcgtaatctacgaggcgagaacgttgtacatatccatatatggttcggggtcactacagaaacacgttccaagtcgtgccacgaatcac

SEQ ID NO: 27372 - DNA, 996 bp, Arabidopsis thaliana landsberg
tgaaagcctctcatcttcccaccaatagtctaactttagaccttcccgaggacgctgattcgtgaggaaagcggctacaacgttatcaacagaggaatggccaaaggtgtagaaagaaacgtttgatttggaagagaccggagtggctatgatcgcaatttgtgcatcggagagaagacaaagatcagaggctttgctatatagacccctactgcgttttgagaaagcaacagctcttgaatctttcttctctatcagctctatagaaatctttctcttcacgccccccattctgtgttcacgatttcacagacaaagaaagagaaggagaaaaagacagagagatttttgtgttagcctgttgcgaaagaatatgatatggctactctctgtttctaatcgtgtatatatagactctgtgttgttactcgtttctaatcaatcgactatatttcctttttctgacaattagctaatcagtgattaaacgaactaagtataattattttccttttttgaaagtaatgactcttaaaccgcctgagacgaaccaaactaagtacaatcgatttccttttttgaaaacttaactcgaaaagcacctgaaactaaccatggctggttcagttaaaccatcgattctatttccttttcgtgataatctactaatcactaattaatccaataagtatatgtttcctttttctttgtcaaagaaatttccttttctgaaagagtgatttaatcgaaaatttggttcagtaataaacagttatttggtttagtcaaaccatctaaattattagtttatactagcttaatttgaagacatgcaataatgcaaaccaactaaaccaaacgtaaatcgaatatgcatgactctatttagtaactgaagagtaagaaaacatttaattaaaccaaatcaaattagacaaaatgcgaattaactctcttgaaccgggtttggtcaagttaaaagaatcaaagacgtgg

SEQ ID NO: 27373 - DNA, 1404 bp, Arabidopsis thaliana landsberg
ctcactcctagtctatccccttctttgaaatcaaaactaaagtcattctattcttggggacaatctaaatcttttcccctcatacttttgttttgtgcaataagcttaatgaggtctcttattttcagttttagatttctatgttagttcatttgagcacaaatctatcctagtttggtttttcctacaaagatcgcctcaaaagaacgattttagttaataagacttaaaccccaaccatcaagatcaaaccatcataatctagtttaatccatgatacaaaaaaaaaaaaaaataccacttacacaaagtaaaagcaaaagaaaaagatagagatgagaccaaattcataaatttgatagaaagataaggatgagattcttttataattgtgaagataaatatactaatttttatcgaaggggtgttcaaaagtatattgattcaaatagattatagagaaaaattaagtaaaacttagatttagaaatacttcttgttatagttgtcatataaatcttaaatttaacatcaatcatataggcaaatctagctttattaccaaaaatatatctcgaatagaaatactaaaaaattaaaatgtcatccgaaatctataattaattaatcgaatgtcacaaccatattagtcatataaacatttttcttgttccaagaatgacatcttgaccgaagaataaagctatgaaaagtaatagaccaaaaagttaagacttctaaaacagaggctccgatcttttattagttctttaaaaagaatccggattaatttaatcatcggattagttggattggactaaacaatgattttgaattaggtagaaaccttaatgattatgagatcaactcaatgaattctttccaattattattgtcttagcaacacattctagtatatccataaaagaaatattataattcccttattttagtcatataagtatgaataaccctaatgaattgaagtattgaactaaaattaacgaatgaataagctctttccaacccagaaaacaataaataaatccatgaaaaactgaatttgttggattgagcttgacccatttgaacaggctacttatattatatataaatgtgaacatctttgcatgaaaaaataagtctcgtcaacaaatgttagccgaaataatgatatagtttaagatagagccaaacacataatatacatacacatgtacattgtattttctcaaaaaggtataatgacaaaagacaaaattaataggggtaatatcgtaaattcaaaggtaaaggagctgggcataagctttgttctcgagtctcccgctccgctcaggtgtagcgtagcgcctcttaaactttctctccctttactatgcgttttctttggaaaccctaaag

SEQ ID NO: 27374 - DNA, 9659 bp, Arabidopsis thaliana landsberg
  unsure (1)..(9659): unsure at all n locations
ggttttgaacttaatatttcaggttttggctgcattaaacaattagaatgtgtaaatggctacttgcaatgtgtggaatacgagagagtaccctcgaagattctcacgtaccaaacatctgatgatccattatacagtgggtacaggtccgctattcaatctacaaatcaggaagaatctctggtacatatgtttgaagttgagacaactaaagaatttgcatgttaatagcattgagatttaagaatttcctctttttttgcagctcgattttgccatatgggagcctccacatggaccttacagaacgtttaaccatccctggaaaaactatgtcaaacttagtggtgcagtaaggcattgtgctttcaccgtcatggcgatacatggttgcatactttcagagatacaggtttcttattattactattatatgatttccacatataattgtttagtattacaagtaaattggttacacttacatgcatgacataagaacattttattcctcttacaaatggggctttgttatatgacaggcagctccagagaaacgacaggcatttcgtcatgagcttcaaagagttggcaatgaaggcgcaaaagttctgcgtttgattggagaaaaagtggagaagatggagaagctaggccctggagagattctaaatgacgttcaacgtgcagcagaggagctacagatgaaaatagacagtaaatcctaccttcttgtgaactcagaaagctgggcagctactaaagagaaagctgatttggttgaagctcgagaaaacgaccaagaagccaaagacgacgagaccaaagtgatcaaatccttaagccagatttgggatactaacaacaacaacaacagcaataaccatcagagtaatgatcaatctcagcattggatgtcaacagagagtatgatgcttaagaaccgagagatgtggccaagtatgtccttcattggtggtactgtggtgaatgagatagaatgtaaagtatacgaaagtgcgagttcgttgtctctggctacgtttgcttcccttctgatcgagtttgttgcaaggctgcaaaacattgtcaatgcttttgaggagcttagcacaaaagctggtttcaaagatcctgttgatcagattcctaaggtttgaatgtgtgtgaaagaagtgattcagaagtgatcgatacacgttaaatattatgaacaaggtgtattaagtgatttgtaagcaaatttattaaaacaaacataattacattgttcttttaatttgttttatgtatatttgtttaaatcattttgatagtgaaagcaaaaaaaaaacttccgtaatattttggaatcacatgtttagataggaacgtctttaattagtttttacttataaaagtatttattcataattaggtttttgttttttcataaaacaaatttccgaatattaaggaatctttttttgtttgtcatctgaatttcgtataaaaactgattgttacataaaagaggccttgcacataaagcatatgcaaatattagggaatctagaatttcaattttttttaccaattctttgagtttttagcaaaagcatttccaatagttttttttttgtttttgattctaaccaataaagtacaatctatagtactaaatcaccattcaagtttttcaaaaaactaaaatctacaccactaatcagaaaccaaaagaaaaaaaactaaaagaaaaagtcacttcaaatactacaaacactaatgcctatttgcagtaaataagtgatttggtttgtatcttatgcaaatttgtgtttaaaataactaaaaggcagaacaaaagcaaaaactaaacgaggcgtccctacgtgcttccttgcagtttctgatggttaatccatgaaaaggtaccataacactacaatagttataaatatgtaatcaaaaacagaatcacaagaaaataaacatcgtttcttaaaagttcaaacagatcacaccatgaacctttcctctaacgaccaaccaagccaaggccgtatcaaggccaaggattggtcgactgatttgtgtgaatgttggatggacataaactcatgctgcttgacttgttggtgcccttgtgttgcctttggacgcatcgcggaggttgtagacagaggatccacatcgtgtggtgtgagcggattgatgtacatgatcatattcatgttgaccgggtatggaggaagcagtctctactcttgcttttaccgaaccaaactaagagcgcaatacaatctcaaggagcgaccttgttgtgactgttgtgtccacttttgttgcgagccatgcgctctttgtcaagagtataggcaacttcaacacaaccgcgatttcgacttagccatcgggtggcatgggaatatggaacgacaggcgcgactggctgcctctacaccttcggctcctccacgtcaagcacccatgtctagactgaattagattggtttaacaatgagttacatatatctcgataaactatgcatatctactttagttgttttgataccgtacgtgatgtaatttgtattcctttacatttgtcactcatctggtgtattgaatatttcggatcaattattaatattctcttcgtgtgtgtcaatgtggtatagctttctcattattctttttttttttttctttcagaatctctcaaaattaaaggacaaaaggagccatatgggaattatttctttaatttctctaaaattctaatttaagtacattcattcaagtacagtatttgagattaaccttaacaataattcatctaccctatttttggggaacattacttatgtatggaaacaagcgaaaaagaccaacaaattttatgtttttgaagtgtgtgaagaaatctctcatcacagcacagaaaaagaaagagcaacctcgaacaaaataattttttttttttaaaaagtgattgctaccatgtagaagggtaaaaccaaatgttgtaatctcaaccattccgctatgttacaaactagaagagtttagaactttgctgtgacaaattgtgtagtgtacgtgtggtaaatgaaacagaccagaagtaaagtctatgtgataattgtgtgtgaaactttatacacctatgtgccacaaaatcaaactcaccaaacatgaaaatgggctttgtcccactttttcaacactatcatcctcttattatattacattatatatcccacctaagctccctcctacttgcccactctttgattggcttaacacagaaatcaccaatcaactttcactacccatacttcaatcaacttttcattaaaactttaccaaatgacaattaatttctcttgcatgcatttattattattttacgaaattttgcttctaagctctttacaacattaccatattcccatatgattttcgttacacaaaaatctcgcattaacatcaaagccttgttaaagaacaaccacttaacgaaggtcactaatacagtatatattaatgatgtacattcaacaactaaaattattactaatagtctagctaatacacacaaacatgttgaaatgtttccttacgtaaataataatataaataaatataaataaatagattggtgcatgaacaatgaaaaacaaaagtgggcaatgcatctttttggtaagtgcattttgacaaaacctttcacaaccaatcccatacttcgtctgactctatgccgttgaaaagttggagactatcacccaccaccacaatatttgatgtccacgtgccactttcatctttccaatatatattactataatacgatttggtgaatggaaagttcaagagaattaataatatcactacagtccatcgactagctcacaacgaaatagtcacgttgaattttgcctcccacgctcattggataagaacaacccttttaaagtcttattcacacgtttctattatatcagcagtgacgtgacgactatatatattctaaacttaagtttagagagttaatacaagaaaaaaaatagagatcattgaattttctatagttgtgactagatgtctagatcttctggaacttgaatacctcgaatcgacaaattgttgaattgaagaaaatcacgtgggcatgttcggtcctagacattaatctcagtagcccacaaatttagtttagtttccattattgatagtattctgatgaaaaagtatagttgggaacattttcgaccttacccgtccctatcaccctccattatacatcctcctatataagaaatctccaaacacatcagtctcccaatctcttaaaaaaaagctctctttgtggatcacgaaactacacaaaatcacacataaaatttagaaaatatgggaggcacaaaattgacccatgtgaccaccactaaccctaataactccaacattcatggaccagtcgtagacgaagtagaaggccttattaaagtttacaaagatggccacgtggaacgatcccagctcttgccatgtgttgatccctcactacccctcgagctcggcgtgacttgctccgatgttgttatagacaagttgaccaacgtatgggcacgtctctatgtcccgatgaccacgaccaagtcgtcggtctctaagctccctttgattgtttacttccacggtggaggattttgcgtcggctcggcttcttggttgtgttaccacgagttcttggctagattgtccgctcgctcgcggtgcttggttatgtctgtaaattaccgtcttgccccagagaaccctcttccagcagcttacgaagatggggtcaatgccattctttggctcaacaaagcaagaaacgataacttttgggccaagcaatgtgactttggcagaatattcttggcaggagatagcgctggaggcaacatcgcgcagcaagtcgcggcaagattagcatcccccgaagatctagcactgaagatagaaggaacaatcctgatccaacctttctacagcggagaggagcgtacggagagtgagaggcgcgtggggaacgacaaaagagcggtgctgacactggcgtcgtctgacgcatggtggaggatgtctttgccacgtggtgcaaacagagagcatccttattgtaaacctgtgaagatgatcatcaagtcgtcgacggtgacaaggacgatggtgtgcgtggccgagatggatctgctcatggacagcaacatggagatgtgcgatggtaatgaggacgtgatcaagcgcgtgttgcacaaaggcgttggtcacgcgtttcatattctcggaaagtctcagcttgctcacaccacaactctggagatgttgtgccagatcgacgcttttatccaccactacgatcccttaaattagttctgtattatagtatatattatttttcattgtagctcatagtatatgtttgtatcttaagtaccaaaaggtttttgtgttgtatataatatagttactatagtctttagggattcctacaagatgtaagttttaggaattcatatgcttatcggttatagatcatctagtcattaaaagaataattcatcaaatcaataataattcgtttacaaaaagttatcttttagcataaattataaaattcgaattggtttgattaacttttaatagtccttcaacacataaataattaaccttttttttatagagcgtgcatgttgttggatatgggccatatcccatataggtgcatggcttggattgatgaatctggacaactatttttaggttcaagcaaaaaataatattattaagatttgaatcaaagtttttttgttgaaaggttgagatttgagattgaagttgtaagaatgttactactatcaactaaaataatgtcatagaatgaatcagacaattctagtggcggacaaattgtagacaaaagcctagttcttgtggttcgttttgaaggcaacctcactttcttgttctttctccattttttattattatacaaatcagcattattatacattcgtgactattggaaaaccagcattatcaatgtaagacactaacattgaccattttttttctgccattttttctcttggaaataatggaaatgttgaaaacatgttgtggacaaatgcatatataacacctttttttgtttaggatttatggttaaagattaactaggtgttatgggttaggaattttgattatcgaatgcactaaaccatattttctcgaaagccatcaataggcttggtctagtgaaggttctctttcatttctcaatttacaatatgtgtttggggttaaaccactatcctggacgataatgtctcaccactaaggaccgaatcctttttctacttccccaattctaagtttttttctaattttttctagaagcaaatactttttctacaaccttgtagaagcaaaataattgatattccacaaatgacaaatcttaagagattcaacttctgtcttgtcaaaatctcaagatttaacttctgtctggtcaactaaatacatcaacaatttatataatgtagataacaaaaattgggggtataatatggtcaaactatctatccaataaacggttttctatttttgtatattaacaacagctagtttcatataattacactataaagtaccactactacatttagataaatcattattaaccatttaatatcagatcttcgtctttaagtgttttttcaccaacaaaatttgacgcttatcttctctaattttgtgctcaaggtttttttggtgtcgtatgtccagctccaaccgaaaaaaagtatatatttcaaaatatttttttcttccatatttctctcaccagattcttaattctgtagaaacattaatctttcttctgctacaataatttctaacaaataacgttgagaaaatcaaagagtgaattgtttattatttattgtttgattttggttatataaattgttattaataaaactgtaaatgtacgggaatgggccggtgtttaaggcggaggggacgtcgttccgggatcaaccatacgcggaacagcttcctcagggactatggaccacagggctttgcgattgtcacgaagatgctcacatttgtacgtaccaaaacgtatctcttcgtgttttttgtttgatctttcttcttgtttgttgtctcaaaaccaaatggttttttttttttttgtttattggatccattaaggtgttcagacagctataatgccatgtgtttccttcgctcaaaacgtcgagatcgtaaacagaggaaccatacgtaagagaaacaaatccgataaataccatttttgtaatgaaattgatttgtttttgtagtaagaaatctaaacatttggattttgggggaaatgcagcttgtatgaacgcaggtttgattcatctagcgttaggctttattggttgtagctggctctacgcttttccaaaccggtctaggcttagggaacatttcgcattgcctgaagaaccatgccgtgactttttagtccatctcttttgcaccccatgcgctatctgccaagagtcccgagaactcaagaaccgcggcgctgatccttctatcggtattcatctaatgctttaaagatttttttccccggcaaacttgatgtaacaacatgaaaacataaagattcagcttacacaatatgtttttttttttttttttggtgatttttcaggatggctttcgaatgtagagaaatggagccgtgagaaagtaacacctcccatagttgtacctggcatgattcgatgatactttcacgcaatgcggctattatctcttacggtttgaaactttggtgtagatcttgtaagcttcaggtgtttctcagtttagctagggaaagtaaaataaaaaaaaacgatgactgattctgaatggtaacgttcactaccaactaaataaacagatgatctaatacactaaagagaagagcgttatgggtcttttagttaaaaatatgtaaatatgaaaacctaagaccagaactatgcttttcctttggtcatcatgactcatgcaggctttttatttagtctctaggtctggctaaccatagagagctaagtgctctaagccgagaaatataatcgtggatgaccaaaaaggcgcgagcagcttgtcgtgtggtgagaattctgtgaagctgttgcagagtttgttgcctcaataaatcagcctgcaaagatatagtaacctttaagctctttgatttgtaataacaaatgttgttgttgacaagagacattctgttcattttttcttacctggcgaaggaagttttcaagagtgccaagtttgcccatagccatagccatatgacccatataatctgcaacatttgctgaagagtttggacccatagaagcagaagaaagcgtctcgagaagtgattgttgtagagcttccatgccttgtgacaatgcatcctctgcttgttgagacgattgctgaaggttgcaaatgcctatcaactgctggtccgtcaatggatccacatggttccccaatatctaacaacatagttaccaattatgagaaaaaaaatcaaaaccaatgattgtgaaaatgttttgaaccctttcttttaccttaagtaactctgatgatctaaatccacctaaccacatgaaaaatctctcggcaggtgtcttccacatgcctgagagcatatgaaagacgtcaactttagtgccaattccctttagcctgaatatttcatcatagtgactcatcacagcatccactagaacgcgtagatcgttgtcacctaactgcgaattcacacccgatcttaagtcgttgatcattctttgatgttcctccttccaacgtgtatattccaattcaaatgaaaagacacctacaacatcaaaaccaacttcattcttagtaaaagatcacaaagagtcaagaagtgttatgtgagattcaaaaagtcttaccatttcctgctgccaaatgcgtgtgatccgctttatctcctctttttcttttgatccctgcatacaaaagaagccctgtaatacaatttagtagaacatgcaaattaaagaagacaacagtgttaagtagacctgttggcgagctcttttgagctcttcctctagctgtgcaagcctgattcgactattctcaagttgctgaacataggcctattaaaaaacaatgtaaatacaaagataatggacgatgaaaaacacagttgaatcagctactatacctttttcctcaaccgacttttcctagcagcctcccggttctgagcaagtcgacgaagtgtctgccaagaattcaaaaatgtcaaaagttcattcacacataaaccaaaaacgtatccaaaactcaaatggtttaaatcagaagatctaccctttgatcactagatttcacattggattgatctgaacaatttgtagccaatagcatcccttgatgacctccattcaactatataacacanaccaatcaatatacatcaatgcaactataaataatgaaacaacaaactttacaagcaacattaacacggccaagtaacgtttttcacatcatacgttcatgaccataaaaag

SEQ ID NO: 27375 - DNA, 2728 bp, Arabidopsis thaliana landsberg
gtttacagaaacaggtgagattacgttgaaagaacttacaggtcttattggtattgctttgaatgcactagcactgcaatagacaattgtttcttcaccaataataaggacaccacagagcggtggtggtacaggaatcagcaagtcagcaccattgtcgagactgttctgagaccatggaccctcgacaaaatccttatctttaagcgagacttcatatgttttgacatgacgagcatctttgttgtcctacacaaccaatgattagttagtcccaccggagaaacctctagattgcatctcgtacaacagactacatcatcaatatagattataaagttaaaaaaaaaaatctgtttaaataactaactctcaaatacttagcttaaaatccatcaactaccaaccgtacagatattaatcaactccacaagagttctttctaatgtgaactctggaaagacttatgcatgcccagataacaaagttaaatgcatgtacaaaattcttcgtagcacaggcatgttaagatatttgcaatacctgatatagtactgcaatagtgggctttgcacatccaaacagaaacttgatatccagaacctgcaattcctcaagcctgaaatttagacaccacactcagtacatcatcattcagttttaaatatccccagaaaaatcatatcgtagtgattctagaggaatgagtatattgaggattaaacagtttatttacgaaagaatctgacgcctggaaacaaatgcacactagaattaaagagtacctgatattaaaagcttccttgagctgtcccttattatcaaatggaataacctaaaagaaaaaccaaggaaatagaacgcatcatcatacatgtataaacagatagattagtggaagttcagtaacatgatatatttaagtaaacaagcacatctgtcaaagtttttatagaaggtaacattataccttgaacaagccgtcatacagatggagtccaattaatctacaatctggatcaattataccaatctacaaagcaattgtcaaatcagaggtaagctacatgcccaccaaacccttaatgacaacgcatattttttgatgaaggaaagtaaatatataagcactctgaaatgcacagtcaagacgacgatattcaatacctgaccattgtctgttggccggcctatacgatcagaaacatcccccattgccctacaaaatgttcaaacgatatttacaattagcggaatagcggtaaaggaaatgacagccatatgtatattgacaaatttaagttacagtgagcaacaactatgttagcaccagagaagtcttttgcaggatttagatatacaacaaagtacagatacataatgaacccaaagtaactgggatcctagaacacaagctgaacagataagacacgtgatcgacttttatctaaatgacacaacctgatcccatgcactactatgcacatagttagaaacagtgatccctttcaaactctaaattcgaataactaacattacaagagtattataaagacatataacacatccagttgctttacttcatctgattgcattaaaagttgatatcttttggctaactataccttgtaataagctcagaggactcaggatcccattgaagaacacagaatttgtatctctcagttgcaatgaacaaaaagtcttgcgcttcgccctacaaaagacggtggacaatactatcaacattttaactcattattaagaccatgacaaaagaacacaataagagatatatactcacatggggtcggaacaactccagagtagcgattcttccatatataggaacgtccaacataggctgcaatataggaacatccagcagattcttatattactaacaaaacaaagcatgacaacaaagttttgaactttatactctaatgtacatggaacttaatccatataagcttgacagaatagagatgtatgtacctgaagtccttgtggggtaagcaaatggatctcgattcgagtacatttcctgagaacagatcaacactgctgtcaaactaatcttctaatggatctgatagatgttacaatttaaggggacaatgctaaatcggataaatgagataactttcaaacaaatttacagtactgatagctaacgataattgaaaatcctccatatcaaaaaaggcacgatcttcaaatgtaatttagttcaggaagtaaaagccataccaaaaaaaacacaattctttgtcacagtttcaaaaattccacctcatcaaagaacccagaggcattaaaatccttatagtcatctcccaaactgaaattgaactacaattttgtttgcaaagtgggtaaatttatgaaaattaactcgtgatgggaaattcattgaaaaccctgaaacccaaatcaacagctgcaattcaaaaggggactaattgacaaacaaaaattgataacaaatagaggtagggggagagtttcgtacgcgacaatgagattgagctcttgaggacttgtgaagttgccaacgcacgagtgagtgacactggtcggtttgtgagccgtaacaacgtagttccatgagctcatcttcctcttctttgtctccagggaatttgccttcgactttctacgcgagggccctcgaggaagcatctagatttctgaatcgagctttcggaattttaacatagagaag

SEQ ID NO: 27376 - DNA, 966 bp, Arabidopsis thaliana landsberg
taacagaaaattttatataagcaagaatatgtaaaatagccaatagaaattcgtggaacacaacaaataagcgaaagtaagttgaatttagtgctttggtaaaaaaaaactatctcactgagcttaccaggatccaagagttcagcactgcaagcccttcttttgtacctgcaaaggatttcaaggtttcaccaggtaggttaagcaactccttggctaaatgcaaacgcccgacagttgttttggcagagaagaacatgtttcgtagcaatgattgcctggctagcacattagacagctcaacaacttccagcctctttattaggtctctgacttcatcccttacaggtacagatttcctctgcgctttttctagtgtttctatttcggctgtgtaatcatttccacttctaagtatatcaattatacgcacagcttcccggactccagtcatcattgcaccaccaacagtgtcaggatgctctttgcatgttgcctcaccagcaaaaaacaaacaattctgaacaggccttcccaatacatcataatcttcaccagaagcaccaatagcaacatacgagtaggcaccataactgtaaggatcagtgccccagtcagtaactaccgaggcgacaggatcaggaaccagatccccaccaaaaagcttccgaagaaccatcattgcatggttcacgtgctcagacttactcttgtttgtatattcaaaagcagccttcccaaccaccaaagctatcaggacaggagcaccaacagtttttttgacattccaaaacataaagcactcacctcttagatctgtttcctcagcagttgccccaaaataatcaacactatcatcccaaaataccgttgggaactccaaaacaactttatttagaactccaaaaccaagttgtttgattgacgcatatttccagtccggcaagggtggtgaaaacttaatag

SEQ ID NO: 27377 - DNA, 1307 bp, Arabidopsis thaliana landsberg
ttgtagaatataagtaagtatatatagtttataaagcctagaaggcacaaagaataattattcacttttagtaattaaatattgtcaaatgaatttttcattattaatatttgtatatggtatttgtttaaatttagagaaataaaaattgaaattaaacatatatatataagaaacaacaaggaggaatatgtggcctagaaaatctctattttttttgtccgcactctcttataggaatacttatggactacattttctttactttcttctatttttggaaaataagttttttatatacaacaattagatgattgtgtcataagcattctaccaaaaacaaaggaaacaaaacaaaagaagaaacataaagtaaagcaaaaatgggtaaaagtgtaaatgtcactggtttcatcattcatatgatgattttcttgttgattttaacaggtaatatatatatacattgtgatatattaatctctttgaagtcttatatattcttactttttggatttatgactaatgtttaggcaactttaataaaaattcaatagctaatgtgaaaaaaaggaaccagaaaagtttcccttttcgtttgaagtttctgtttgcattattcataacgttattttatcaaacaaaaatgttctatttctcaaggatttatatttttgttttaaaaattgaaaacgtagtgtaattcatcatagtttaaaggattaaagtgcttcatgttttttttttaccattgtgtgtcaatcccgacataaattttattgctcttgagatagctgagaaatggcatatatgttacgtgaaataaactttacactactaatcattttgtatgagatttaagtagtaatcctaaagttactgtacatcaagttagtagtcatgcaagtaatcatcatagctagagattattaatgtttttaagcatcatcacttttaaattgtggattaaccaaatttttgaggcaagagaatgtagatctaattgatcaaaaccaaatgattaataacttatgtataagagaatgatagatctaattgatttttttttgtataattagaattatttaaatgtatcttacatatcgatcactaatggattaggaatatatggacaaaagcataagcgggagtgcttcaagtaccgagccccttacacgcgtggatcttgtgacaattataaacacgtcaagtccgcagtatgcaaaaaagtttgccaacgtagaaaggattttgatggaagatgtgaactttttcaggacgaaagaggattgcaactaggttgctta

SEQ ID NO: 27378 - DNA, 1471 bp, Arabidopsis thaliana landsberg
gaggttaatatatttccatctgcttctcttcaacattgcataaaacattgtgatcattgttttgattatattaggtgatcagaacacatacacatccgtacacgacccggattatgaccttaacgaagccacacttggagagagtacaagttgccttagagccatatactgaaaacgtaagacatggcttcgaaaagttggttaactggacaaaatctttgggaggacaaaagtaatatctattttcttgtttggtttttacggctgccagcaattgccgggtggtttctttcccatttttttttagtaattgtgatgggagacgctctctttaatcatttttcgtattttttttttcttattttggatggtgatggtgttaccagattcaaaatcagaagattcataccaccgatgtcttcatccagtgtcatgttgattcgtttgaatcgtactatattcataaatataaagtttgttttcggtggtctcactcaccagcgccatatatgattctcaaccgacggattttctcctaacggtttggctagaagtcatttggatatttgatccgtgaatcaataaccaaatatgaatttgacctctgagataacttctcatttctagttttctaatttcatccctacgctaaatgcaccaattgtcccttatttcgtgaagcacgcgacacatgctttggctaagccacataacctacacttggtagcatttgagatatcaaactttggttttcaaaagttcgacatcttgtgatactaattggtcgaaaaaaaatcacaaccaaaacgattaaaaaaaaaagttgaaaatgaagagttgacttctttaatcctcgagtcttgataatagaagagatagaaaaatagaaaacgataaatttaacaaaactaaaactttctcatttagggaacatgagcctctttaggaaactttttctttacgtctacttttaaattcattacagttacataactatttatttatataaatgaacttcttgctaaattcatatggtagggaggatattattacatgaataatttgagtgatgtctaccaaatctctggtcctaaaaccactctgtgatttcaaggttaataacattgattgaagcagaaaaacaaaccttttcgtttgtcttcacttttggcctttggagtttccccacattcatcaagcttagccatcaaagagctagttccaggagaatccggtggcaatagcgtgttcttcgaagcaagaatccgttgtggaatagcggatatcggagatccaactttagagagatagttaagaagtaactcaatgatatgcgtgaagttgggccgagcattcggatcctcattccaacatgatgttacaatgtcgcccaactcctccggtaagctctccgcgcttggtctcacattctgtataagaaacatgtcaaaacaaagagaataaagttcag

SEQ ID NO: 27379 - DNA, 1031 bp, Arabidopsis thaliana landsberg
taattccttgatgttccactaaataagctgcattctaatttctcgaattatgctatatcaagaaaagggtggtgtgttgtacttatttacacaggatttgcagacagaactcccacctccacttctatcaagaggcctaagagagagctgtaacggtttggaagaaacaaaaactcggataatgtaagaaacttcccagccttgttgtttcttgggtttctgaataacccagagtccttttcaagattcgaaatagtggctgcaacaaagagggaaacaaagtcaattcattaaaagtctttatatagaatcttgattttgctttgtagttttggctcttacgcttcaaggtttgtatctgagacatggtcaggctaaaagtgtagataccacttctccgtgggttaatctctgaaactactgatgacagatttctgaagcttgtttcgatgacattagtgctgtttataagatcaaaggagctcatacaaaagggaatcttgtctttagacatctggacattgcaatcaagaatatcagccccgtcgcttgcagctctctgatacgccaagtcagtacagcccgggaaatctccactcgctccattcttcgagataatagttatcttagctgcaatacataactgttaaaatgcaactaaacgatttagtgatcatatgtttatggttttctcttgtgcattaccttgctccttagctcttttagggtccacatgagagaagcaatcttggaaagaaaacaagaatcataaatgtagctatatgcaatgcaaaactagatgaagaaacagaaaaacagagtgttttttacttactgatggctcgatatggagtcaccgggaagtctgataggaaaccatcaacggagaagtttccgttgtcaatgaaagatagatactcagcccgtggatcatagctgtagttataagcaattacaaaatcattggcaaactccgaggcgaaaacttgtaagccttctttatgagcatctgttacaagcgacgtgtgggg

SEQ ID NO: 27380 - DNA, 1625 bp, Arabidopsis thaliana landsberg
tttctcattcctattctgttatctatttcttgaaatattcctcagcaacggaggcaccgagtgtcaaagccagtcatcatacacgttccaactcggatttcacagatcaacctgcaccaccatccccaacatcaacagatggttggggagatgctgagaatggcattagcgaaggtcatgagagtgacaaagacggttgggatctcgaaccgctggatgaaccaaaaccttctccagctcttgctaacattcaagcagctcaaaaacgacctgtgtctcagtcctctagaccttcaggtatttttttaaagctgaatctgtttgcctcaatgtaaaactttctaaaattcatatggttatgtgttattcctcctctttatagctgcgacaagctcaagaccaaagattagcacagtgaaagcagctgcgaaaacggaagacgatgatttgtggggatccatagctgctcctccacctgcaactacttcaagaccgttgaacgtgaaaaagacagtacagtctgatgatgaagacccctgggctgccattgctgctccaccaccaaccaccagagcaaaaccgttatcttctggtcgtggccgaggagccaaacctgcagctcttaaactaggtgcccaacgcattaaccgaacctcatctggaatgtgatgaacactaaaggaagaagataagcagcatacaatgtacatttttttgaaagcatctccagatgacccaagagctcaagccaaggaaccaacgaattatttgatttgtaaaatcattcattttaaaccataagagtgtctctatttttactctacactaccaaaaagagagtgtttattctgagaagtagaagtgatgtaagaacatcatctattcagaatgtgatcttgttcaagttgccttgtcctcatctaccatattactctttaacctattcaatacgttgaatatctcagccttcattggagaagatgaacctcctgaaaagaaaacattagttctatcgctaacttcaatccaactgcaaccaggttgtttatgcaagcctttctccttcatcagacccaacagctttgctgcttcgttcttcaatcctgcttccatgtaaagattgattagctgaacataggtactgcctctttccggttccattctcaacaacttctcagcagacaatatcccaagttctacattatgatgagttcttgaagcagataagaggcagagccatatgctactgtctgcttcaataggcattgcttttataaaactgtaagcttcttcgaggagacctgcacgtcctagaagatccaccatatttgcataatgttccatatttggttcgattccatagtcttgtttcatgaactcaaaaatgtttttcccttcctccacaaaaccggaatgattgcaggctgaaatcagagacaggaatgttacatcatcgggcgattctcctgcctttttcatctcatcgaacagactcaatgatgtaatacaatctccatgggatccatacccatatatcattaggttccaagtgatcaagctcttatgctgcattttcttgaagatggtctctgcatacatacgaaacccgcattttacatacatat

SEQ ID NO: 27381 - DNA, 1184 bp, Arabidopsis thaliana landsberg
ccgttcattccatgaatatcactactatctatctctttgatctttatgtttttcactttttccacacgttaattcggcgactaggatcttaaaaggaacccaatgttgcaaatcttgattaatgaatctttcttttgcttaggttgctaagattatagctcaacctttgtttttgttttcttcttcagttttgaatttgaggagtatataaactgtttctctaaggtcaaacattaatatttgactaagcaaacaaacaaacattggtgagataaatactggctttaatcctgagatcatttttgtgtcaccatttttagctcatgtttaatcgaaaaaagaacaaaataaatatgagagagggagaattgaatggtatattttcgtaagctaaatatacggagatactcaattttatcatcggatgattccataaaatatcaactaattcaatctacataaattgactcgtgatctcatttgctatatctcattatcatatatattttgaacaaatcgaatcaattttcttgataagaattcagtaatttaggatgtattaattatttataaaatgaaattggtgtgtatgacacgccttacgatgtgacagacagcatcccaattatcaaccgtccgatattaactgtacgaaatgccttcaaagatcaacggtgtaaactcttcgtgtacgtacaaagactaaaaagcagtgtgtacattagcaaaaacaaacacccttggacgatagcaagaaaataaaaacaagccgcttctccctcactcactcctctaaaaccagaaacaaaaaggcaaagacgagagcttaattaatggcttccccgacgataagaaccgtcgcaagttacaacactcacctagagtactccgtcgatttctttggagacgagttcatcgtcaccgtaacgtgggattcttccgtcatcagccgttggattcgcaacgtcctcttcaacaaccgtttctcctctcaccctctcgtcgttggagttggcgtccagtggacaccgtttagttattactccgatccaagaccgaataactactacgccgatcctccgccgataagatactactcagataatccagcggatattctccagttatgcgtgggtaatcgatgtctcatcatccagttaggttactgtggaccagtacctaac

SEQ ID NO: 27382 - DNA, 1498 bp, Arabidopsis thaliana landsberg
taaaatcttttgacaagttaaaaaaaaaggtaatttttcttttccggtcaaaaataaatgatttgttgtccggaaaacttaactattgactatcaacctaattgtattttgtaaaaacaattcttacgtttcctttgtttacgtgccactatagtcatttatttaatttatttttggtcgacatcttatgttactcgataggttcaaattaaatgaattaaaccgaataaacgttgtttacatatgaaatagaatgtgcgtgaacacgtatagtggttgccatcagctttagaattagttagtattgttaaatatacatgatcttacttcaatcaattaatcaaccacacatgatacaactattaattcttaaagtggtttcccttttgagaattgagggcaacactaccattaagccaaaaatgcaaggggagattatacttatttgaagaacgtggccaagatacagatctttattacgtatagtgagaatctttcttctcataaaagaaataagaaagagaagaaaaaaacgagttgccatatcatgtaaactaaaagtcttccctatcgaccatcatccatatcttccccaggtcaataaataccatgaaatttccctaacatagatcactgcaccaattaaccattacttacttctcaggtaatctctctaccttttctcatatgattatagttagtatagtatttggttacattatatatgataatctttttgaaactatttggttacgtttctaatcgcaggtaataaatcgtaagatttatcaaacgcaagcaaaagagatggcccaaaagctagttgcacagggtggtgagacgggagatgtatgggatgatggtgtttacgacaatgttacaaaggtatatgtagggcaaggccagtatggtatagccttcgtcaagtttgagtatgccaatggttctgaagtggttgttggagatgaacatggagagaagactgagctaggagttgaagaggtactaaaaaagattgctatgttgtgattggtcaagagtgtctcttttctttgttgcttagctttccgcattgaaaattatatggtttctttgtagtttgagattgattcggatgactacatcgtctacgtggaaggttaccgtgagaaagttagcgatatgacctcagaaatgatcacgtttctttcattcaagacttctaaaggcaaaacctctcagcctatcgttaaaaaacctggggttaagtttgtgctacatggtggaaaaatcgttgggtttcatggacgttcgaccgacgttctacattccctaggggcctatgtttctttgccgtccactcccaaattgcttggaaactggattaaggtagtaatcacttagatcaacacacaaagatctcacacaactatgtatattgaaggttttgtttgttagcaccaaaaatactaaaccacggacgcgaaagaaaaaaaaagagagggaaaaattggaattt

SEQ ID NO: 27383 - DNA, 1800 bp, Arabidopsis thaliana landsberg
ggaacatatatgtaaattccacttgcgtgttgcatcttctaagatcacgttgcaactactcttaaagtttatgatgaaagtcggaccatgccttttattgtacacgttgacctgaagatattggcgcgatatctgttaccgtgttagattattgagtttaatcctatagtattcaatataattatataagcgtgtatgcaatgtgtgtgtaaaccggtgtatctgtcagagaagttgtgttgtctcaatgaaatacaaataatgcttcagattttcttattattctttcctcacctcggagttctttgtctaagtcatttcgatctgatcacaatcaaaagtcttcaattatttcctcctttcgcttttgctctaactaaaaggtatctttgtattaaaagctaatgcttctaaaatagtatcagaaccttataattgatcaagggttaattgaagcacaaagacaagcaaaattcctgcaaaattaaatattatggcaacaacaacacatcaactgatcagcgatccctacattttgtggaaaaaattatgttttttggtgtcttaagatgaaaaccatcataataacaagaaatttgtggctggtggtagagaacagtgttccggtcttccggaccaaccaacacatttagaagtgacatctgaagcggtgcaattgaaaaatcaatggaacgcagtatcaatgaaggatatgatggcactgcaacttctgcaaacaattgtgctggactctatatacgcacttggttacacttccaaaggtgcgtgtaagcatgcaatctattcagcccacgttctctctccgcccgtggacccacctttcatccgacaatcgataggctacgtctcgaagttctaaaatttttgtttaccgatcctataaatcatcacatgaattttttttgtttttagactcattttttatctgatagtagatatattatagttagagactttaaagatttgtttaccgactctacaaatcatcatattattttttctaaggtttcgacaattactttccagaaaatcactcatcctaaaaatgatattaacttcacaggacatgttatatggtaggacgagttttggtcgatattactacgggtgaaatcctagaattagtgggtgattggttgggctgtaactgtagaatttttgctgtagaaattttgctgtaattgtgttggctgtagctgtaacttttattgctgtagaatttttgctgtaagtttttaactttaaatatttataaaaaatggattagtaaatataatagttgtaataaaagtttttttatagtaaataaaatgccttatattattaatttaaatatatattatgatgatataaaaataaaaaaactcctatgaattcttaataaaataaatctaaattttatctatgattattccataaattcattgcaatataaatttttttttttaggtttgataattatcagtttttttttagaatttatctttgtttttgttatatatatattttgataatttttttttgtatttatctaatgaattaaaatttctatagccaagaaaatagggctttgagaatttactctaatacagccttaaaaacaaaataaaaaaatttggcctgtaagtttaaaaagaaagctacaacaccattggtttgtaagttagcaagaaaatagggctttaagaaaaattaaggttgtaagtcaaatttaaagcaaaaccaatcatgcacgagtttttacagagtggacatttttgaactgttcatttttttaga

SEQ ID NO: 27384 - DNA, 2281 bp, Arabidopsis thaliana landsberg
  unsure (1)..(2281): unsure at all n locations
tgtaaaagaactggaactctaacaaacccatcaacacaggccataagaagtgagtcaacagcttattttcgttggttacatgtgtcagagttggaggaaaaatatttgaaacaaaaatcaaaacttcactggctcaaagtgggggatggaaacaataaagctttttacaaggcagcaaaggtgcgtgaacagcggaattcaattaaggagatcactcgttctgatggcacaactgcggatactcatgaggagatcaagaaggaagctgaaagtttcttccatgattttcttgcacacaagccagcccaataccagtgtataccactcgaggagttgagagatatctttcaatatcacgtttcagaaccggatggagcagtgctgattcgtgaagttaccgaggtagagattaaggaagtgttgttctcaatgccatcagataagtcacctggtccggacggctatactgtggaatttttgaaagagacatggtcagtcattaaacccgatttcattacagcggttcactcattcttcaagtatggtttcatacctaaaggagtgaacaccactatactggctctcattccaaaaaagaaagtggctaaggaaatgaaggattatcgccccatctcttgctgcaatgtgatctataaagtcatatcgaaaatcatagccaataggctcaaacggttgctaccaaacttcattgcgggcaatcaatctgctttcgttcaagataggcttttgctagagaacttgctcctcacgacagagctagtgaaggactaccacaaagattcgatatcgggtcgttgtgcaataaaaatcgacatttaaggctttcgattcagttcaatggtcttttctcaagaacgttctctctgtcatggattttcccccataatttattcattggatcatgctctgtgttactacggcctctttttcggtccaggttaatggtgaactagcagactacttcaaaagctcccgaggattnnnnnnnnnnnnnnnnnnnnnnnnnnncctctttgttataagtatggatgttctctctcgcatgcttcaaaggcggctgatgcaagaaaattcggctaccatcctaaatgtaaaaacattgggctcacccaccttagctttgcggacgatctcatggtgttatcagatggtaagactcgatctattgaaggaatagtgtaagtgtttgacgagtttgctaaaaaatctggattgcgtataagtatggagaagtcaactatatacatggcgggtaaccttggttcacatcagcgagaaattcaggaaaagtttcactttgaggttggtcaactcccagtaagatacttgggtctaccattgcttactaagcggctcactgctacagattatgctcctctgttagaacaacttaagaggaaaattgggtcctggactcataggtacctctctaacgctgggagactcaatctcatatcttcggtcctctggagtatctgcaacttttggctcttcgctttcaggttaccacgggaatgcatacgagacattgacaaactctgctcttcttttctctggtctggtcaagatttaaacccgcgtaaagctaaagtatcctgggatgatgtttgtaaacccaagaaagaagggggtttagggttaaggtctttgaaggaggcaaatgacgtttgttgtcttaaagtggtctggaaaattgtctctcatggtaattcgctctgggtcaaatggatagaaaagtttctattaaagaacgaaacatttttggtttgtaaaggagaacacaacattgggctcatggatgtggagaaagcttattaaattcagggagaaggcaaaaaacttttgtaaggtcgaagtgaacaaaggtaactgcacttcattctggtatgatgattggtcaaacatgggtcaaatggttgagaaagttggggatcgaggaatgattgatatgggaattcagcggcaaatgacggtggtggaagcatgggataaacgccgacgtcgcaggcatagagctgaaattctaaatcaaatggaagaagcactagagaaccaaaaacaaggagaagcgacatagatgacaaggttctatggcagggaaaaaacgatgtctacaaagcgagtttctccacaaaagaaacttggcaccatattcgttcaaaggcttctgaggtaaactggtatcgcaaaatctggtttcatcataataccccgaaacaatatttttgcgtctggctcgcagctcgtaatcgtcgcttag

SEQ ID NO: 27385 - DNA, 1418 bp, Arabidopsis thaliana landsberg
tcaagacctgtaaaagcctccaactagttacatttcattttattcttctttatatatatatggaatttatttatttttttatactctattaataaatataacagtttgtttttctttttaagatatccgtcattgcaatataagtcatatcgacatatgtcctgttttctcagccatttttattgctttataagtcaacagctttattcccacaattatatatagtcgtcgttttattttattaaaagttctgaatcatttcaataattgctgattttaaaattcatttattaaaattaaaaataagataaagtccaaaaaacattaaaaaaaagctgctgatatttttctttgaaaaacgagaaaaatcatttaatagccacactgattggaagtataccaaatttacaaaaaataataatcacatcgaaaaaaaaaaaattgacatcaaaatatttttctcgaaaacaatatttatttttcactgttacataacattataaaaatgttaacgtggtccccacgtggcctacacgtgtcagcatcaagggttccactcgtaataagaagacaccataaagggtattttagtcaaatcacaaataaatcccaatctctacctgccctctgttgtttcttcctctcctcttctctcttgcacataagtttctctcacgttctcttttttaattttaatttctcgccggaaacaatctcatctcccggcgaacgaaacttccggtgtggtactgcaaacggagaaaaaaataaccaaagaagagagaaactcaaaagctactaagatggaatcagaattccagcaacatcacttccttctccacgatcatcaacaccagagaccaagaaactcaggattgattcgttaccaatcagcaccaagttcgtacttttcgagtttcggtgaatcaatcgaagagtttttagatcgacccacaagtcctgaaactgagcgaatcttatctggctttttacaaaccaccgacacaagcgacaacgttgatagtttccttcaccatacttttaacagtgatggaactgagaagaaacctccggaagttaaaacagaggacgaagatgctgaaattccggtgactgcgacggcgacggcgatggaggttgttgtttccggtgatggtgaaatctcagtgaatcctgaagtatcgattgggtatgtggcttcggtttcgaggaataagagaccaagagagaaagatgatcggactccggtgaataatctagctcgtcataatagttcaccggccggattattttcatccattgatgttgaaacaggtttgactcttttctttctagttttagaattagacattatttcgtaatctggagactttttctggtaacttttatgagaatatacttaggaatttgataggggg

SEQ ID NO: 27386 - DNA, 608 bp, Arabidopsis thaliana landsberg
cttctcttcttttagtagggttggtatagaaattttaattatatccggggtaaaaacataaaaagaagaagaaactaggggtcaattggtattttataaaatggacatgcatgagttgatgttgcgtcacgtggatcaggaattggagcagcttggaaggtggctaacgtggaagaaggttccactgtcgttatctttggccttggtgctgttggacttgcggtacatttatttcaaattaatataaactatatatgtgatgattttgtttaactttaacaacaaaataatataaagatcttgtagtataaagtaatttgtgggaagttatcgtaaacaggttgcagaaggagtcagattgcttggagccgcaaaaatcatcggtgtggatctcaatcccgcgaaatttgaaataggtttgattggtctaacttctgcaatattttggtttacctgatttcctaatgaaatcttactaattagaacactggttaaatttacatgattcgtatttttaatatatttaacagattcaaacaatatcgcaacacaagatatacgaatttgaattcaaaattttttatctgatccgaactccaattgtttgg

SEQ ID NO: 27387 - DNA, 1648 bp, Arabidopsis thaliana landsberg
  unsure (1)..(1648): unsure at all n locations
tgtaacgttttacacttatcaacacataatatatctctcaaatctcgatttcttttcactaattagcctttccagatttccagggaccgcttgcaaggtttcctaggattctaggacacgaagcagtcgggtaagaatcttctttatttacttgttttactttcttttttcaagaatttttaataatatcttgatcttgttgtaatctagtgtgatcgagagcattggtgaacatgtgaatggatttcaacaaggtgatatcgttttgccagtgtttcaccctcactgtgaagaatgtagagattgcaaatcctcaaagagcaactggtgcgcaagatttgccgacgatttcttatcaaacacgagacgatatggaatgacttcaagattcaaagactcctttggagaagatatttatcattttctctttgtctcgagtttttctgaatatacggtcgtcgacatcgcacatcttgtcaaaatctctcctgatattccggttgataaagcagcattgctcagctgcggtgtttccacaggttacttcaatatttgttgcgtagagaaagatcaggggtgaaaacatattttcaaatatttttgggggttaaagcataaaaagaagtagaaatcaggagttaggatggtaattttaaaatatcacgtggatcaggaattggagcagcttggaaagtggctaacgtggaaaaaggctccaccgttgcagtttttggccttggtgctgttggacttgcggtatcaatattttgtgtccttcaaatgaatgaatttgtatacattagattgtttttggtagtaatattagttaaatgatttggtaacaggttggagaaggagccaggctgcgtggagccggcaagatcattggtgttgatctcaatccagaaaaattcgagctaggtaaagtttttggcttacacgttgggtttggtattatatcttacaaaacactaaaagtactagtttgtagttggnnnnnnnnnnnnnnnnnnnnnnnnnnnnnnnnngtctaggctgtattatttatttgtcaaaataaccatatccgaatgtcgtagtttagtcttttgttttgttataacttataaattatattcccattgaatacacatggttgcaaatatgatatgttttattctataacatgattaagagttttattctataacatgattaagagaataaaacaaaactcaagatatataacctaatgtttgtgtactaggaccgttgatgcgtcaacatttaatttcaaatctatatgtaataaaatatcatttgacataaagataaatattggataaacaaatgctatttttgcattgaaaaggcattacattattgaaatttacatttgagattgcagattaactaatactataatatagagcgaacaaatattcatcatgtaatacattgaataggcaagaaatttggtttcacgagtttcatcaatcctaccttgtgtggagaaaagaagattagcgaggtatgttatttaatatcttacactgtttcatatataattcttagatttacatgagaattatgtaacttttggttgtaattgatcactaatctatcccaaacgaatttaatttatttttttggctaattttgaaaaggt

SEQ ID NO: 27388 - DNA, 1856 bp, Arabidopsis thaliana landsberg
gtaatttccctggagcaaaagttgtgatctcatcaccaacctggggtacattgtttttactacaaacatttttgagtgatctggtttcatatttaaccgcctttatcaactgacaaaataccacatcaggtaatcacaagaatatcttcaatgatgccaaagttccgtggtccgaataccgctactatgatccaaaaacaattggtttggattttgagggaatgatagcagatataaaggtttgtttgtcctagaaggctatgttttagttgacattgctttatatatgcatcaacaaacaggatatcatttatgtgatgccaaagtgagtatttgtttgcagttatactgtctgtgtgataaaacgagtacttgtttaaagacaacgtgaaaccctgatggattataatggttaatcttgaatttctgttatgtaaaatgtacaggaagctccagaaggatccttcatcttgcttcacggatgtgctcacaacccaactggaattgacccaacaccagaacagtgggtaaaaattgctgatgtcattcaggaaaagaaccatatcccatttttcgatgttgcataccaggtatccccctattcctacatttccgaatatcgtgtttccgagagaagtaagcgaaaccatattatgtaacgctacatgcacctcttttccccggctttgctagtggaagccttgatgaagatgcagcatctgtgagattatttgctgagcggggaatggagttttttgttgctcagtcatatagtaaaaatttaggtttgtatgcagaaagaattggggcaatcaatgtcgtgtgctcctcagctgatgctgctacaaggtaaaacttactctaaattttcttatcatgagcctgttgcaagtgatcctggagtctcagtttctatctttaccgtcacgaaccatatctagctacaggttttatggaacctttaccagtaacactacttgctttcagggtcaagagccagttgaaaaggattgctcggcctatgtactcgaatccaccagttcatggggcgagaatcgtggccaatgtagtgggtgatgtaactatgttcagtgaatggaaagcagagatggaaatgatggcaggaagaataaagacggttagacaagagctgtatgatagcctcgtttcaaaagacaagagcgggaaggactggtccttcattctgaagcaaattggcatgttctctttcaccggcctaaacaaagctcaggtatgccaacaattttaatactacacagattccctttggccttgtttagacttgtggtttgaagtttgtgctgttttcttttggtaacgagcagagcgataacatgacggacaaatggcatgtgtatatgactaaagacgggaggatatcattggccggattatctctggccaaatgcgagtatcttgctgatgcgatcatcgactcataccataacgtaagctgagcttccatctcagtagatgacaataagaaacagttttatataccctttttagcttcttcttgatctttgattgaaaccagatggctaaattaataagctagcatcacactatgattgctagacaattttcaaggaaacttttgatttgatcgtgtttgacaggccttgttgtattgggagactcccatcgagttatagaagaacttgttacgattgtattttacataatttcacaactatacttgaccggaagagttacaacagaaatgatcagattgtacagtgtgatctatcttaataccagcgcaattccacattgtctgctataagaagcaaagactaactatcacattatcaaaagattcaaaaccactagat

SEQ ID NO: 27389 - DNA, 1703 bp, Arabidopsis thaliana landsberg
  unsure (1)..(1703): unsure at all n locations
cagcgaaatgaagagcacacgcatcatctagattggtgtggtcctctttcaaaagcttcttgactaactttatatcatccgagtcaagtgccttatgtacattccagacatgtttctttactttaggtacctccaaaccaagctctttacgtctatcaattatctctttaacaagctcttccggcaatgacttttcaagactaaccatatctacattagacttgacaataatctctttacatctatccaacagcttcatacaagctttaccacatatattagcaagcttgagtataaccagtgtgtcctctataacaactttgtctacaacgtccaataagtgcctctgaaatacaaatacaagtactcaagtaagaacatattcatgaatgtgcaaccatagcttatacagatggtgttttacctgatagagagtaactaattcagggatcctgaagatgaaagccaaatagagaacctccaacatgaaatccaccgccggacggcaagccacgtggcagcaattctcgtctgcgcattcagaaactcctttaggcggcggcctcactctgctgctgtaaacataagccaaaacagtcacaaccgaatcnnnnnnnnnnnnnnnnnnnnnnnnnnnnnnnnnnnnnnnnnnnnnnnnnncggcggtgttgttggagtctttctccttcttagcggcggctaaagcgctcttgaagaaagagcttctcgctgacaaaacgcaccggtggaaagaaacttcccggccgtcggagagaacaagcttagcgtcgctgtagaaatcatccggcgagtcaaagacggattcgaagctgttggagagcaattgcagagcagatacatgaggtccggtgagtacttgttcggcggccagataaacaatagaggagtcggtgttatcggtagcgacgaaactagtgctgctgatttcataagaatcggcgaatccatcaatggtggtgtccatcaacaggttccgatgaattgaaattcacaaattaaagagatctctgctaatcaacgaagagaccttatcaactggatttggttaaagatcgaagataaccattgacgagcagagccaagtcaagtcaacgagagtggtggtgagatatgaagaagcatcttcgtcccacggtttacatttcaccaaaaccggtaaatttccaggaaaggaatctttgtcagagatcttttttaaaaagatataacaggaaactaaaccggttcgggttataaatgttagtatttataccggagacattttgtgttgctaatttttgtatatgagaagttcaatccggttcggtaagcccctgaaccaaactagatttggagatgatataaatatataaaatttatttttcatccggttcgttattttcatatcaaatatataaatattagtttttaaatttaagaattagatttacatgtgaaagttacatttctgtttattttctttgaagtaaaatgataaagggaacgtatattaagtttcatgctttattcacataaggtttgtaatgcatattatatttttcgtttattgaaaaagtaattttcagtgttcagcatgtttacactataattgaatcaagtcgaatatttcctggaactattctccttgttctatagaaaataaaaacgctcttcacaacaaaatcattatagatataggaata

SEQ ID NO: 27390 - DNA, 1414 bp, Arabidopsis thaliana landsberg
  unsure (1)..(1414): unsure at all n locations
cacaatctacagataagttaagattttcattcatggcgctgttttttttctaataatctcattcactaatagggtgggaaaactggtgcggttactaccttgtgtaggggtggcagtgatttgacggcaaccacaattggtaaagcgttgggtttgaaagagattcaggttcttctacaatctcaaagtgtaatgttttctcttcaaacgttgcataccttatgttcagtttggatgtttgtttttccattgagtaggtgtggaaagatgtcgatggtgttctaacatgtgaccctactatatataagcgagctacaccagtaccatatctgacatttgacgaagcagccgagctagcttattttggtgcacaggtcccactctacttgtatgcaataatactcaagtgtagttattagtattgttacatgaaaatttgtatgttgtaaatgctcgagtggttaagtaaggaaattcacttgttgctgcaggtcttgcacccacagtcaatgagaccagcaagagagggtgagattcctgttagggttaaaaattcttataaccctaaggctcctggaactatcatcactaaaacaannnnnnnnnnnnnnnnnnnnnnnnnnnnaattgtgttcttttatgaatctcatgtgagaaccttcatagcaaacaattttgttttttgctttttcatgacagagtattctaacgagcattgttctgaaacgtaatgtgaccatgctggatatagcaagcacccgaatgcttggtcaagttggctttcttgcaaaggtaaggatgtacactttttcattggcatggtctgaactgtgggctgctccaccctgtggtcgttttggtgttgttaataatcaacactgcctgcttgcctcactctttttactaggtattctcgatatttgaggagcttggcatttccgtagatgttgttgccactagtgaagtcagtatatctctgacactggatccttcaaaactttggagcagagaactgattcaacaggtaagttcttgtagaatccccaatacgtgattcccaattcatttatgcgtgcttttcaaagtccttttttttttttttttttcttgttacaggagcttgatcatgtagttgaagaactggagaaaattgcagttgtgaatcttctaaaaggaagagcaatcatctctctaattgggaatgttcaacattcctccctgattttagagagggttagatctggtctcctaataagattacttcaagattctaacaaagaaagatatatttcttgtgcgcttcttacttaattgttttaactttgggcaggcgtttcatgttctttataccaaggtgtcaatgtccagatgatatcacaaggagcatccaaggtaacattgcttatcacaaaac

SEQ ID NO: 27391 - DNA, 1844 bp, Arabidopsis thaliana landsberg
gcatattaaacacttacactatttgctttcttaaggtatataataccgttacgattaattaaaaaataggtatgtagagccaaaacaattgtggtgtcaagagggaaaatcatagacatcgaagtaggtacggtacgtacgtaaaggggttcctcttttctaatatgattcagagaatcagaggtcatattggtaacaaaaaattgttatgaaatgattgattagctagaatatgatttgatgactccactttttggtcattgatttcccgctttcttttaatgttaaatatgacttgatactacatctgaattgttttggtcatatgaatctttaatttcgaaagagtatttataattttactttgtaaatacaaatttaaatttattaaattaccggtgagttagtaattaaaataaaatagacaaccagattattttgaaacacgtcaattattcatagtgtcataccgtaaaaaaaaaacagaaatgtctttcttacggtatatgtcattacgtaagataattacaaccatgagatcgtaaaatgtatgaaattgtcgtcaattgatatttagtgatatggttcttggcttctttcaattgcacaccttcactcaccattacaacatttacttttgagttaaactattcgtttgtctctgtcaaaagcaacttttgtatactgtttcaaattaaacgtatttagaccaagattacaacgttttaaaaagaatagactaaaacaaaacgaagatcgtcgatatctaattccatcattaccaagatcttgccctttttcacaatttttttttctctttccgttttctttttggggtttcattttctaatacaacgagggttatcttctcttacaacactactccaatataattgtggagttcccatgtttttaatgcaagtgttttgtttgataattgataaattcagggcgatcgtgtcctaacgaaatctagatattcgtgggtccattcaactactaactttgtcgcttctttttgtaattttccaagggtcggctgatttgcattattgattatacatgcatgtcaaaagtaaagaagccttaaacatttcactagttaatatttaaaaaggtgttacttatcttcttcaatcagatccaactagctatccctaaaataaaatgtctcaactaaattttgaaatctatataagaataacaaagtaaacattttcatcacttaacacattgctaaataatcatgaaaggttgaaatgttacattttaatacattaatgacatttttattttctgtagctttttttttttattaacaacatgcataatgataatttgaaattaagtttggtctaagtctaaccaaacctgaaacacaacttaaccaacaaaatcttttacctcctctcctgctctatcagaatcttactagttatgtgtccagtaggcagtagcattggctaaccctcgtataaggtagttctgataattgcatttatcaaatattatatgtaacaacatgcaacaaaagtgatatatttgggacattttcactgatcaaaatatcccaaaatgaagactaaggaagggtccaggtctaaggaaaaatagagcccgtacacaagatttgaccaatagaactattttaactttaaataaatatatatatatatatatatatccataaaaagcattaatcagattccattttgattgatatatatgataaaatatgtaaacttacaatggcaaaacaaaagtacaaacgaggacactaaccgtgccttcaaacttttgtttcacctaacgatctcactctaatgtaattcatctaagtcttg

SEQ ID NO: 27392 - DNA, 1203 bp, Arabidopsis thaliana landsberg
  unsure (1)..(1203): unsure at all n locations
gcatcgggtgtctgctttccatgtttctgtcaccataattgacatatctatttattaacaatcttcatatttttgtcacggtatactgtaagttttctttaaccacatttttttcatcaaattttttatcgtttggctaaaactataatgaccaaccaaagtatataacttttttaaaaagttacatatgatttttttttgtcaaagttacacatgattattgacaaagaactacacatgataatgccaaccattacttataaacaaaatatccagaaaaaaaaagaagaagaaaagtagtcagtgaaaaggacaacatgtacaataatattcaatggttaatcacgatggctaaaatgatccagctcacgtgattctcgtggatgatgtaattacaaaacgactttagacccactaatcgtacactaacatatgattattaacattacataataaaatatctctatttcttgccagttttcttacaagacattgataaacatgttacatgtcacagaaacattgtatcaagtaaaaagttttactttatcaaaaaagaaagaaagtaaaaggttcgagaggaattagtgtagataacataatttaataccttaatgtacttccataacaagtccatttttttggagttaacaattattttggttttcaattttggacaattctgtcttcatctttcaagcgatcctctttgcgctaataacaagatggagaaaatcatgataaaatttagcgatgaggtttaatcctttttcattttctgttttatggttaagttttgtgattaaagaattagaagttttttacaggatttagactatggttagagtttacatttgatttagaattgtgtgactttgatataaaaataatgacatctacgaaattacgaaatacaaatatgggcttattcattattgggccatacaagcccatcgagtttagtattgatccgctaatcaaaaaacgtaaacaaataagataacagaaaaacaaaaacaaaaatttctgctttgaagaagaagagtcgatccataatcgccactttcagatttccagattctggggaaacatctctaaactcttcaacgatggcgactgagaatctcaccgataagaatggtgntntcagaaagcttgaatcaaaatccgagaacagggtagggttactcattttcgattttg

SEQ ID NO: 27393 - DNA, 1321 bp, Arabidopsis thaliana landsberg
atgaatcgcccaaacgttgatgaaaatcttggagtctttaggcacagtgtatcccgcaaccaccgaggtttcgctgtttctgtgtggaacaagaagaggaagggtagggtgaagcctaagagtctctttcataaccgcttgtagataaggaagcttaggtaaatgtgattcttcaacgatgttgtctttgccaataacttggtcaagttcttgtcggatcttgtttaacacttccggtctgctaacgatttctgccatggcgaattcggatgcattaaccgatgtgtcgacaccaccaagaaccatatccatgaggagagacttgacatgagtcatggacagaggagctttctcatcatcatctttaactctaagtaagtattgcaagaaatcttcttcttcttcgctcttctttcccaccattttgacgtgactctccataactctatcgaacaagagatcaagcttcttcacatggcctttcatctgcttaaccaatccttggaaatcgaatcttgagaacaacggaaagaaatctgagtagttttgaatcccttctatgtcggagatatcagatattagggttttgagctcgtttcctaagctcgttctctcgtctccttcaacagtggcgccccacatcattcttgtcacgacgttgaaaatggaaagaaatatttgctctccgaggttgactggtgatccttcacgagccatttccgacatgtggacaatggtttgtcgggtttcttcacggcgagtggagtaggaagcttcgagagttggggtagtgaacatcttcatgacgcagagcttacgaagtcgtcctccaatgggtactgtaagagaccagaggatgtcttcacaccgtaagtgttgatctttccgacttcagggagatcgtggttggcgaaagtgatgtcgtgggttttgagaacctcgcgagccatgtcaggggaagagacgacgatcgcaagtttggaaccgaggtggatcttcatgagagggccatgttttagggttagggcttggaattgcgtgtggaggacgtcagagtttaggaacgggaggttgccgacgatcggaagtggccaaggtcccggaggcaacggtggtccgttcttggatttggacttcccctgtatccagaaatagcaaacaacggccaagagagcggcgacaccgagcatcacggagctgtagggttcctcaatattgaggatctgcgagagagagaaattagaagacgccgtttccatctttggcttcagagagaaatatctcactgtgttctgattattggtttggaggttttgtgttg

SEQ ID NO: 27394 - DNA, 1121 bp, Arabidopsis thaliana landsberg
  unsure (1)..(1121): unsure at all n locations
gaagagtgtccggccatgaatctggaagttccggtcgtcgtattgattctcgtgccagtacaaaagcatcgaggcttgtggagacggtgaagatgacgtcattttccggttggcgatggatggttacttacttaattctggccgttgatatatagtatgtataaaaacagcgtcgtgatgtatatatatagtatactagtgctaatctcagtcacgtgattgtatttccttaaataaaataacagaaagagaatattaatttgagttaaacagcttccacaagtagtacaactgtctgtacaagcaagactcaagtttggaggaaagtgggatttttttttgttactttatatattgatttaatttgtcttaattagtttaggaacaataataaagactatattaggcaacatgcacgtacgtttgtgtgttttcgagatcccaatggtagcaannnnnnnnnnnnnnnnnnctaaaataaatagcattgtttaattatgcgtacaaacgaaattggctacatttttagttgcttcaccacctatacttgatcatggattagctcgattacttggctgcaggatgtgatatttgatattattgtaaagtgatttaagagtaacaataatcgattgcgtctaagattcagttgacaaactaaattgttttacgttccaactcacatcactttgataacctgtaaatcatgatttatcttttcacatctgcgttttcataagaaagtttgaaatgtataaaagatgcatgtcaaccagtaaatgatgataatgacatatttagtttagaaaactatatgcttatttctactagctcttcaccaagaccatcgtggaaactttgatcgacagaaaaaacacctcagctcttttttcaaatatttcagcgacattttagtagttatgaggaaacagtattagttaggcatggactaacatatcaattggcgagacagcaaaaagacaattagacaagacacggcacgaaacatacattatagacatagagtctacgacctaacacgtttgcgatgctctctcttattacctaacaattcgcctgcttacctattttcttaattacatcccaccatttttcacttc

SEQ ID NO: 27395 - DNA, 1402 bp, Arabidopsis thaliana landsberg
taaaaaggaaatataaaaatatcacatccatgcaggctaacgttcagttgactagcagcgataaaagcagataattaattctcacatttaattttattttattttttccattaaagcaaaaaccccacactctctctctctcttgctcctccctctcttcctctctctatctctctctgcaaaaaccctaaatttcctccgatttcaccatcttcaatctccttcacaccccaacttagcctcttaatcactccccaagctaaaccctccaacgattttccatgattcgaagatacagagccttagcgatgaagaaaaagccctaaaaaccaaagctttgatctctccgaaatcggagtttctttctttgtttggtaaatttggttttcgaaatgtataagaaccagctacaagagttggctcagaggagctgctttaatcttccttcgtatacttgtattagggaaggtcctgaccacgcgccgcgattcaaggctactgttaactttaacggcgagatctttgagagtcctcagtattgttctactcttcgtcaagctgaacactctgctgctgaagttgctctcaatgctctctctaatcgtggtccttctcactctcttgccgccaggatcttggtttgtttcgcttcctcttactctctttggcattttacttggaaaattgtgagctttgaatgctgaatttgcatgttgttttaggtgctttaggtcactgatgggtttagtttgtggttaggtttttacttattagggtcggtgctgagatctctgacttgctttttagggatttgggtttctgggttgtctgattagagagagtgatcttcacattcactgatctatggatccaaagtttgaatcttgttcttacccattgattggtttgggacttaaatgagtagaacaaataacttttgtgattttggatgcatgtttacttctgatgttttgcttgttgcatgactgatgatacttttcttggctctgttcttttggattatggtttgtgtaggatgagacgggtgtgtataagaatcttttgcaagagatagctcaaagagtgggagctcctttaccgcgatatactactttcaggtcaggtcttggtcaccaacctgtgtttactggtactgtagaattggctggaattacgttcactggagatccagctaagaacaagaagcaagcagagaagaatgctgcaatggctgcttggtcttccctaaaacaatgtgagtcctaattctgattttgtcagttttgatatggttttagtttaacgaaggcgttgatcaaacccaactccccttacatggtttgatgttttttatgaaattctaagtaacagtggcaaaagaaacatcaagttcaatgcctga

SEQ ID NO: 27396 - DNA, 1497 bp, Arabidopsis thaliana landsberg
aagcattaatgcttaaaaataataattaaattaggaacggttacacattcaaatatgtgttttgactgtagaatacaaaaacaaatacatacaaatatcattatctaatgttatgcatgagacactatatatgtatgctccacataagaatcatacaaagcttcactgtgattgctcaacggtctagattctgtcagagcctctctcttcttattctcatgttacattaatctttgaaccaaagtctttttgtaaccgtctctgtttcttcttcactctgctcgtaaaaaaacattgaaatcttcgcatcaatggggaagacaacgaatggaacaagagactgggctcagatctacgcaatctacgggatcgagcaaaaacacacactcatcttcctgatactcaacgcgattgctttctctatactctccaccgtctttgtcatctactttaacccgatctgcgtcttctttcaatcgtttctcttctctaacgccgcggcagctagattctcggctggattctttggagctgttacggcgctttccgccgtgtgtttgtttttcgcggcggcgaattttttttactctgctgtgccgcttaggtatgagatggcgcagaggatggttggatctgttggagattggtcgagtgtgaagaccgctcttgacttaggttgtggtcgtgggattttgcttaatgccgttgcgacgcagctcaagaaaactggtagctcgggtcgggtcgttgggttggatcggtccatgactactactctctctactctacgtacagctcacatcgaaggttcgttagttctttttttttacgttgactttttgacttatttcaaagtcgtttctcgttgaccaacatattattttgtagatttccgattatattgcgtgattaacgggttttaaaagtaattattcaagatatatataattattatcagcagatttatctagtggaaatttggcttagaggtaattttattatagttgagcattctaagaaatcaagagaaagtggataaaaatttaatcaaaactgatattgttaagttttttaaaactgtcgatttagtgtttatacatgtcattatttttatatggagaaccgaattttgtaggatttttgtattagattcacgacatgtatcttttgttttctttttttctttttcttgtcagtattattcattgattttttttagttgagatgtgtttaatttgtctataggagtacaagagtacgtgacatgccgtgaaggagacgtaagaaggcttccgtttagtgataactactttgacgtggtggtttctgcagtgtttctccataccattgggaaagaatacggtcagaagacggtggaggcggcggcagagaggatgagagtacttggagaagcggtgagagtgttgaaaccaggaggagttggagtggtttgggacttagtgcacgtgccggagtatgtcggcggtacaggagcta

SEQ ID NO: 27397 - DNA, 880 bp, Arabidopsis thaliana landsberg
cctgaaaatccaactatcaattgagtacaaaaaaattggaaaactataatttgaacaaaaaccaaattcagagtcaattacacaaaattaaggatttgttcaaactcactcagctgcgttcccgttttgcggaagcatatgagacagaagctgcaccgtcgacaacaagactaccattttccttctacttgcaacgaaaacatgactcgaacctacaaattatgcaattagccaggacaagtcgaagaaaacgaaaacagtaaaatagcaatggccaacgaaaccagaatccggtcttaccaggatcatcggataagcaacgaatacgccaggctcttgacgatctgacaacatgtttctcggtcgccggagagagcaatcgcgttttcgcgggagattcgaatttgcatttgaatttgaaagatgaaaacgagtcgcaccgaaacagaaaagtcttaaccagagaagcagtcgtcgtcgtcatctttaacggtgggacgagagtctccgagaccctagctcaaatttatgaaccgggagtttcattgtctacccacaagcgtacagtaagcaaaacattatagccaataggaacgtaggatagagagaaggaagaccacggcacgcattccgaatgtaaaacgacatggagttctgtgacagttaagaaaaacgacgggtaatctatgaaataattgatctcggaacgttacaaaactgagtgatggctattcttttaagatgtaacacaaaaacaatatacaacaaaacatggtgagccaaaaacctattatataagatactaaaaattggctaaaaagattgctatctcggaccggagagtctcacggcggagagataattctcactgttacaatcg

SEQ ID NO: 27398 - DNA, 1781 bp, Arabidopsis thaliana landsberg
atttgcttctacgaggcgagacttgaattctaggagatctcgctctgagctttatccttgaagatttagctgatgatcttcttccactagaaactaatgttttctgatgtttcttcttggttcgacatgcatcttcctcttcatcttctttctctttactgaccttcacagagagatgatgaggtatatgtgtttccttggttcggttacttgcacgacaggctttctccgttgaatcaaacttcgtgatctctttgaaagttttcttcttgaaatctctattattcatgtcgatgataatatcatcttcagaagaaatgactttcaagttggaagaggcagagagagaatcatggctttgatgaaatgttttgttaaaacctgcagatacaatagaagaggaaggaggagaaggcttgtaaacagtctttcttttgctctgtatgttgtgaagagagtttcttggtgaaatttgaaggatcctagattcaaaggatgtgcgtgagcgtgacctattgaagaagtaagaagttgaagagtaaggaagagactttgactcagaggaaggttttctcttcttggtagtgtttatggagtaaagaggaagagaatgcttttttctaggtttggtcatgttcttgagcttgtggaaccattcacttgggctcataactgacaatcttaacttatagttcctcatctctaatttcaaaaaataagtgatcttctcagataaaagagagaaaaaaaatatgtatagtttgcagagtttctatgtgacaaataaaagagagaagaaagtgtagaattgggatgtaaaagggacaagacggaacaaaattgggatccacttcatagaatgtctttgtttgtaccaaactcattccggcttctctccctaaccgaataaccaagttaaaccaaatcaaatcaaatttaaataaaatatcctatctaaaccggtgtaatcgaaataattgaggtgtacgtagatgagattgagaattaaaaggttttattagacttgaaaattgagcaacaaagtgtcctcaaaaattgtctgtcggtagtacgtcgattggtgggtatcaattagactaaatagaatatttctggtaaattgcttccaaaacataattcggcgaacgtgacaaagggtttcaacaaaagaagttaaacaagatttcaggttcatgtccaatctcttaatatagccatattcattttatataacaataatggtgtagaaggaactgtggagaataataaaagacatattcgcatcaaactcggcgtgtcgtctccttttcaccaattagcttgtggtctccctacctcacacgtgtgtgtttgaccaaagcttttttttttgggtcaacgactcatatttgaagctagggttcgacaaacgagcggggtcagtcacaaccctaacgactactactgatcccagtaaacaccgatatatttacccactcctcctactcataatgtgacaatatctaggtcagattatagcttaaaattaaatttgcaaaaaacattcaaattaaggctcaagttcatgggactccaccatcacgacttcgtgtcaaaggaaaagacgtgaaacccacgtaactcgaaccacccttccaaacctacacattataccacaacaacaacaacaaagaataaatcagcttcggaaggatcgagaatgagactgaagtcaagtttgattagcttgaaatcaaagctttcaaaatcatgcaacagattcatctccttcttccatgctc

SEQ ID NO: 27399 - DNA, 1193 bp, Arabidopsis thaliana landsberg
gaaacccgctcgagcaagaagcagtctggttcgtgtctctatggaatcaacagatgtaggaatcagttgttgcaagctgtcagaagaagggtctagtaggagactcgaaagcggtgaattgactcgtgcttcgaggaaatcagcgcctgagtcattacaatcgatacttatgttgcctttgagccgtccagcgagagggtagaaatgagttaaagtttcggataacgacttcttcagcatctgcaattgctcagttggtttgatgctgttgttagctgaatagaagaaaaccataggaccaaagatcgttggaccgagctgttctaaaagagagagtttaaacttctttaagtggtttggagttggagatgatggtttgatgatatctctggagacaacatcaactctcatctggtgaaacctcctgacgaaaaaccgactaagagtcatcgcagagagcttttcttcggtttcttggttagaagaataaacctgttgtaacagaaccttttaacagacaaaatccaaagatacttgcaggaaaatgccaacagatcctctgtatactaaaggacgaaatcattattccagaaacaatttttatattagagcaatctctttcactgataaactaagtgacttcagacaatagaaaattcgtgttttcataacaagatgtttacatgaaccaagtatacagacaaatcaagaactgaaaaaggtaaaatctcacactgtttaactgaattaaactagtcttaaagtcgaaaccagatacttaaatgaagcaagcaaagcaaagtaaatgtatatacctttcaggcgtaaaggaaacaaaacaaaacaataaaccgatttcttgttgaatcacgtaaagtgcagaaaaaactcttacttcgccattgaagcaacaatctcctctagctgtctccaggtttctccattcttctttttagtatcttctgctttttgctgatcttcttggaacttgtgcaaacattcttcgaataaatcaggatttgtctcggacaaaaccttgagaacattctctgtcaagttcttcacagcctgattccaatggctgctaccgtttttctccaaagcgggaaacactataggtaaaatgattctactgttctgtctcactaaattagtgacatgatcgttgttccataagtatagagcccgttcca

SEQ ID NO: 27400 - DNA, 1534 bp, Arabidopsis thaliana landsberg
actcgaaatcgcaacgtaaaaaataatatcataggattccttgagtttacaaacgccaaaatatattaatcgggggtttgaaagaagccaaacaaatataatatttttctgctagtcatcaaattggttatttggtatatagtgaaggagtattgaaaattgaaagggatagtttctaacattttttattaagcttgagatcaatagccaaagccaatgcatgcacatgcctgctgttttgtctttttcatcgtttccgctcgtactggtctcctattttaatttcgcttctcttcgttttttgtttgtttgtctgtaattgcacattaatttagattagtaacattttcaaatacttattaaagatccttctaaagaaaacaggtgaaccttaaaagtcttttatttttcttggtaagttcgagaaaaccatggggagcaaagtgccccttccaaaacctctctatgtttgtccatgcgactatccacctgttgatgacaaattctatcaacattgtgtgttatgttcacctccacaggattcatttaattattatctatacgtagatcaggatatgcccatatatataatggagtcgagtaggcatggcacatagttagtatcgacacgcgcgtaagaatgagtttgttcgcatgtatacataacaaatgcgtaattaggtaaatcttgtaattaaatatctgcgacaataaaacattttttttttctttttgttgaaggacaacagcaaaaactttggaggccaaaaactagcctatatcatgtgaatccatcatcggaatgtgcaaatcagacaaccactttcccaatcctcatgcatgcatggagtatgcggaaggggcaaaattggtgaaaaatgaaaagtaactgacagtcgaagcatatgcccgtagtcgtatttaacgaccgttaactaaatctgccactctgattctgaagctcagctttttatcgtaaagctgttaatctcgaggaagttctctagtgtgatatatctaccgtccgattagattcctggaccattttctgtggatcaaacaaataaatgagcgtcaacttacattttttgttttgttaaaggtacattttttgttttttgtttgtttgtttgaaacttacttaatttgtcattttaagaaacaaagattggtgtggcttggaatcgctttattatcctcggcttcctatgctcactttctgttgctgacgattctctgatgaacaacttgtgttttcttttttcttgtcctttagactttagtattactttttattcttatttaaagattcgagataaacatttttaatttcttcacacacaaagaaaaacatttataatttaaattccattgttagagctaatgagatcgaagttcgatcaaaatccgataagtatatgctagaaccttagagtattgttatgaaagacactgtcgataaattttgagtgtcttaaacctaccattcctaataattatataataatagatgacccttttgattaggtctata

SEQ ID NO: 27401 - DNA, 509 bp, Arabidopsis thaliana landsberg
ccttgagatcacagaacggctttattctttcaaaatcaaaataacttgaaaacagggaaaggcgctattaacaaggtaaagcattcttaccacatgtcatagagaacgcatttggagtcctcttatatgcatgaaatcagtcaaagtgcgaccatcaactggagaaagctccagtgacccgaaatctgctacctaataaaccattacaatgattacttgatatgtatggttatatatattttcagaaattaatatccgtaatctaactaaagacataccagccttggcaaagcaatttcatcatagtaaccatatgccatattggtaagctcttcttttgactgtatcacaaaaaatattcgagtaagcaccacggtgtccgtcagagaattaaaaagaaatcataaataaataaaaccggaaacttatggcactcgtggttgatggtgcaaattagaagaaaaactaacctttaaatggagaccagttccagtttcttttaggcgaga

SEQ ID NO: 27402 - DNA, 1502 bp, Arabidopsis thaliana landsberg
ctttttcagctggtaagattgctattacacaatcaaaagtatgatagtatcaagcgtacaaatttacgagctaacgtccaactttggacatgtaggcttgacataggacaaggaaaagaattgaaccacgaaagatgtccaagatcaaaactttaccaacaaagcatcaagtatcttggtccggtgagttttaccctctagtttctgtgcttggttgaccaattctgtagaaccttagatctattttcagaaaaacttggtagaccaatattattgacatgcttgttagatacctttttgtaatccttcattctttcttacaaacagacagaaagggaggcatatgaagttataatcgaggatgggaaactaatgtataagcaaagtgggatagttctcgacacaaaagaaggtcctcctgacgcaaagtggatctttgtcctaagcgtatctaagatattgtatgttggaatgaagaaaaagggtaactttcaacactcgagttttctagccgggggagctacattatctgctggaagaattgtggttgacgatggtgttcttaaggttaaagaaagaaatttactcgcttatacttatgcaaaagaagagatgttataagacactgcaaaaacgttttgtgttgagtttgagttcgttggatgatattttcaggcagtttggcctcacagtggacattatcttccaacagaagagaattttcaggcgttcatgtcgtttcttagggagaacaatgtagacctcgccaatgtaaaggtaagtccattctggtctgagttttaagtcaccaacatctcataggtttggctctggtttgtttttaggctatgattacatactttattttttatattctgtagaagaatccagatgaagaagatggagaagctcctgctaaggtcaagaggatgccttcaagaatcaaagagaccgaagaagaacattgtgactttgtggatgctgagaccggttttagtcccaacactaagcccaacaatcatgcagagctacaaacattatcaaggttccattcaaaactttcaagactggatgagattccagacgaagacgacaacatgatcgaggaggaacaggatgatgaagaagaacctgaaaccccttcagaacaagggtatgagacagcagaggagacactcacagctgaggaagagtccacatatccaaaatcaaacctgttcgatgaagacatcgaagactacgagaagcctgtcctgaaggagaagataatgagacggatagatccacacaaaggaattaaatcttaccagttagctgagcggctacatccgagatggagtacaggtgcagggcctagaaccagttgcatgagagatcaccctccagagctacaattcagggttctcgagcaagctcatttatctccaagagcttcttcaaattcttctaagatatctcccttcgccccggatagaacacgaggaacaagccctgggagaagt

SEQ ID NO: 27403 - DNA, 6048 bp, Arabidopsis thaliana landsberg
  unsure (1)..(6048): unsure at all n locations
caaaagaggaagaaaagccagttaaactgtcgtctttcataaggttataatgtacttggaagctgaaaaagtagcatggcaagtgaaagacttttactaaaagttgtgggaaaaaaacctgtgttagtgatattggcaattggcgccatttttgttggaaggcgcctggatctaaagcagctcttgcgttaagtttcaaaagaggcggtgatggtgttggagcaggagcggttgataaacccaaaccaaagagatcatcaaaaccaaatgattgtggggtagttgcggatgtggcagggccggagattgcaagctcttgcatttgtgaggttatattagaggagctttctaatgaaggggccgtgtaagcagaaccattgttattggaaactcctttattttcatccttctcgtcaatacctagaagcaggtccttgtcatttgcctcatattgctgagctggaacaatgtcgctggaggcttcaggtgtgatggaaatatttccaacttcgtcagaaaactcaaagggtcctcggtgttccttatccgtaaacatgtaagatggctgcaaaaagtcattttattatgaaaacatataaggaacacctctgagtaatgtaggctaatgaatgcatactactatattggcttcagtagtaaagtcaggaaacataccttctggtatatcacagaaaggctgttaaactcgtcaaatatacggtctttgatttcactgctttgagtgtcagcaaagactgaaaccgcctgttttggaggactaacaacacgttctgccacgtgtacatcgtattgcagaacccgatagtagaacaaggctcggtcatgaacatcctatgccaacagtaaatgttgaattagtgatctaataggccaatgggtttgaaaaaaagaaagagaaatttggaaggggagataggaagaaacctggtgaaaatcagcaatgcctgcagctagagctgttcctagggctttctgagtctcaggtgccctcttgaaaaagcatttcattgccgcagttaagagatgtaaccgaacctgctcaatggcacaaattgggaacatatactaatgagcaagtcctcattctcacgcataaatggaaccataatttcagtagcaaggaaaaacagaaaagtgatgcctaaatacctcggctgaatgctcttcctcccagttttctatcagattctccaaaacataaggagcatcactcatgtcctgtgcatactcacccaacatccatataagagccgccttggctttcggttcctggatatttttgctgctgatacccccaacaacagaaatgcagtcatggctccattgtggatacttccttagaaggtcctttacaagaacctagaagaggaaccagacaagtggaattgttatgaaaatgtaaacaatataagtatcaatgtgatggccaatcatctccgtgaatagttcaaatgatagtttaccaaagtttcagcggtcacatagtccttttccatctccagaaattgaagaagtctatcaacaatcgcatttacatcatactgttgcaaagcaatctttccaactgctcgaattgactctctcgcaattgcaatatcaacgtttgcagcatactcacacagttccgtcactgaaaagaaaaaagtacgaattagtccaatcaaagagccggaaaagaaaggttttctagcttcagattccatattgacatagtttgaaatcattaccgatttcgtaagtgttgctctcgtttgcaacagcagtcaacatctcaagcttcaactttttgacatatgatggttcattgtactggcagtagaaatgcttatagtctgcagcaaagatgaatggcgcacgaacaaccaaaagatgaaggtggctcaagattgcatacgattgctctggacttccagaactgacaagagttagaagtggggatttaatacgctcatatacctatacaagatcatttggcattagttagacagtgatcatcttaaatgataacaaatcaatgatgactatgattgttaagattagattttaagcttccagactatgtttccaaaagtaatataaataatgcttccctatgtggacaatgcagagactattttacaaatttgttcatgaaattccgcacataactaatttcattaggaataattttcgatgattaaagatagaggaggtggactttaaacctgttgatgaacatcagtcatggagagagttaattgtaaaaacactttgactgttgccaagacaacagctccattggcatgctgcagtctgtcttccaacagattcataatgtcaaaaatatcattactatctgacggcacatattttactgccaactcaagtataagacattgtgcccattcattgaattccttgatcctgcagtgaaacaccacaatggtaaataccactacaacaacaagttatactgatagacagttgaaggaggagcttaaggacataccgattcaagaaataatatataactggcttgctgagcaaggactccttttcccggcatgcttcctcagagtggcttgcttctaaactccaaatttcttgaagtgcagacaggcaattggcaactacctgacaatatattttatatcaaaacattaataattatacaaaacaagtaatatgctagggagtcaagtccaactccatccaacaaaacattatacatacaaaacaaaattaacctgagcatctgaatcatgaagcatcaaacttttcaacgttgcaggaaaatcggcatcaatgcatgttgagggtgagatgtgataaagctttagtactccagtaacagcgatagttctaacatagctattattgtccttgagcccgctccccaagggaccaaccagatactccacaaggtttggcactcgtaaagaacacaagctcctcaatgcaagcccacggatcatagggtcctcatctttgcaatccctttgcagaaaattaatcgtcaaaagagaaagatcaggattgccctttgcatagtttccaacgtaaagataacacatcttcttcaggacaatgtctgatgttgccgagcacatgaccatctctccaaatacagatgagacgtcaatgccaatagtcatgtacgatattactttcttgtagaggtcacgtttggaatcatcaactcctggagctctgcttccagctagctggcgaagctgggttttcagatctgacacttcgcttttcctgataaataacaatttctattttcaattcatgcttcatttgaccaaatagagatcagatattatcgaccatactcactgcatttaggaatcagattctaagtggggaaaattcaaactaaatggcttcttctgattccacattagctttttgacataacttagctcggactggtaaaactaggcactaaaactagatctgctaaatgagagcttctgaatttctggatttcgtataggaataatacagatcataaaattcgagaagtaatgagctgacggaccacgcatgaaaagagatgatcgaatcataaagattgatcccagctaattatctaaaaaatgtaaggtgaattcagtgctattgatcgagagaggatggatagaagcataagttaccctgaaggttgggacggtgacggataacgctgtgaagcggccggaggagccatggttaataagattgcgattcagatatgataaattattacgccgtgagatccaccggagtatgaaccacgatatgtcaccgatcggagagaatcccaccgtgatcagaagcacggggtgataaatttgagagagattttggttcactggtcgaagtctcgtccgtgcttggagaggtggaaggagatgccaacgacccgattttgctatatactccttatactttttgttttctttctaatttacccatttactctctaattagaagatagtggcgaaatgatacaatcgttaaaatagagcgggcaaattgtaatataaggaaagttcatcgtccagattaccaccatcaaaacgctacgttttgatgtggatattgtttccccgacctcctccnnnnnnnnnnnnnnnnnnnnnnnnnnnnnnnnnnnnnnnnnnnnnnnnnnnnactaaaaagctcataagactattacttagaagagaatcgatcagatatgattttagcgcatcttccaagattccatctctcaatcctcgcgaaaccttctttctctctctcttcttcgcatttcagtttcttaaaccctaagccttcggtaacagtatctcgaacccttttctcattcgcgtctaaatcgaatctcgccactgttgaacccaacccattatcggtctcagattcaaccgatttggatgatgcacctgtcgagattgcgctcgacaagctttttattccgccggagaccgatatatccggtgaagactcggcgagtttaacgacgaggatacttaagggttcgaatattgtgctgagcaagtacgcgagggacgcacaggtggttcaggctgattatgtgaagagtagtgtcaagacggaggattgtccggccgatgggttgccggagtttgcgcttgttgggagatccaatgttgggaaatcatcgcttctcaattcgttggtgaggaggaaacgccttgccttgacttctaagaaacctggtaagctgagttttgctccatcgtgcttatcatttagctggtgtgtgatttctacattattttgagtgtcattatatttatggatcaaaagcttccattttggggacctgaagcactggttaagtagatgatagattaagagaacaacttggcttattcccgttgaaatgtcatgtgaaactgaagcaatcacatctttgagacagagtgatgtagtcagttttttaatgttcatgaggagattggagagtgttggtaaagcagtaaggagaagtcagtttttgttgttgttggaagcttaggtcaattgatttattgaaatgattcttctataactgggttttgctagagtccacactaatcatgggctaacgcctagcatttgaattctgtagtggccaagtgaggcattgagtgggaatcagtctctagtctcaatcaatagtcaatagtcaataggacaaaaccaatagactatccccacttggttagattgaacagatttgccttggagcatcggcatttgttggtttctagtacttttgaagatggggtattgttgtagagaatacgaaccaagatatggcatcagtggatataatctttgagtaatatgtgttgctgctagaccatgctataataatttcatgaaaatgggatttggatgtatatatgatgaaagtatctctatagtgtcgaccgaacatctcattcacaaatactccttcctagtgaaccacttagaaaggttgatagacgtgatattagaattggaaactgataggcatccatgccgtgcttgtgcttgtgcttatgctacatataggttgattataacttctggtagtttattcttcatgtaggaaagacgcaatgcattaatcatttccggatcaacgacaagtggtacttggtagatttgcctggttacgggtaagtttaactgatattattttgtttttcatgccatagcaccttaaaattgctctggcaagtctctgtctttcctagttttttgtttgtgtctgttggatacaattacagtttctgtgccagggaatttgaggactttcagtatagaaaatgaaagttgatacattttatatatccaggtatgcatcagcaccgcatgaactcaaacaagactggaacaaattcaccaaagactattttctaaatcgatcaacattggtctcggtgtttttactagttgatgccagcattcctgtaaagccaatcgatctcgagtatgcaagctggcttggtcaaaaccaggtataaaaagtacctaaaccttgaaaaccccactttaacccattattggcaatcaggtcaa

SEQ ID NO: 27404 - DNA, 1536 bp, Arabidopsis thaliana landsberg
taaagacatatgtatattaaccttcaaccggttttgtgttttgtttgatgaatattatgtgatgattattctaaaatcccctataataaaaaagtttaaaaaaaaaaaaaaacatttagtctgattatatttatatcatagttcattaacaaaacagttaaaataattgaattaagaaaggacacaaatgtatttcaaaattaattgaaaatcgtctttatttgcttttatttttaaaatcagattattaaggattttattccttaactatctacatatacatttttgcagtcattttagcaaataaatcttagagttggacttatttacaacccaatgccattaacattaaatatttttccaaaataattaattttactttaaatttttaatttaaattgtcaatcccattatcaatcaaatttaatccaaacaaacttcacatcaatcctttaaaattagcataaacgtattttattaacaatattttaaaacaaagttttttgtttaaataaatattattcttactaaacgtttttgtttaaataaataaatcatgtgtttgaacttatttacaatgtcatgttactgacattaattatttaggaatgaaaatatttaattaaagatctaaatcttctaaatcttctaaatccttacttttagatttattgtgtcattaccttaaaggtaacaaatattaactttttaaatataattatttatatatttaaacttaataaaacattatcaatatttaaacttataaaaagtttaatatgtcacaattttttaacatcattatataatatatagagtttaaaaaaaattcaaattttttcccttatattttgtgattcgaaattttaaaaatgaacatataataaccaattggcataaaatgtgtgggttcaacgttccgcatcgactaaaatatttagacaataattcataaacatatcatgaataagatcaacattaataaaataaatagtttttttatgggacgggttggcgggacgggtttggcaggacgttacgtaataacaattgtaaactataaaataaaaatattttatagatagatacaatttgcaaacttttatatatactaactttaaaaaataaattgtttacgtggtgtaccgcgggttaagatctagtatcactacaaaaaagcagcagaaatttcatcctcaaaaatttgaagggattttgatcaagagggaccgatatagaactctttgcaaattcattgaatttttgaaggaatttctttctctcggaaattgacgatattttcgggcatttctgacaacatacgactcttgatataaccgaaccttattaccaccatcttgatcctttttttttaacaacataactaggggtgtcaaaatgggtcaaaattcatgggtcaactcaactcaactcaacccatgaaccctaatgagttgaaaattttgactcgaatgagttgatgggtcaatgagttgatgagtcaattggtgtgatgagtaaaatgagttgggttgt

SEQ ID NO: 27405 - DNA, 326 bp, Arabidopsis thaliana landsberg
gatttagcctctgtttgtccttgttatgttgttgtaaaacttgaaacttttgaagcaaactcatttttataacaaaaggaaatcttattttatacattgcattaaagcaacatgaaagacaattcatgctggtcttgttcttgttcttggtcttatcagaaaatttgcctgtccaaaagtagcctttatgcctccccataactattggaaatggccttcttcaactgataaaaattacttctaggataacaggctgatcttacccaagagctcacatggagggcaaggattggcacctcgaggtggactcacaccccacctggggc

SEQ ID NO: 27406 - DNA, 1128 bp, Arabidopsis thaliana landsberg
ataagtgaaatatgtacacatcatgggaatttgtagtttgatttgacttttcgttaaacatttttactgtatcagtttgaccaacagctgtatatatatatatacacaataacaaaataaaattatttcttttgataactgtatattagaatcagaagtgtatttttaaataatacaaatttgttagcaaaaagaaagttaaaaaaaataatacatataccagcagtgcattaacagaagtataattgtgtttgcttggttagtaatttttttttgtcaaaaacatctacatgcaaataaaattcatagtgtataatgttttggagtatgacatgttgagctggccaggtatgagttataaatgcgctctttaagtctcgtgggtcaataaggacaaggcaatagctccttttctaatccccgcgaatcgcgaacaggaacgattatatttacacgaatggtcctttgacaaaaacaacataacattataacttaaaagtaaactcaaaatacattacggtaattaagttctagttatgcatgttgcgttaaaatatgcaaaggactctagtctatatagttaggggacaaggaaaccgtggtcgaagatgtcgtggccagatcaattagtagtctacagtgagttagctcttctctcacttttcacttgtttagttttaaattgcttcttaccatgaaaaaacacatcccaaaatcatggtttaatgggccggcccaaagcttgtaatctttatatctaaattgaaatttaaggcccattttgtgctttattttccagcgccaacttaagtagtttaaatccgggaacagaattgaagaaaaatcacaacgttgatcatatataatagtgatacgaagagacgattgtattacaatatgtgcaattatttaaaacagtggttaagaaaaatcacaactttgatcataatcgatcgtcaagtggacgcctggtttatgatcgatggaagatgaatcaagcgaaagagaagtgttgaatccctggacgttactgtttatgaacatcataatcattggctctgtttttttctctaatgatcccctgtttttcggaacttcgtttttagccggaatcttgttcatgaggtt

SEQ ID NO: 27407 - DNA, 1199 bp, Arabidopsis thaliana landsberg
  unsure (1)..(1199): unsure at all n locations
gctgaggagcttagaagaagggagcttgcttgtctaaagaagattgaagagttgtcagcagtgaacgagagattggttgataaagaagccaaattgcagagcagtattcaagaagttgaggtgctcaaagaaagggaggctgaaaatattaagcagatcgaggagttgtcattgtcgaatgaaagattagtagagaaagaagccaaactgcagaccgttgttcaggaaaatgaagagttaagagaaaaggagtctgcttatcagaagaagattgaggagttatcaaaggtagatgaaatctttgctgatagagaagccaaacttcagagttccacacaagaaaatgaagagcttagagaaagggaggttgcttatcttaagaaaattgaagagttagcaaagctgcaagaaaatcttcttgataaagaaaatgagctgcatgatatggttcttgagaatgaggaccttaaagccaaagactctctggccgaaaagaagattgaagagctatcaaatctaaatgaaagcttgctcgtgaaagagagtgagttacaagatgttgctttcgaaaatgagaagctcaaatccaaataggctttatcgcttaagacaacagaggagctgtccgatgttaaacaaactttggctgataaagaaaaggagctgaagaccgcagttgttgagaacgagaagctcaagnnnnnnnnnnnnnnnnnnnnnnnnnnnnnnnnnnnnnnnaagaatcttaaacagagtttacttgataaagagaacgagttggagggtgtttttcaggcaaatgaggagcttaaggccaaggaggcatcatctttgaagaagattgatgagttgttacatctagaacagagttggattgataagggaaacgaaaatcaggagcttaaggtgcgggaagcttcagctgcaaagaggatagaggagttgtcaaagatgaaagagagtttacttgacaaagaattgcagaccgtaattcacgataactatgagctcaaggccagagaggcttctgcacttaagaagatcgaagagttatctaagttgctagaagaagcttcttccacacatgagaaaggggaagagattactaataccaatccttttgataacagtaccggagaacaaaaagtacaagaaagtcctttgaaagctaccgatagacatccgaaagatgacacaac

SEQ ID NO: 27408 - DNA, 1373 bp, Arabidopsis thaliana landsberg
gtttgctcatgccatagcaacacaaagcaactatctatggccatgaatactttcttacctttccaggtgtcataactaagcgagccaccattgactcttccaacccagcctcttgtgcagaagctacatctaactcattctcagctttgattgtagtaacatttgcttcaagggcatcggcaatatcaagcagaatttttttcctgtcttccgaagataaggcctatagcaaaatgtaaaaaaaagttaagtaactctatgccgagcaagaatggtttttgacgttacgaacatgaaagaaagccatgcataagtcacaattacctgaagctttctggaactttccctcgcagcaactgccatgtcacgagcattagaatctgtgatcggagcccataaacgagcatcttgatgaaacaaggttccaacacgtagtcctctgaggactttatctatgttctcagctgaatacccacttcagaagcaagaaagatatcaatataccatctaaccaaatttgaacaagcatatcaccctatcattatgcatggtgagcttagaaggttcctcacctggttatgatgacaggaatcccagcataagctgcattgactgcagctttgacttttgcagtcataccccctctccctaatcttgatttgtcgccgaatgtaatctcatcttgatgtttttctttaacaaaagtgtggatcaactttgagttaggatcacttggagggcctgtgtaaagaccttcaacatcgctcagaagaatcagaagatcagctttcagttccaacgccagtagagcagctaagctatcgttatcccagaaaataccagaagaatcctgcatatatcaagatccagtgaagctgaacattagactacgagattcaaagaatccctcacatctcagagtgtgtagaaaagttcatgtcaaaagggacaaacctgatatgcgggctcttcgggtgctaatagcatcattctcattgaaaattggaataaccctcaaatcaagcatagacttgacagtttcattaagttgcttcctgaaatccttgtctctaaaactactgtcattcaccagaagttgagctgccgtcacatcaagctaaccaaagaaaaacaacagcatcaatatttggatgtcttacacaataatctagaattcgataacaaaggaaaaatcacctggtcaaacatagtctcatagtaagccataagactgctttgtccaacaccagcaccagccttcccatcaagttcagtctgaggcttttgaagatccccaaaggctgcaaaagccctttaccaaaaaaaaagaaaaaaacccaattccattcagcaaaaaaaaaacaaaactttta

SEQ ID NO: 27409 - DNA, 1368 bp, Arabidopsis thaliana landsberg
  unsure (1)..(1368): unsure at all n locations
ccgcctggtagttatccagggaggtggaacaataatgtcttcccgaatttcgaatcaatggttaaaaagagaatcggtttagcgataaacggagtaaaccagattagaaccttgctcatcggttgtgttattgccttctgccaattgttcaagatagacaacccgatagcatgaagagccaaccggctcactgtgtttgaccaaaccggttttccgttgatttcattgtttttcacttattaaatttgaaatttaatctcgattgatttagaatttgcatttatcttattgacattatcaatattgaaagattaagatttcgtatcgtgttctcttagtatagatagttttgttttggttcggtacgagttaatacgacgattgtctttttctttcaatatctaaaagtcagaaaagcccctaggaatggttccaacaaaaaaaccacagaaccaatggaaggcagttttgaattggtaaaatagagcagagcattacattcaatcatgcagtagcttctgcttctgcgtcggtttcaactgggacagacggcgaagaagtgttcttgctgctaccgcttcgacctcctttcagacgcgacgaaaccttgtcaatggcggaattgagttggccgattttctcattcaatatctctcttctctcctgttataaacatcaaacccgtatttgtgtcttagttttagtatttttaacaatttcggtactaagtttttcttttatacctctaggccttcgtcatagtacatcggctgctccggtttcttgaaaccatattcattctcgctcagcactgatcttcggatctgaataaaaaaagcatgacagcatgtggaagtaagagatcacatgagaatatcatcccaagctcggaaagcaaagtcaacttaagaatttatattgttaatgttggtgannnnnnnnnnnnnnnnnnnnnnnnnnnnnnnnnaatcacctcaagaacaaaggtcagaattagtacttaatcatttggaaaagcaaagctcaaaatcttttaatccctccaagaacaaaactcagaattacttaatcattaggaagaacaaagctcagagatcttagaggaagaaataaaaccaagaataaacagctctaagtatgccttaagccaacataagatatgttagaattgaatagataaccgtagtttgttgttaatgttgttgatttcaagaaggacaaagctcgaaatcaactaaatcataacaagggtgaagggagttggtaaagatctaaagccaaaaatcataatctatgtctagctttctgttatagaaacaatgaaatggttttttaagaatgtaccttgggagcaaagatttaagccag

SEQ ID NO: 27410 - DNA, 5646 bp, Arabidopsis thaliana landsberg
  unsure (1)..(5646): unsure at all n locations
aaagaaacaaataatatgtctaacgataattagtgacgtaaggaaatatcttacctacatacaaataaaagcagtgcgcaagtgggtgatgttgttttgcggctgaacttgaaatgttaggtgtatgattactttttttttttttcactaagtgttgtctttcttgtattaagaacatacataaaaaagtacactagttgaccttccacttacaggatgaagacaaacactataacaagaaaaaacatgatctaacaaaacacaatgttgatcatgccgaaaatcaaaaagtgatgagtaaactgaaacaacaacagcagataagagaagtcataaccaaaaagagttccaccggctctactttcatctgctacttttgcaaaccttggacctgcaaacttgtaccattgcagtccctattattcaaacgtttaagctgccaacaaggatcctcagcagcaacaaaagccaaaaaatgacagaatttgcagagtgtttaacgcttcttaggaggtttcagaatacctccttccttatgctcctcaactctatgagttcttccttcttcatcactcccaggttttccaatattcttcctttttattgagtttcccttatccaattgagtccttgaagctccaaactctccttgtcatgaacattcacctacttcaaccactcgaggaacatttgcaccaaatgcaggacccgtaaacggttgtacattagagtttcttgacgcctcttgcctgcgagatggaggattaagatttaatgttcctatatttggtaaagaacctgctctgccttgtggaaaataagtagccctaaattcatcaggattcaaaggaggagctgccactcttggaggaggttcaataggtgctggaaaggcgttctcagacatctgtgattgggagttcagggaagaacgatgatattcatcccgggtacacactccttctcttctagacctagtgagattgttggtaggaccacgaatgatagaacgaggctcaggttgtcgataagggcagtaatttctatgatgagtcagcctgaaacagctactgcacattcgccttagtctttctattgaaaccttatcagcgcagtctcaccagaatcaaaggtaattcgttggaagaatcttatgcgatnnnnnnnnnnnnnnnnnnnnnnnnnnnnnatataagctatttgagttgtagtagcatcatgaaaatccaatgatattatttcccctaaaccatgagctatttctaccacattttcttcacaaacatagaggagagggatcccaaacatttgcacccacagatcaatattagacaagtactcaaaatcaatattcacctcccatcgatgagccgtgacaaaccaactgttgtagagccatggtttccttcttagcacagacaagagatccacttcagactgaaagagaaactgaacaaacgttgcattaatcactctcccatgaactctagacgtcagatcccaaacccttggcaaagcagcaaccacaacattgagattttgagatcgaggattaagaggcctaacaatcaagctaagtctattccgagattcaacagttacataagtagcatgcggaataaacagagcaggatcctcccttcctaactctaagtgttgtaatgcatcccataactcatctgccatgataccaaagagaaaagagaaacacaagggaggtttagatactaaacacaaacctaagacacaacgcatatacagtaaaacctctataaattaataatgttgagaccgcaaaattctattaatttatagaggtattaatttatagagagattagactaattttgtaatttttattaaaataatatgtttaaaataattttgttttatttataatcattatttttctagaagtaattgcaaataagactaaattatcgtgtctataaaataacaaaaaagtgttttcgatgtagtaaaattattaaaattgaacattactaagaattagtataataaaaataaaaataatagcagattcatattttactaatatttctaacatattccctctgttcatttttgtttgattgtttagaaaaaacacacatattaaaaaaacatattaaatgttgattataaatgtattatttttagtgttttacagtttttataactctaaaccaataataattaactatttttcttgaaaattacaattcgtcaatactaaccaataaatattacatggaaaacttaaaaaattaatcttttagaaacaattagtttttctaaacaatcaaacaaaaaggaatagagtgagtatatgttatttttattactgattaactaggctaaaatgtattgatattgacagaataagtatttgataaatgagaatgtttgtgaataaatcatattgaattctaacaataatagggtctaaaaaatactctcaaacgatttttgtaaggctacattatattattctgcaatatttcaacatgttatcaccacatttatattacacaaacacgattttgctaggaaaaaaaaaagaaattgtttctttacaaaaaatcaatatcactcaagttggaaagaaaaaaaaatatcaaacgtaaatagagaaaatgaagaagaagtaaatggcaaactaataaagtgttagtgagagctctctcgagaggggtactttagtcattcagatagaaaaaacggctcttcaagccgaaacccagcatcggctccacaaagctgccacgtggacgagtagtagcaaaacgcatcgtttcgtatcatcgtctcattctcatcggtaaacaaatccggcaaatcaaacagcttctcttcctcactgtctttgtccgtacacgccgaagtcgaagcacacgaagcttccgaatactcttgactctgagtcgtcgtcgtcgtgcttgtgtccgaagaaaacaactgagccaccacggctcgactcggctcggcttcaactatttcagccacttcagaattactcacatcgttgaccgaatcttgccagttaacggccgctaaagaggcggcggcttgaatgtctttaggagaatttgtgactggacgaggaagctcgccggctaacttgggaaaattgaggtaagccgttgtacctttaatggctaaagccgctacgtcatgagctcgagctgccatctcagccgttggataagtcccgagccagattcttgatttctttctcggctctctaatctcacaaacccacttaccggagtttctccgacgaactcctctgtatattgggtgacgagtctcacgaaacttcttacgacccgccggtttcttggggcagctgctcgcaagcgtcggaatataatcaccgcctgaggaaaccgaagactcgtaatcggagccaaacatttcagaaaaagcagaaaatgagttcattgatcagaagagtactctgtttcaagaaactggataaggtttatgagagtagagtaagtagaagatctctgtctttttttgtatggtatgataaaatatttatttctctctctatctttcttttctaattcaggtaagtgtttgaagttatagaaatgttggagtgagagcttgctgtttatattggccggaagatatttggatatttgtggggtcgaacgcggagtttctgtctctgtgaatgccacgtggataagaaacagctaagcgatcccacggttttgtaattatcaaggctgtcaatcactgagaatctgacatgtgtcctttgacccatcttgggaagtttctgacccttcactggttgatgcctttagggtatgaatttttttaacttcttattgtatgaatgtgtggctgtagtttatagggtacgacaaccattattaaatattatttttccacgaataacaaattgtttataattgtcgcttttctatggtaaaataattagacataatgatccgtgaaacgagatcctttcccatgctctttctgtcttttctccattcacatatcgtgcattgcaaatacttctagagtatagtgagattagatatttgtgtcctaaaaaaaatgttatattattattattattattattatatatatatatttaatttaattaatcaagtttcgtagcatagatatgtaaatttaattattcagaaaaatttatatattgtctcaaaaaatttgaatatgctagagtaatttcctaagattcacggaggctataaacttttactcaggatttctttaatatattgagaaatgagaacacaagttgcttaaaatcgaaggaacaaaaagaaagcttttggatattctttacataagtatacatacatggtcgagaattaacaagtggcaggggtgtattaattggatatatatgtgagagacaagatagggtttgtgtaatttggcaaaaggaaaatatcaaatatggtaagtggttaggcgaaaagacattttgcatgtagttgatcacaatttccagcatctctctaacaaaagtatggttcctcctcatacctcttctcttcttctcccccttggcttagacttagagcgtcttcgtcctctttactcttcttttgttcaaccaccatctctatcttttgtcctctcctcttcatcttcatttcttccaaccttctttttggtctgaaaactcgccggacgccaccgtgagttgagttttccggcaaagtagaaaggtaaaccttttttacagaacttatttgttttgttttcctcacaacatacaaattaaaatcataaatgttcaccgtccctttgctacttgtctaataataatctggattatcagatttgccagaacaacaaaaataataataattacgaagtaaacaattttattaattctaaagtccaaattaaattgattgtggttgatctattaaccccgcttatatatatttttttgttttttcgcttatatatttcttaaactcgactcatatattttttgagaaaaaaatacttccaccgaataataatacaggagcataaggacattgagtttaaattactaaataaaaactggtttaagccaaggattagaccgatatagtagcaagttatacatcactttcaaattccaataatagctataaaatatctcaaatctcaacaacagcaataaaatatcttcacaacgaacgtttctctctctcgctacctctcgctatcaattgtcgtctcacggtattgacatattcggagaaataatacgacaaggaatggtgcgcgaaagaaagtggtttaggaccttaaggtacagaaaacgacaaacaagatattagtataaaaaaagaaagtaaaacttgaaaatgacatgacattggttacagaggagcaacgtagagggccaatgaaggggaagctacggacagtgctctcttgtgggacccatatttctgtttatggagtacggtctattattggaggttttgctgaatcggttgtttcggttttatactctaatttaaacaacatttttttgttactgctctaaaaatacttgcattaaagaataacccacacttatactgaaactgaatcaatttaatttacactcgtttctcagttttacaaacataatgaaagattcca

SEQ ID NO: 27411 - DNA, 3270 bp, Arabidopsis thaliana landsberg
  unsure (1)..(3270): unsure at all n locations
tgatcggtctgtccgacccgatccgtccgacgatcggtctaccagatccaattcgtctctaagacgaacggtctaccctctccatcctctacactccatcgaaccgttggaccgggaggtagcatgcgcatcagttcggtcgagttatactcgccgagccgcaccccctttctgaccaacaacttcgggatgtgttgggactcttttaagaatgttttgtggtgtatggatgatgtgtgagatgccttgggcgtcctcccttatatagggggcgaatggatgcttcccgaagcatcacatccattcattgcatccttccgtaaggtcacattcgttccttgcatccnnnnnnnnnnnnnnnnnnttccattcgtaagtgctcgccctgatccaccctttcggcgttgcaaccgttcgttgctacccgctcgaccttacaccttttggtcgagacacctcttcacccatgagctaccacagtccaccagctcgagtgtcagctgacgggaacactaagctgggtcagtacttaatcagctcaccgagctcagttgagctgtcgctcagctcacctagctgagcttgctagtcttccagcttgtttagctcacctagcttatctagctagttcatccagcttgtccagctcacctagctggttcaacttgaactttctcgttcttccgactaagtattttggtccgttcctcgaccatgatctagttttcccctaaaataaaccggcctctttatgaactcgggacgagagcgttacagtcaagcttagtgactctaaacaacctcactttggaggaagtcccttgtctatccttgtacatattgctttcttgttatttttaatgtttttgtttaagtgtttcaagagagaggacttttggggaattttcaggccatgctcgaccaaactactcggttgacaggccaaatttgggcttcaattgatcaaagcccaggagtagaccatacaggcccagaccactcggcccaaagtcgagtatgggcctcactgtttaaagcccaagaacatgatccacttgatcagatgtcgagtaagatgaaccccactaagcccaacactgtactcgacacgcgcgtcgagtatgtcggccgagttcacacgtgtggagtcaacacaattcaaatttgaatttgaatttgaatctactcggccccacacgtcaatcctggtccccaaaggccatcaaagctcattctgcaaatagttaaagcctgtccccttgactaaatgaagggtgaagatctagggtgtttgacgggctaggatcaaatcttcttgtctataaaccacactcaacaagctaagtcacttactctctcttttcactcaatcaattttgcattttgctacctctttctagacatttcaagactttactctctcttctctctagaaatcccagaaactgaaccataatttcttgctttctctccatataaaccttttcaaaacctctctcaaagcttttaatcagtttaaaaaacatcaaattctcttctactttcacctactttgggttattttgtggtgactatcttcagtacttcacttcaagaacatggatcctgaagaatcaagacgaagagcctctgctcgtgctgtggctnnnnnnnnnnnnnnnnnnnnnnagaaagatccggtttggaatcaggatgctgtgagtccaggttttactcggatgacaggccgagtacaatggccgagtatggccttggagtcctctatggctcgttctgcggctgctcgagaggaaattgcaagaggcaagagggtttgggagtccgagccggctgcaatagaggaggagtccatgctagagaaggaagcatctgaggaagatgtgcaaattgatgaagaggtcccgatagttcttacaaggagaagaagaaaccacccaaggagaaagaaagagcctaccattgaagagcactaccagtatctcatggagctgagttttgaggggacaagatatccccataaacctaccatgcaagctttggggatatgtagggatgttgactacctcatggagatggccaagtggagaccttcttctcctacaagtgtgaaggataccaaactgagagctgccaattcctagccactttgaagcttcatttctatgctgaagaaagggagagagagatacataagggagttggctatatcacattcatggtgtttgggattcactactccctccctattaggcagttggatgttgtattcaagttccccaccaagtatgggatccgccaaaacttcagcaaggacgagctccatgatctatggttgacaatcgccggtccactcccctacaagtcatctagggccaagagttcattgataaggagcccggtgcttaggtatctccacctttggattgcaagtgccttcttcccaaagaagacaaccgatcatgttaatgagggagagctgaagatgcttgatctcaccttatgtttcattttggggcaaacaaggaagaatatagtgatggaaggggatagggctgatacatccctttcggtggtgttgactgatcacttgataggtttcagagagtatgccactgatatccaccaatccggctatggaggaagcttatgtgctggaggagtgatcacacccatcctaatagctgttggagttcctcttcacactcccactgtcacagcaaactacattgatatggagtacttgaagaggaaatgctacttggatagatctgcctcagctgatcaactccatttcaagttcaagcaccccacgctaggtctctctaggttagcacttccttgcaaggagtacaccacagttagaattgggaacaacattgactttgatcctccaccatcaatcttagtcaatgtccttgcgcctttacaagcagagtggagcatggggagtgagtcacaagaagaaggagcagagttcaaccaagaagaagctgagcaggaagcttatactcggccgagtatggccaggtcgagtatgaacaagctgagttcagtcgagctgaacagtttgatgagcaagaagactcgtgtgaagctgcagtggagcagtatttctttgaagattatgatgagtccgatcaagagagagatccggtcaagtcacaagaagctgggaatgcacaagggcctagggaagtttcagagaaagttgatcagtgggttgaagaagaaggtgagaaagatgaagagggcaatgaacggcatggcggt

SEQ ID NO: 27412 - DNA, 1716 bp, Arabidopsis thaliana landsberg
  unsure (1)..(1716): unsure at all n locations
ctccgacctaagcctgtgcctgctctgatatagacattgatctcctacaggttcttttaagaacggctcttgggaaggatagtgaggttgctatcttctatattacatggtttcctgcacactccgtgtgatatcctagaaagcttgtctgcactgttcccccctggagaggaagacaacgttataggtttacctcagctgatggatgagagttctgatgattttgatgatgatacatggggtattgctggactcattataggtttggggatgtcagttggagcaatatacacagctgggaagaaagacgctgttgtaaagattaaaaatctgattgtatcatggatcccatatgcagattctttgaagcaaaccttgggttctaatagtaaggtatcagtgagactgttttcattttgtttttgccttgcactcccaattgtgataggtttgggccaaaaagtagaactgtttgatgcacatgaggtagatgatataatcggttgtttcaaggaccttatttccgagttgctaatcgttagaaagtctggtgctttacgtaagaggttgttgatggcttcctgtattggggcgggagacctccttggttctgtattgaatgaaggtnnnnnnnnnnnnnnnnnnnnnnnngttaaagagttactagaactgttcaagaaatgttactctggactttacccaccggttgctcactttggaggcatgctcggagttgttaatgttttaggagcaggtgctgggaatttggtgtattctcatcctcgaccccgtgctcctccagccagttctgaggagaacgtaagttttctggtctatctttctcaaagatcattgctgatttattcccttttagataaatgtgtatgggttcctaacaattcatttatttgctacaggaaatctcttatgtatcaggtcctttgctttcaaacgcatattttactcagcagttgacgccagttgtgcaagaaatatttcttatcgcacaaaataccaaggatcgccagctccaacattatgctgcatgggcaatctcaattcttagaacttacatgcggtcaggggaatcgtcaagtctcagcaatgaaaaccaatctgatgactctgaccgtaattccatctctcacaatgttcctgaacataccatggtcatgaaacttgctcaaggcctgacaaatccaagttttcctttggcgggtagccctttgaatattggcacaatggcaagtgctttgcggtgtttgtctcatgctccgagattgccaaacttggactggggagcaacaataaggcgtttaatgaaacaagagactcagactgatgtaacgcaatcaggcgatgttcctaaggaaataactcttagggaagagtgcttcaaattttcattagcccacgcaagcgaatttgatgaacttctagcttttctggacgaactgtcggaactatcgagattcaaggcactagaggagagtcttcagtcgtgcctgctctgtcatctagggggtttaatgagaatattctcaggttcaagaatgaataaattgtttgacgatgtctcttgctttgtagtctcgctatcatcagaccaaacatatagctgtgatcagaagagctcactgagggtctcttgttggaagggtctgagtcagtaataaaagaaacttcacttgaatcttcagaatacgtcacaaagat

SEQ ID NO: 27413 - DNA, 874 bp, Arabidopsis thaliana landsberg
tttatctctttcagactttcaacctcaccttctctaagcagaagttcatagttttgctttgctccaatatcttaaaaaatttggtgaacaaaacaatcattacttgcagtggttcaccatctctctatcctatgtataggcattttcataaacatactcagagaacagagaaaacctaagaactcgaaccatgacttccaacagaagcaacctcttcctccatcttctccttcttcatcttcctactcttatccaagctcttaacacagatggtgttgctttactctctttcaagtattccatcctcaatgatcctctcttagttctacgaaactggaactacgacgatgaaacaccgtgctcttggaccggtgttacatgcacagagcttgggattcccaacacccctgacatgtttagagttacaagtttggttcttcccaacaaacagcttcttggttctgtttctcccgacttgttttcaatcctacatctaagaatcttggatctctccgacaatttcttccatggatcactgccggattctgtgtccaacgccagtgagcttcgtattctgtcccttggtaacaacaaggtttctggtgaactaccccgtagtatcagcaacgtggctagtctgcagctcttgaatctctctgccaacgccttgaccggaaaaatccctcccaatctctcacttcccaagaatctgacagtcatttccttggcgaagaattcattttcaggcgatatttcaagccggtttgaagcagtaccgggctctagatattttcctcaaaatctttttagacgggaacctctttcctcccagattttcagcagggaaccaaggtcctccctttaacccttcaaa

SEQ ID NO: 27414 - DNA, 2146 bp, Arabidopsis thaliana landsberg
  unsure (1)..(2146): unsure at all n locations
atgggatcactctcatccaattcattttaaaacttatacattatgctattagtgtatcaatctcaaccaaatacgtaatagcttctttatattttggaggaagtccactaaagctgaatttcggggaagcctatcaaacaacgagtgactagcttctttgacttgcttttcaaagtgctttgcccttttgaattttagataaagcgaattaatgaggagaaagaaagaaatttttgttttattttgacgagagtgtgtcccattcatttgtttaccaactcaagctctataaacttattttcagaaacactaatataagaattatacatgattgcagtatgaatccatgaattggattaagaaattaaatggaatagaaaaaaaggattaataaataaataaatggatcatacgaaatcacgtacacatgtacagtgtaaagggcccatcatctttactgattttgggaacttgatgaggcccattaaagaagggtgataatgggactttggggtctacatccattgaatcttacggtctgaaattttttggcaaataatgatgatgttaataatacgtctcggaactacaaactttacacatatattgtgcatattttttacaagtagtagtaatattaaacattatccagattctttcagaatcagtttagttttttnnnnnnnnnnnnnnnnnnnccatcaattttgtcgattcccatatgattaatatattactacttagtagtataatattatgtaacataatctcgtaaacataaaacaaaattgcactaatttgtgtttcaaacgcaagattttctttggttcaaagtagtgccaaaaagtatcactattatttatgtgtactatgtagaaaataaaagagtacgtatataaatactttaatgatctctgaccttttggtctgactgtctcagtctgaaagtcacgtgactcagctgctccctacgcttagcaacgcaacgcgactctttgccacgttttttcttatttgcctctgcttctttgttaaaacaaggcaaaacaaaatgaatttacaaaattatatacaaatttataacaaaataaaatttgttttattgtgaataacttcaatttttaaatacatacaaaaacagtatccaaagcttttttttttcttttggtggttgtggtttattttctttcagccatagctttgtttgtaaaacgtaaacacaaaatttaaaattttgcctaaaatttaagttttttttgtctgtcaactatatacgaaaccttttattgtatcaaatcaatattaaattgtagtgtattagttttattatggtttgttatatttttcttacttataaaaaccaatataatcacaccaaacagtaaacataaaaatattgtcctgcaatgtaactaaaattactaattatagacttatgaactgtaacctatggttattaaagacagataaattagcatagttttgaagtacgttttcttttgtcataactatttcataccatttttatgaaaatggaactaaaagcaataaagaacattatatatatctataaactaaattaataatatatatatatatatagctttcactcttctcttacaagcactgttattaacccttctttttcatctaaaaggaggagactttgaagaagaaagaaaacattcaaagcttaaaaaacgcagcgttttaggaaaaaagaggtagagagtgattctggctttcccaacaatggaagctttcagtctccttaactactggaaaaacagtggtggcgctgttactttccttcctcattcctccgaatcttcttcttcttctctttgccgttactccgccggtgaatccatcggaaccaccaccattgtcacctctgttaccgaaactgaggacgaagaagctgatgaaaacgacgacgaaggaccgttcttcgaccttgagtttgctcttccagccgaagaagaagacacagacggaggagtcggaagagagggagactccgattgtacggacggtggttgtgagtttaaattcactctctcgtcttgttccggtggagaagatcgagtagatccaaattcactcgatgatgttttctttaaagaaacgattgttgaagaggttg

SEQ ID NO: 27415 - DNA, 1454 bp, Arabidopsis thaliana landsberg
aaacagatttgatctatacacagagaaaacccaagagaggatatgagtaaaagagaagaaaagaatcaaaattgggaagaaaagagagaaaccctaaccagggtcacattgttggtaaaactcttgaacatctgcaagaaaagcaaaaactcaaatcaattaggaaattgaacatagatcggagaagataacaatcactagaagcagaaagatctgagaagatagtgaaatttttaccggtggtgagagctttgacaatggcagtacgacgacctttgaaatccttgaaaacttcttcgacagttcgaggattgtagagagcagctccaccttccatgatctctcgcttcgctcgctcgatctaagaaacgcagagagaatctctcagagggaatagaataattgaagaagacgaagaaaaagctgcgccgtggaccgtgacgagacccgatcttgtttttcttctaagtctttggattattttttggtcaaagagaattgggtgtttttggttcgggtcgggtcataaatataatccaatatgaagcccaaaagcccaaatcaattagaattaggatttactctacttttttttggtaatctttaatatcaagtatcaatttgatttctttcgatatcaatttttcatctccagcttaggaaagtatagatttggtcaaatattcttaattgttgtatataattcgacattctttcagtcaatatcaattttgtggctagaaattttaagaccgtagacgggaaattttttgtttaacatatgaaattatgaataatctataataaattggatacaaaaattgtttaacatatgaataatcacatgttttttaacatgtgatatagtaacttgtgttattttcgttgttgtgttattatccaaattcaaatcagtataaaacttgttaacaaataaagaaaacaaatattttggtgattaatataaattttatataaaaactgtgagatacaaaatgaagtatccaatatataaatatcattaaaaaataaacaactatatatatatatatattgaataaaaatgattaatacaagaaaaagttagataattattaattgttgtgtttatccatttatgcaaacccacgtgacttgttgtccaagttttaggtatatccaaagagttcaccttttctatatatatgtttcatttgtgaagaagaaaatatgagtaagagattcttttttattattctaaaataatataatatataatattcaacacgttatctgcacgagtgactctcgatccgctagcacgaacgattctagatctgtcttttgaggtaacatttaaattatattgaataatttaaatcattaaaaattatatatatatggagtgagagactatatccttttctcgattataatagtaggttttgcctcttggtcgtataataaaatttaca

SEQ ID NO: 27416 - DNA, 1233 bp, Arabidopsis thaliana landsberg
ttctttttaattcagataataatgttaagagagtatatatagggtggtagagagaatattaatttacatagagtcgtctcctataatctaagaatgtaaaatttggattatacaccaactatcgtggcttgaaaccatacatataaaacattttattaataagtaaggagtaaggaccatgtatttaatattattgcactagacactaaatattatggctgattcaacatgactacatgatcactataattatcgtttcatagttgtaaaatatgaaggatgagaaatctttaaagggatctatccgaaagtcaagagcctcttcgtcaatattattctgatttattttcctatatggtttggtaggaagaataatggacttccactaatcatgaaaactcatcacaaaatctgtttggcttaatcattaaataaatatttgatatttgacacacacactttacatcgttttaacaatatgattgagtgcatatatctattaattaatttgtataatatgaagatcgggttgtcagttagctatacatgtccttctttatgataatatacccaaatcagattatgggatcacgaaattatgccaataattattctaaaataaatatttaaatttagaattataactctatgaaaaatagaaataaccaaaagaatgtaattctaaaatccagactgttctttttttcgtccgttcatagctagctttccagtaagctaatgattaaaggaaggttaagtacatgttagcatgtgagaatagggaataagttccattattcaatacaaaaaaatatacatatgcttctaaactaatattgaaaagtatagatatattaatttcatgtgaaaagaaatataactattattggtctatatgtatcacacgaaacctacagagacaagcaggaggaagagaacaagagaccaactcaaaagtgaacatgggaaatgataaaacaaaaatatagaacttatcaacaactgtagttttgacaaaatctgcatattattaaatactacttactacaaggatttaagatatttttccttaaaacacctaaaaattctacacaattagaaacatcaaaatattcaataactttctaataatgacacattatagcatacattattcttcaatctttgattgaagaatgtaagaatcagttttaacattataagtttgtttctaataacatccaaaaatgaatt

SEQ ID NO: 27417 - DNA, 1932 bp, Arabidopsis thaliana landsberg
aacatgtttggctgcttgctctgatattttattcatgttttcttctatccaactagtagtttctgtataaatcaaccggcaaagtacactttatgtcccactaccatttcacaaaccacagttccgattctactatcagtttcctcacttgaggtgtataatttggttctgtctggtttcatctatttggataccatcctgattcaacatgttcatcatttctcttttgtttgttggcttcggaaatggaacgaggtataattccggattaagaaatagagtaacactaatctttttattcactccaatatctcaattcattggtatattgctatcgtagagactgtaaaatcgattacattgtctctgaaagcaaggtcgtgcaataatgattgagccattcagctgcagatctcagtacacgaagctcaccgtataggagatctcttgccatctgccttctaacagcaaatctttgtgatacaaaatagcattcttccatttcctgcaaaggcacccaccaataaacgtttttcaaaacctacattgtcagtcattgtgtggcaattagttgagtaaagcgttctatagtaccttgatgcaaacactatgatcctcaatcaatctgttgatgtgagacaagaggatcttatgtgcctccaactctctgttcccgtctttaaaaggaagccgagctagtcggccatcattttgtgcagcttcttttgacaaatcatttagctctgagaatcaactatactgttaatacttttggaattagcctcgcaagatgataaaagagagtgactaatttgatttgagcaccttggggaatgatacaacagagaacacgagcaaatgcacggagagattgtggaatgccttttcctttccctatagcagatttcacttccctgagagatcaccaaaagtacacttagatacacatgtaaaaagcactgttactgaaaccaattctgaagaagtaggttcattggtattttcctatccactgttcacatcactcttaactgctttcttactatctcccatgtttccattctttgagtacggatattgatatgtaagcagttaagaacttgtaatgacttggtaacattctaaagctaaactttaatacctacttgattgtgaaagtatcacaagaagagtgaaagatattgatatctttgacaagtcgagtgtgatgtgtctggagaagtcccaacttcatgttgcgaagaggatcatcattcggcacatcctgttgtatttgaccctataagtcaccgcagcagtatcagttttataagaatccttagataatgactgtgtgaagtttcaacgtgcctttcagtcaattaaatgacaatcaagttcaaggttggtgagtagcatcttcaatccaacatctatagatcaatgttgttacggctacggtcatgatattagaaaacaaacctcgtcatgaatgttgtaaggaaaggtaaatccaaaatctaacatgagtgtagcatttgagaattccccatacttgatgaatacctacacagagatatttggtaagcttcaacaagcccatgagttttaaccagtcactgagatcgacctcaacaaaaataacattcttatagaatctagtgattattaaaagaaataagtaatgcatcctctgagaagtgaatctcatcgtgttataatcttacctcatcaccaggactgtagttgcgatctgcaatgacctgcaaagttgaaaacttgaaatcaaaatgtactggcttgtttcagtctgtgttgcaagcctttagagtcaagagaaagtaatacggaatcaaaaaccatgcattttactagatcgatgtaccacatatttaacaataagattatgctgatgtcgattcactctagttgatgtatggaatatgagatatg

SEQ ID NO: 27418 - DNA, 950 bp, Arabidopsis thaliana landsberg
aacatagagactatgtaaataattttatcgtagagagcaattaaccgttcttaatactctgtagttgtctgaagttcttctgagcttgaagattacctgtatcaacaatttctttgcctgcgtcactcgaagaatctgatgtaaaaagtagaaaaagaacgtccatgacacacccaataagaggaatatgcgaacaaatattagatttcacacgatccatcaagttatagagaaataaaaattttgaaaaattttggatatgtaaagagaaatgtttgagagatagataaagagatgaaagaagaaaaagagaagataagtgagttttatattagtggggagagtcggagagacttgatccccaagaattaaccattgttgggggcccaaaatatttgcttgatccccaagattcaatgtttctttcaaaggtttttgtattattagttgaaatctaatctgtcgtttatgtcaaaatggctttttgatatacttaaactcttttaaagaatcaacacaatcactcatcaatttcatttgtgtattcatcatcttcaacaactctgtcgctttctccttagtctcttctccatacccaacttgcaatacaagcaacaccttctgaaacgcgcccaaacgcaccgcatcttcaaccgcaaccgtgtttcctgttttacacagcttcaaaatcattgacattgagctcctagtcgctaattcagaaaccttcgcaatcttcttcaccaaaagcggcatcaccaacgcatttttcctcacttcctctctaccatgttctgtttcgcaaatcgcgtcaagaaccgctaacgctttttcacaaacgctattctcggcatcaacgatcatctccaccgttatactcaccaaaccaatttcgagaaactccgacgcgatttcaggcttttgcaacaccatttgataaatcgctatca

SEQ ID NO: 27419 - DNA, 2386 bp, Arabidopsis thaliana landsberg
  unsure (1)..(2386): unsure at all n locations
atccaattaatacatgcgattaaagtaattttgcatggcggtatgatgttttttatgtctcaacacttaaatgaagaggaatatgttaattcgaagaaaataaaagaccaccaatacagacttccatgtttatccagcactaaccaggaaaacggcatattatatcagtagcaatttgcattcctggcccaagttctgttaaggtgtctaccccagtcttgaattcacttgctgtatattccctgttcatggcctgcaaaatatattcaggtaagactagaaaagaatttggcagtcgtaaacaactctggactcatgactcaccgtcaacacagaatccccaccagattgcncagggncataaagaaaggaaaagacacatgggtgacgtaacactgccgctatttctttcggatgctttaaaatagagggagggattagtcatcccaatccttagcattgtgctttgatcagaaggaagttccttaacgatagcattaagcagtattggaagattagctcctatgtcacgacctgcaacattttgggggcattagcccaatgaaaaggaaatacaaaattatgtctttaactaaaggtttgaaaaggaaccatatgctccagtgtcctcgctgcttaaccaaatctccttgactccttcagagattacagttctcacccgctccacctgcaatttaggaatctcaataggcagaaaaaaaaaaaaagggggcaaaagctggatacaaattgaaaaaaactcttcgctgtgaagctgaatctgcttacaagactatcaactgtgtaacttcctaaatgaccacgggcatgcttggtcttgcagtaagtacaggcacccaaacagccaacattaatggggagaatttcgataaaattgttcctccgcacctgcagtggaaaataatgacttattagtccccattaatcgaacccaaatgaaatcgagcaagaaattgtgtaatgaaagactaagcaaaatttataggatcaaagaactgtctctgaaatcaagattttggcttctacttgtttggtactaggaatagccatactcagcattaaagtcaaaacaatcaaaagtttaaactctttttacccacctttgggagatcaagcgcaggcaaagtcttccgagtcagcaaccgtacttcatgacccttaagagtttcttcaacaatctcaacaacacgatcaatctgttggactccaactacactaacgccttccagttctttaagatcacgactgccctgaggaacacatcctgcaatcacaagaggctttttcccacttctacccctcgttatcaaagtagacatcgcagactggctaggggacttcacagtacagctgcatcaaccgcacatatagagtaaacacaaagtaaagctatatcgagcaaaatgctgcgccataaactataaatctacaatattagaccgtgaccaagtgaactatatctcaacagcaaaaacacatagccattgcatcgggtaaacagaatacgaggctgaagcttacgtgttaatgagccataaatcagcttcctccgggacttctgtcaacgcatagccaaatgcagaaagctgaccagccatatactcactatcactctgaacaataaccaagcaacgagacaagaccagatacgattagctaaaagatttcatctcaatcactagagtaacaaacattgtaagtgtatatgaggcatttagaaatctattaacaccaaaacactaagaactacaaaatcagaatcaaagcacttaagattcataaaatgactcgcctgattatgagaacatccaaacgtcttgatgtatatcgtctgcgaaaaatcatcaagacgaaatgtaagtgcacgcaaaaacgttgatagatacagaaaccgaagcaaatgagaaaatgaaatcgagagaggagagtgacctgagttcctggaatcttcatcgatggtggagcaagcgagtcacgattcgaagcagtaatttgatccggtttcgagctaatacgtttgctcttattcgtcttcggattaatcccgactgcattcaagggtaatcggaatcccggtggtgcacaccgactcctccggccaacaaatcctcgatatcctccattctctcttctctctccacggcggcgagtttacgagtgacaatggagtgtgtgggggttttcgcaacgaagcaggagatgcacagtgagacttaatgggcctgggtcgggtcgaattcatgttccattacaatgacccgatggagctataacagactatagccaactagtagtctcttcaagtaaagcaaaaatagctagcaaataaatgtagtgaaaaacaattatatgaattttaagttat

SEQ ID NO: 27420 - DNA, 1243 bp, Arabidopsis thaliana landsberg
  unsure (1)..(1243): unsure at all n locations
tcggaccgatcttgacgtgtcttcaatactttagaaggaagtcacaaaatattagacagattcttatcatcataaataaggtctacaaaagattagttaaacttaacatcatcatcaacaataagcaaaaggggattagatcttagatgagtcttttttacttacatctaagttttcatttaccagaatctagagcttagagaggttattcatagttttgtcttcttacttttattaccatggagcagaagcagttgactgaaactcaagcctcaaatcttctatctcttgattaatcatttctgcatatgatttcattccacttgtcactttgtctgtagcttccttcatctctttcgcaaccacttgttgtctcttcagctccagaattttgagttctaactcagccatttcttcttcatacgtgtgcccttctatctctcctgcttcaatcttcttctcaagaccttttctttcctctgctttctttgctcgctcatcttggagagacagcattttgttgattcgtgactgaggggctgcaacgtcaaaaccgtgcttctctagctcggcaaaagaacaactgaggctacctagagtgcttggggaaacatcgagttgcaggttttttacttcctctaataaaccatagaaactcaccatcataccaacggctgtccattcgcggagttcttctttagcctcgaacagcgggctgaaatgtggactctgtggtgctattttgcatacctcctgtgtctcatacatcttccaaaacggtgacttctttgcaaaaggtaaaatcattagtgtatcatttgcttgtctttcctcaacatcggtggcaatagcagcattattcaccacaatcgggctatgatcaatggatgtctctggatagatcaacacgataaaaaaaaaaaaaaaaaaaaattgtctagcatatactatctgaaatgtttcaaagagataaatcttagcttaagtatactgaaaagatttcgaaccagtaggcaaatttatccannnnnnnnnnnnnnnnnnnnnnnnnnnnnnnnagatactgcttgtatcattgatctcggccatttgaccattgcaactctcatctacaaattataaccaattatatgattaaaatttgggtaccaaacaaagatatcagtctagatagatgctggctaagacataccagtctccttaaggtctgagttgtgttcttctcctctctttcttttcctac

SEQ ID NO: 27421 - DNA, 1817 bp, Arabidopsis thaliana landsberg
atacaagacaccattcacatttctaagagactagaaagaagaatataattttaatatagaccttagtaacaactcttttactatatataggcacacccatacaccataaagtcggcttaaaagatggtgatttcatccaaaaacataaaaacacagttgtgcatgccacttaaacgtaatggtaactaatgagaaaggcatactatactgtagaatctaacggaaatcaggtaccaagtatcaccacaggtccgtagacttcagaaaaaagagcaatatcaaatttaggccttaccataataaggtcttgaacagtctcaaatgcaccatccccaacaagatccagcagatccccagctatctgcagaacaaatatttaaaatctcatctactttcacttgcaaatatgatgctctaggaacaggtatagtaggttcgaaaataacatacctcctcaccgggtttatccgaatccagaaatctgcatatagccatagccaattcttcacgggaaagttgtgaattggtttctctaaccatccgaccacatgcatctcttagccaacttaaattgaattttcctgcactgagattatttttcgtgtcgctaacaccactccatccttcagaaaacgatgtatgagcatcattgctttctacatccacaaacccagtttcgtcaagagatgcttccaccaaaaaacgagctggtagattgaaaacaaggtcggcaccaaactcagctcccccattaacttcatcagcatatgtctcagactgatgagtaggctgtattgagtaaagtgggtgagcataggaggccacgtctttttacattagcatctgagacagcatgcccgacaagattttgcaactctaacctgttgaatataagaaagcctcaattatctctgaacaccataaagaagtgcaaaaatcttggccactttcataatcttcaacaatcttgcatcagcatggttgataaataaacgaatatacataaaatgaaaaaacagaattaacagtacttacttcttcccggaaatgcttatattatcattgatatcactatcatcttcctccactggattgttaaacagacgataagcggaaaaagcaacctcgcgaaactcatctgatggaacttcccgatcaatcaattccactacagctccaataaactgcttgtatgcttgtcgcacttcgagagaagctgtcacaccaattccaatcaatatacacacaacaccatcttttatagagaaattgggaaaaaatagatatcatcataaaatcacctccttcccattgatgaactatcctcttagcaaggtcagattcatcaaggcgattaccggagctgaaatggcaaacacaagtaacacaatagtccaattcaattcaagtatttccaaatgctttccaaattctacttagacattgtgatcaccagactatacaactatcaaattcgatatagcaccaaacagatgctatagaactcgctgaaaacttagtaaacgagtggaatcagttcggaaagaaaaaaacggacctgcgaggcttattaagagtttggagtatagttttgcggcgaaggtaagcctgatcgatgtcgaaaggctctctaagagagcttgtcaagcgaggaagctgaactaacatgacaaaatccctgtacttgtgtcgtttaggattcttctcctctgtggtgttttcacctctggtcggctctccgaggaagaaggcgatcgcttgcgttctaaaacggcgtcggttagatacttgaacatataggcccgtacaccgacccg

SEQ ID NO: 27422 - DNA, 1819 bp, Arabidopsis thaliana landsberg
  unsure (1)..(1819): unsure at all n locations
tttgactccaatattcttcatgtcaagaatattcgctgatccaaaggaagttacgacaatgttagttcctcttttcggagaatgaccaaagaaaaaagaaatattcaagattcttctgacaaattaggataaaccacaaagacaaacaccaagagtagaaaagatgggtatataccatcatggatctctggtgttgcagcagctgtggcatctgtaataacagtcacattgggataatccagcgccactgcatcaaacaccgtttgccggatacaattcggcgtttgcacacctgaaaatccaaagggttacagaatccgagagaatggtatagaaacaaaaggagtcaaataaaagtttagtattaagacacataacataactcaccagcaatgactaacttggttaccccagaagttagcaagaaggaatgaagattggtactaaagaaagcactgaaacgagttttcacaatcttatagtcatcttcttctttgatcatcaatccatcaaccaattctgctcctacggtgcctttaacaactggcccaactttctcagaactgtagttatggcgcctgaataattcaacatctcttccttgaggatcatgttctcgaacaacctanaaccatgaaaaaaacactttgtcaactaagcctgccacacactgaatcgaaactagtggtatctcatatgctttcatcagtatctagacaatttgaacatacaatccttaaccttcagtaatcaagccagagattttgtggataagaaaagctctctcaagagttgtaacacttgacttggaaactaaagatctcacattaagattctggaaacagaacatgcaagcaaaattaagaacccattttactccattttcgcttcatcaagatttttgatatcaagttcgaattcatataacacaacaaccaatcaattccagaatttttctaaatttctcaagcaagttacaactacatgccttgaaaaggataagataaatggataaaatacccaaattacgagaataccacgctgcctcgcgagttcgacgactctaataacattgggaactatagattttcctcctttcacttgcgtcacagcaccttcctctatgaaatcgttctgcccacacaaatgaattcaatcaaactctctaaaaccccagaaaacacacaaacacaatcaacaaagagagagagagagagagagatggagacctgcatgtcgatgacgagtagagccgtgttcctccatctctcggccatagttcgttccccacaaagcgaacaaagagagattttcgagcatagtgatgcttgaattgcaaattattagattggtgtggctcctttggcggaatcacggcccatctgtcttctcattcggcccaacaataaagaaaataatatcctcgccgattttgtttctttttgttgtccaagaatccaagatatatctaaaccgactggtactgaaggaacaaaacaaacgttgcctagtttaaattttaaacctgctcaagcatcacatcaccaagattcacaactgactaagatacttatcagaaagccacggtagaaaagaatctcctgtattaacaaacttttagtttaacttatagaagagaagagaagaagaaaaactaaacgaaaaaaaaaaaactcttcttttgcaggaatcacacgatcttctatgacccgggcttggatatctcaaggtataccatttgagtatacccattgaacactgacttatccagccgacctaaaccgattcgttggaacaaccggtgcttgccatctgctac

SEQ ID NO: 27423 - DNA, 2235 bp, Arabidopsis thaliana landsberg
  unsure (1)..(2235): unsure at all n locations
cgatataatacaagtaagacatttgcaacgagaccatttggaaaagctaattaatcgagttcgtcaaacgataccgaacctaaacataacattgtaatttggttttagactttagtttctataaaatcaaaccaaaacttaaattggattgcccactctattagctaatgtttatttgattacctctccatttggctgagctgtgaacccagatgccactgttcctttaatgatcttcactcccttgtttgtatagtaagtctcatagaaagcagcaatatcggcggtgaaaagcctaggcactgcgtcaacattttgttttcattacgtgtaacaatgtcatatattacatgaatagcaaaaggatactagtcaacttactgcaccaaggttcagggaaaaccatagtgacatctaaattgttgatccttaaaactgcactaagctcaagaccaatgtaaccttcgccaacaactacagcctttccacctttcttagctttaattgnnnnnnnnnnnnnnnnnnnnnnntcaatctctctcagatagaggatattcttagagtctgcaccttttactccaaaatcagtcaatctgagaacctgcaaaggaaggtaaagagttactttcttcttgtaatagaattcataagaagcattctgatgtgagaaatgcaagtatatcagtctttacagtagaaccagttgcaattatgagcgtctgatacttgaagacatccccagttgcactgacaagactcttggcagagagatcagctttcactatttctgtgcttagtatcaactcaattcctacaaacacaatggataacaaaaaaatcatagcacgatttagttccaataacataagtaattaagcttgtatagagagtaatgtaatgttataatagatcagtgggactacacagatgagcagggcattgatattggtgatgttgcagacagttcattacctttctgcttgtaggattcaggaagcagtttttctccaccactaccaacacagcaatggaaacctggtagtctagcagcccctgcaacaaaaaaagattatcataaaaagcaaaaaccaaagccaagtttcagcaaatcaaaattaaacgttgtagttagctaagtaaagtagaaaattgtcttaccttcaggaaacaaataccccttgctaagtgcagggcgttcatatggagccacctaagccaccatatagagtaaataaggtgtgaggattagagaagacaagtccacataaggatcatcatatcataggttacaagacacactgcataatcacagttttccaaatcgagaggaagcttaccgcctctttcgagataacagccaattctcctggttgaaccccttgattggcaaactccttagctgcgtatccctacacacaaaaatggaaaaaaggatacaacaaaggttaagagttgaatttgcttctgtatttagttatttctttggaattttcttcattaacatctgtgactatacgattaatctgagctagtataaagtaaagaggatcctgatgatactatgcttactattaaccatctgcaagtgattttgcagagatacacttttctcacacttaacaacaacaaaagaactagaactgaatcggaagtttttaagatgtgaatctgtgcagaggaaaccagattacatccatgttttacgtcgaaaaaacaatcaatccacatacgattgtttgattcaaaatcaagtttcgattgtaaattcatctcaacgatactagaaagtagaagcagagccgccgatctgacgtttaaatctatgaatcacaatctataatcatcgtaatcgctatctgattaacaataacaaactccaagccaaaaaaactacgagaattgtggcatttcgcaacacaaatcgaatcaagctcttcgaaaatcgaaagcaatggctgaaaaaacttaaggaggaaggaagatactcacggcagagacgccgccgccgaggatgatgtacttaaagctcttctccgccattttatccgatcgtgtgaaagcgttttgttatcttgtcgctgaagttggtttgttagataagcaaagaaagagcaaaaaggctaatatgagctgagtgactgtaattggctaaaacttaaccaggacttggccgttgattggaggatgtagatgcaaagcttacacgtggcaatattgtgaccgttgaatttatcc

SEQ ID NO: 27424 - DNA, 1024 bp, Arabidopsis thaliana landsberg
actttgtttttgggcaataaaaaacccctaaaactgaatcattcctatgataaaatctcctacaaattgttcattcattggcgcaatcgatatgcaagtcatcctggggaatttgttttgactatatattgattacatattctatgatcaatcctttacagaaatcaatagattttacggtttattaatgcattgcggatatttccaagacattggtctcttttatcttcctaagttttaagaggactcattagcaagaacatcccacaacaccaagtagaaccaaactccaagtgtcttaaaaacacaagaagcatcaaacaatatcatcgaatgagataggagcttttgcagtcgacacttttgccttctccttctcaaccagagcttccatttctaaacacttctgcttcatgtccttcaactcttcctccatttcttgcagcccagtctcactagcctcctcattctccttcttttctgacacttcataaagtttcttctccaaccaatccagtttaaatccagcatctctcatggatcccagtgcatcgtaagcatccaacagatcatcctttgacatttgctgaggtaactggctcagagtctcaatcagactgagtagtagactcatgtaacctgtcctgagatttgggttctttggacgtaaatcagatgcaagctctgggtgttttgcaaacatacgactcacagattttgcctgtgagtgaaaaaggtgaaaatgaagtagaatgcatatccaaatagaagttcccggagacaccacaaaagcaccatatcatagaacaaacacatcgtgttttctctcgtggataaaatttctacacaaaatgatgttattttcttacttgtgaaggaaggagttgaaagccattaacatccacagtttccgtgattgttgaagtttcctctgtcacatctaatttgccaatagtttcaagaactttgatcttgacaacaatcttaagttccccgtttaacagaaatccgctatctttggcat

SEQ ID NO: 27425 - DNA, 1485 bp, Arabidopsis thaliana landsberg
  unsure (1)..(1485): unsure at all n locations
tggaaacatgtattcatttcggtgaaatctaagtgttgagtttctcttcacaaaactagatttcatcccccaaagatttttccgtgttccaactaatagaaaaatgtatctattccggtgaaatctaagtgttgagtacgctcttcacaagactagatatcatcactcaaggatttttccaatttctaactcttaaaagatgtattcatttcggtgaaatctaaatgttgacttcgctcttcacaaaactagatttcatccctcaaggatttttccgtgttccacctcttggaaaaatatnnnnnnnnnnnnnnnnnnnnagtgatgagttccctcttcacaagactagatttcatccctcaaggatttttccgagttccacctcttggaaaaatatattcatttcggcaaaatcttagtgatgagttcgctcttcacaagactagatttaatccctcattgatttttccaagttccacctcttgtaaatatattcatttcgatgaaattaagttttgagctcgctcttcacaagacaagatttcatccctcaagaagttttataagttccacctctcggaaaaaatgtattcatttcggtgaaatctaagtgttgagttcgctcgtcacttgactttatttcatcccttaaagatacttttgatgtccgaccatcggaagaatgtgctcattctggtggaatttacgtatcgatttaactcttcatggactcaaattccaggtaatgcggtggcgattcattttttcggaagcaagaaaaaaaaaaagaaaaaaacgtcctatgattgtccgagatgtcccattggctacacaaccttaacaaagaagtcctgagtctacacaacaacaacctttgtcacctccaaaaaaggagcacaagtttaggaagaagcaaggctgagtctactaaggtcaactcaatcgatcaagccatggcacaatgatgcagagaagttttcttggagtttcttcgaaaatcattagcgtatgaacttcaacaattacaaccttgacatgacaagatcatatttgctcaaaaacatttggatcatgtatgaagcatcgaaaataagttcaactatggtgtacacgtttactccttaacgtgaaaagtctccatcttaagttacgcaaaattgttatgacgagaagcatacatatctaagaccaaaacggtgggatgaagacaactgaagtcattatctacaagcaaataaagcaaatcttctccgaagtataggagaattttatagcattatcacttgacgtgattaacgaatcgttgctacaaatttggagtccttatttatatcatcacccaaaattcaaggagtcaacattcgacatttatcaacaagaagcgattcaagtttgaagaaacaactttgatgctttacaacggtcttctaatggtgttcaccggcatggagatgcgaattccatcaggtggcccataagtgctga

SEQ ID NO: 27426 - DNA, 1503 bp, Arabidopsis thaliana landsberg
agatgaacaggttcagccaactgaggaaaacacagagggagcagaagcaagtgtagctgcaactaaagaaaccgaggagaagaaagctgatgatgctcaagcttgatggttataaagtcaggtagttcatacaaacaactctcaaattcaaaaggcggttaccataatatgcttgttggatttgattgaacacttgtttaggatcgtgaatttatacttagaacccaagaaaatgcagaaagttggttcttacttcttagccatagaatcttgttcttattcatctgaatttcattcttatagtttagaaactggtgacttagattaattgatgatctttattataagtataaacgtcgtatgaagcatcgtcattcacaatttggatactatattcttcaggtccaaagtctacacctttcgtttctgggttcttttgagagttgaagcttcaatcaaacaacaacaatggaggttccttttttaattatcttgtcctttttcaaatttttgtggtactgctgtaattttaagtcagaaatgagattgtagaacactatcttcgtgacatcttttggaaaatcattacggattgtttacagaacataaatctttttactatgactcttatagccaccaaattttcttgaatcattttgcattagttttataaaatttggtattttatggttccaacttttgtttgtttcggtcgtttggcgtattctcttatgagcttgatcctattgtcctggtcggtttttatctctgttaaactgacatagatcctattgtcctggtcggttttaatctctgttaaaccgacatacttcacatatatttactattataaaccccaaattagaaaactcaaccaaaatggtttttactaagcattcagtgtttttttttttttttcatgtttccaatagtaacatcagattattaactaataatcgtagcaacggcaaaaaccatatcaaaacagcagaacaaacatcccccaaaagcctcctcttaaataggttgtctctaaacccttcaatctccaaaacataataacatactccattaagcaaaatctaatctcgaaagaagagaaacatggataccaacgcaaaaacaattttcttcatggctatgtttttcatctatctatctttcccaaatatttcacacgctcattctgaagtcggtatgattactacatctctatttcattctagtaaaattaatcttttgtatcaaaattcagacttaatgatttgttattaactttaatctgaaaacagacgacgaaactccatttacttacgaacaaaaaacggaaaagggaccagagggatggggcaaaataaatccgcactggaaagtttgtaacaccggaagatatcaatccccgatcgatcttactaacgaaagagtcagtcttattcatgatcaagcatggacaagacaatataaaccagctccggctgtaattacaaacagaggccatgacat

SEQ ID NO: 27427 - DNA, 1431 bp, Arabidopsis thaliana landsberg
ggtgggattttcgtcgtacttgcatatctcgatacagcaatgtatgtccctgtagactgttccattgatcacacaagaagaatcaatcacatgcacatctgtctcaagttgtactaaaaaaggcgaggagagatttagagttagacctcgacaagagaaacgaaagaagcagccatcatagcaaaaatatcccctgcattgaaagttggagctcctccccattgaatagggtgaggcactctaatcctgcatgcgtagcatttaaaaacatgtctagataaactaaaggatacgagttttatgatctattgccatggagaagcgctaatgatgccagcacggtcggttctgcaactgatttgagtattgaattctgtgttactataagccccaccaatggttagaatgtatgcataaagccacacaatcaccactgagaatatcacagcaaaccggtggaagaagttagaacatgtttctccttgcatcagatgaggaatgtactgcacacatcaacaaaatggtttggttatacaacacagaaatgagctttgtttttagattatgggaagatacttacctgtgagaatatgacaagaagtatgatctcaggcagtccaatctcaatgcattttgctagctgtaatatgcggaacacaaactcaggagctgaaagtaaaaactatccgagaatgatatgtatgcataccatagggaatccttgttcatagagtccaaagccagaaaaggctacaagaggaactgcagataagggactcaaaaacctaaacaagagaaagaaaaactacaatttagacctgaaaacaccatcatcaagaaacagaggaaactcactacatgtatgtatttctaacctagtaacattacgccaaaggccactgaagccaaggataatttgaagagttgaagcaacaataagagcaccttgggttgcccgaattatcctcttaaatcgctgataaggtatcaaaaaggtaatttagagtaaaacttcatattcaagcataactttattgatagtgatagtacactaaatagataataacacaattcaattaggggataagtgtgagctacgaacctcaactggatctgcaacgtcattgaatctcccagaaagcatgattgagatagtaaccgggacaaatgtataagatgctccaataacagcaggtaatctagttccaaacacagtttggagcagtgtgttcaatccagctacaaacaatattgtctggatcagctttgccttctcttcctgccaaaatcataaactttaagtacaatgaaagactgaaaagaataatgtgaacaactatctttctagaaaagagacttaacttacatttctacctcccatttgtggaacaagagccgatggaatcagaactgttcgttcaagcataacag

SEQ ID NO: 27428 - DNA, 1367 bp, Arabidopsis thaliana landsberg
  unsure (1)..(1367): unsure at all n locations
atttttccactgacttacagttttaatatagtggattcaaaagtcaaagatctgctttttcagtttctgtgtgggaaaatctatagctggacataggaattgtatggcaaaagattggcttatccagagaactttgagtatgagtacatttcatagttcttgctttgttgacaaagttgcgtttatatgactcttatgtttggttattctcattgaagtggacagaggggaaattcggttactcaatacacgagaccaacacttcctgggggaaaaccaaatggagcacatcggttctgcagctacatccaaacacatgggttcttgagtacagccaaagctcggtgatggatgatagttcaagtttgttgtcactaacaatcgatatcatgaaacacttcgtgttccgagtagcaaagaatgtgaatcgggagcgttattggatgttttcatcctcacgacgactgtatagagaagcagagtcaaaggctagcgcaatgacaccaacttagaaacttatgagaaaaaaaaaatattcccctatgtggttccttcgtattaagagcattgacatcttgtcttgttttaggtatagttatgaacaagtacttgttattgttactgtctagttgtagtagtactcaatgactcaatgtagtaagaacacacacacttggttcttcgattcgttgtctagttgtacaagggtaggcactctcggatgtactagttgtaagttcctgtttcattgtcatttgcttggttcactgtgagaagcccaaacgctttcgttttggtaaaccaacggccttttgtaacccaaaaaagataggtgtaactcagttcggtttgatttaataaaatttcgagttggttttcattttggcttgatttggttacattaacaccggttatgatttgtatcgtcgtatcgatttcaattttagttcggtttatatttttccacattggtttttcgccctctccggttataatgtcgaattaagtcagattcgaaccggttcttccccatgatcgattcgattcgatggagtgaggagagagaaggactataagtttccatgagaaagaagaagtaatcacacacttgttcttcgattcgtttctgggaactgagaatatttaagaacacgatggctatggccgctttaaatcagctttttgttgtcctagcctcannnnnnnnnnnnnnnnnnnnnnnnntatcttttcaattaaaccctagacaattccagaaaaatcaactctttttctacaatcaagttttacccaatctatgtatgatacaggtttcaaacttcagcaagattgtttctttgttcaattagttttcctctgaattgata

SEQ ID NO: 27429 - DNA, 2092 bp, Arabidopsis thaliana landsberg
tcgccagaatggagtgtagaaacatgactttgtccccacgtgacaatataattctgaccgaaagtaacaaatttttcgattcctcgtcctccgaaaaccctagcatcaacccttatgatccataacgttactacaaaaacactaaagattctcacatagtccatctttgatttaatttttgttgtaaggtactatagtgttgcactggtttaatagttaaaaaaagtagaaagcatgaaagatatggaggagacaaagagattagagtcacatcaaattctctatacatctcctacacgccattcttattatccccatgctcatcggccatcatcaattttttttatcaaatattatcactttctttttcaggatgttgtgatccattagtctcttctacaataatatgagaattatcttgattaatttgatcgacttttggtaagaactagtgcaacgaaagattgatgtaaacgttaagattaatcgtacaagattgacaagatttttgttgttactagtaacaaatgttaaaattcaggttttttgctcctaaaacttctctagattgctgcctaaccgaaatcccttaatgatgagtggtagataagattttagaagcttaagctatacaatatctatagaagattacttatgtaataaaagtggagatcgacatttcgtcaatattatcatttttagtcccattttccccaattttaaaatagttcacatctcgttgtgaattgtggtgaatatattactgtcgcgtcgaaatttttagtaacattaagtcgaccaaaaaaaagatgagagacgagaaagtctaaagaaagtgtaataagttagattgctggagtttacacatctatgctcgttctcctctaataaccaccaacagagtaaattggtaacattccagtagatgttttgtcgggcaccaaatcgaatccgtagggttcccgagcattgaaactttagaaattaagctggtaattggagctttttgttgttcttccagctgcaatcataacgggggaaaacgattacagtccgaggaagaattcatagcgttaggaacaaaaggaaaggtgagggaattgttaccttaggaaataataatagaagaagtcggcatagagcagtgtttgaacaaacccggcgatccatgctgcatcattgtaatcaaacatttttgaaatgtcagctgacgaataataatcaagacaacacaagattcatgtatctattgaatctaaatgctaaatttagtcagactttatgagaaaggaaaagggccataattgacatcacatttttagtcataagttgcaatagttgacaaaaactaatccaattaggaggaaaataaacagatgctcagtgaaggttgagagagagagaggaacatacttatccagtgaacaaagtgcggctcagtgaagtaacggtagatccagttgaggatgtataatccacggtaccccctgcaagaagagagcattattggtatagcaatcgaagtatgaaactcagagggaaactaaattatagagtttggcaagagaactttcaatgatgtatccagtcaagagaacgacgcaacgataaatttcaagtaaagggaagttatggaaagaagatcgtacccaaggagaaatatatattgtccggtcaagttgtcaatatttctagtcctttgcaacaagacaagctgaggtaatatggcaacagcctccaagtacaatgaaaacgtccacaatacctgacatcataaagcatacaccaattgcacaaaaataaatcagcttgtcaaacaaaagagttcaggctccatggaaaacaaattgcaatctttttgagaagacaaacctcaagaaaggtaaacttttcatgtatcaaaagagctaagagaaagcaaggaagcacaaggaaccaatgacgaaacgtatcttgctctctgtcgtaagtcctgtggacggccttatgatacttcatgtaccacacaatcgaaaaagaactttctaaaaacaccaacttcatagaggtgttgtacagagacacataactcgtgaaaatatccaaataacgc

SEQ ID NO: 27430 - DNA, 4156 bp, Arabidopsis thaliana landsberg
ccttctcccgaatcccaccattctcatgaacaatttttttttatatcctgcaaaccattacgaggaaacaaagttgatgatattttatatgcagagaggttgtttggaacatccttcactctaagttgatccaaacttcgtaccttatgagttaaaatctcaaattcgagtagctcctctgtgattttctcaaggacacgtcgatttttaaggagcattccctttgccttttcgtacgctaagtcataaatctgtaaaggaataagatgacattagagactgtagaggaacaagatgacattagagaggttatgtattttagccttggacaatgcttgaaccaactgaaaagcgaagctgaagatagaaaattgcgaacactagagaggcaccaatgacactggcagatattaagaacgtattggaaactagagagcaaaacaaaccttttcaactttacccgccatttcatattcgtgattgttccccatactcaaagctgaaacctgctcattcgaatcaaataaaccaaacagaaagaaaaaaaagtataaggtcaatcaactgaccagatgcgacatcagaatgaatgcaaactgtatgtaagatcgaatcatcatgttcagtattcaacatgttggttcagtggtatcagacatttagtcttggaatggaaccaatttcaagtaaaacaatgaaggttaccgcgttagtagcatagtatactgcaggactgtcatcgggtccccagccatattgaagcaccatacgtgttgcaatctgttgcaagacacaaataataatcatggggaaacgaaacattaagtatgtagatgacagcataccgcaaaacagtagacagagtttacctcctgcgctttagttatttctgaagaagaaagaaaattttcatctccgggaggaagaagcatttgggatgcaatgtgagatccaaagcagaaaacgagcttcttttcaagatatgatcttgattccgtgttcccaatcgcggagcctccacttgtgaccttggtgatttttgtacacccaattccttcccaggaactaggctcaagccaaagattttccacaacatcaaagtttggtattagaagtgtgatgagagcacgaccagccgcccagacagcatgtgggaactttgtctccctcgtccaatcaacagtaggattcaaaagttctattccattacttatttgtccatatggttccatcagatcaaccacattctccaaatcatctttggttaagttaagtccaagatgattcacaagcattttgcccattttctttgcaactttagtttttcgcagccatgggggcactatatggctaaacgtctgtcagaaaagagaaagaaatcacctgatgaaaccatactaagaaatgaacaaaaaatggtttgaccttaggcgacgaaaatgacaaatttcttaccgcaaaccagctaacgtaactcagaagttcggcagtgtccacaaatttgcttctgaaggcactactttcgagagccattggaacaagtttcagttctatcggtcttaattaaagctgacttctctgaaacctgtaaccatgacctggttattaaaatagtggaacagaactacagagagataaacccaagaaagaagaaacacgacatgatatagtactcacaaccataatagaaatgaaccatcaaaactttggaggtgcaaaagaaaatagacaataggtaaaaacatatataatcgctagcacatataaacaactttgcaaagcttaagatcaccttacgccaatccactagatcaacgagttctcggtccatggtttcttctgcagcgttgtgtaaaatcctctccctttccatttcagttggactttgaagatggaatactctatccatacgacctggccttcttagcgcctcatcaatttgcttatgatttcgtgtcgtcgccatcaaaactacgccatcctgtttctcaaagctgcataagtagaaattataaagtggaatgacatcagaaaagtcaaccggaaaaaggagaatgctactttgagaaaccgctatgaatgcttcaaatctggtcttaatttttaatcaacatagaaattggcttttacccatcaagttcaacaagaagctgattaatgaacgattcatgatcttgctgttttgtatgtacaaacttcccgcgtacaccagcaaagaggtcaaaatcctccacaaaaatgattacaggtgcctagtcatcacagtaaacatcagaacataagatgacattgaaactgatgtacataagattcggaacctgaatatcatgagaactcaaaatttaatatctatgaaaatgaatgaatcaacaaaaaaatctgaggcaaagaagctaaccaagtctcttgcagtttgaaagagttccctgacattcgctgcactttgaccaacccatagcccagcttccaactcttgagcttcaacattgacaacaggcactcttgcttcggctgctatagcgagcgccagtgacgtctttcccgttcctctctcacccacaataagaacgccctgcagcgtgaataagcatgcttacaatcggacactatcccacaaaataagcacacaaccgtaaagcaacatacccgaggtgcgcgggctcccatctcctgaaatgcctttggattctgtaaaaatgccacaacctcgttgatttcttctctcatagactcaatactagcaaagttctttaatgggataggtggatttttcactctcttcattctgtcgaatgcagtttttatggggtcgattccagcctttctcttttgtttgattctcctttttctataagtaaaatatgatttctgcaaaacaaatcaaactgattttagtaatcaactgtaagtgtactagctacaatactactgctcacgcaaattgagagtgttggaaagagaagcataaggagaaagaaaagttacataccactctccagaatttccgtacgttgggatctcggcggaagggtccatagccaagaagtctaggaacctttctttttagaaagcggaaaacgtgatacaaaacaaacccgtatatagaacttcgaattagaaaccagaggaaccactgaaaatcttctgtattgcgggacttgaaattcatttctgcttcagactgccattgtaagtaccatgttgagccaacagtctgttctatttcttctggccaagccattcccagacgcagccttaactgtatcagaaaaaagtcataaaacaaaaaaaaaagccccagggaaacaggaggaaaatatccagcgagcgtacattatacctggtaaggaatgataaattcgataactggaaacacagccgccatcataatgtcatcgtttatattccttattttctctaagactgtatccttcgcatttaatacacctcgcagtcttcctcaatgcgttaaagactcgagaaaccacccttgtaaccaacagaaactgttgttgaagacttagctctgacatgggtatccacatcagatgaacagaagttgggattccacaagcaagcattttgaggtacagagcatcaaaccctccaaatttctcaaatagcatctcatattcctacaaccatagacaaaagttaaaagcctaaacttaaaaatccatcaaatagagaaggacttcaactggtcaaccttgatatcaacgtaaaactccttgtcatctccttttaatgcaacatacattacagcataatcatgcctaatcctggcactgtcaatcagcttcctggaaactgcgtagggaacagccatagggtccatctcccacctacttttgtcttcgttataccaagtcttcgaaacaactctatctcgatccaggagaacttgttccttcagattttaaaaattcattaactaattggtgaatgatcaatacatgggaaaataaactctgcaaaagacacatatgtacataaacttttcaacaaggtttcaactaaaactgtctcattttaagtattacagcgagccaaaaaaaaattaagtgcttctcacttgcccaagtaaactgatttactttatagctcgagaagataacacatgaaattgcatattcaatatatataaaaaaaaaac

SEQ ID NO: 27431 - DNA, 1367 bp, Arabidopsis thaliana landsberg
taatttacatacattttagataattcatcaaaaattattttatgattttcattatttggtgaacaaaagcatattactaaaaaaatttgtagagttttacattctgagtttcataaactagcgttcatgttttaaacgagaatggaacttaaatgtttagtaatgagttctataataacaaacaaatctaaattcggttagatcatcattataaacaatggatcttattttgttgtaaatgttgattaattgatcaaatctaagtacatacagcatatgcgatcacaaagaacaatattttaacggacgatttcatatcaaaaatgatagaagttctctctttgttcatgattctttattggtttcttatattaattcacctaaacttttgtcttttggaagaagtgttataatgttcacacaaaataaaattacatatgatgatcaaaacttacactcttttcccagtacagccatcattcaaaattttcctctataatggttaaaatgtcaacccaaaaaaaaacggtgatatatatattcctaaacatattggaaaaccgaatataatcataaatatgtcattgtacaaactactatctatttggtttaagaccacataacaagttttatctaccaaagactgaacctccatattcatcacagaccattgtaaaatgtaaaccctttgaatgaccccacatcaaaaaagaaagttagaaaacagtaacctctttgttagtttaggttcgatccaaaacttatttggcaggaatgcttaaaattctatatacttataaatttaagtgaaggtaatatatatgtatggaatgaatggatgtcaattcaaataagtggcagtgagtagcgacatgatgtccctgagcaataaatgcgtgaagacaggagtttggagattggatgaatgtaagaaggccttttgaagttatggatttcgacgcctagcttttttttttcttttttttttttgtgaaactttgaggcctagctaacgtttaaaaaaagaaaaaaaaaattgttaagagttctcttattacaaagtaatatatgaccgaaatttagtatgaactccgaactacgacttcatgcatgtatgaaagttggaatgatagcaaagaccaagattctagatcgtgctcagtagtcagtaccaatgagaggaagaagagcgtgacgcatttcagaaccggttgtgtgtccgtatggtgtccgcagtggaaagtggaaaatgaacaagttgaataactcatatactgtccttaagatacttccagaatcacatcaacgtattttagccgatataataaattcgacagttggtgttgacaatatatgtaaatgtaacc

SEQ ID NO: 27432 - DNA, 1569 bp, Arabidopsis thaliana landsberg
  unsure (1)..(1569): unsure at all n locations
gatcaaaaccttccatattgtatcagtatcacacacaatgagtaaaacctccgtatggtatgcaaatgatcaagtttccactttttcacctcgaaagaacctttctctatcactgaaaatggagtatcatggacgtagtgtgatggttctttcaagggtgatgatatatttttgcattaaaagttagagacgaaatctttctcccattcaatgcagaactaaaaagcgttagtatggactatgaatgacatgtacatatgatggagcatcatgaaacgttggtacgtagtcttccatacaaaaacaaaattgttcaaaaccgatgaaaatgacatcaactctcgaagattgacttttcatgcacgtcttaaaataagtttttcgcttcttgaaaattgctttagtgcttttattttgtttatctcagcttgtatttaattctaaagctgattagtgattactagtacattttgtgagtgacattttcctangattntatatctccggtttggctaaccgaaccgaccatatccattaattaatatattttcatttggcaaaaaagtaaacgaagcccaaacccatttagcttttgacttgtgttgttcttcgtcgctctgtcttaatattccctcaccaactcgtttcatttggggacaagcttcttcgattttcctctcagaccaatcgggctttcgaatcccatcaggttagtgtcgatctcaaagtagatagtcttaggaagaatcaaataacaagattgattctaacctaattcttcggtttctatgtcgtcatcatatggccataaaagatttaagattgggaatcgaaacgaattgtgatgtttatgtaactttatggagtggttttgtcgagaattcgtaaaattcgagggctctgtgcaattgcctcacaaccggctctgggtttcttaatgtgcttgtgatataagattttttgatatgatggatttggctttatgttaagtaaaagtgtgttttgattctccaatcaaatcctgtatgtgctttatttcatctctatgggctcttttttcgaagtttagacagaatctgtgttgaccaatttacttatcacacttagtagttgacattcacaaaaaaactgtattattgaaatcattagtcttatctagctttctcatatcctgaactcgaaatgatggttttgtgataatcagctttcacaattcttgatttcagtagaaatggctacatcaaggttccaagcattcttgaacagtcccattggcccaaaaacaactcatttctgggggcctatcgctaattggggttttgttgctgctgtatgttttctctttccatgtctttttttattctatccatctttttgggtgattcattatagttttcgaattgatttcactatagggtttggtggatatgcaaaagccccctgaaatgatttctggaaacatgtcgtcaggtatgataaaagagactgctcttatatgcaacattattagctaagcctctcacgtcatcttttgaatttctttgtacagctatgtgcgtttactctgca

SEQ ID NO: 27433 - DNA, 1528 bp, Arabidopsis thaliana landsberg
aatacaactacttgacattattccttctatcttaattactaagatatgccaattctatcctcagtagattgggtaaattgtctttacataagaaattagaaagataaagtagtagtagctagtccttacgcaacttggtaaaccaaaaccggaataaaatctacttgcaaagaagaagtaaaaccatggtcgccaacaaatatgcttactctatttagcttaagtcatgaatcatgatcactcctttttattctttatcaccaatcaaattcattgtattttaggatgtataatgttgacatcaacgtaagcaaactctggcttttttccatgagtccgactggtatattttaataaatgtgtgattaacaaaccttttgcttgtctactaaccaaacaaatagtggcaacaagtaaattagatcaaatataaacactgtgaacaatatgagccgttgatcataaattaggcgtaagaaatagatacgtacagtagaaaataaacataaatgtatatacacacccaaaaataaaggaataaataaccaatgaattaaaagtacattaaaggattccgacagcttcttggccaatcaatatcacagatttaaaagtgacaagaaagttcataaatttccactatacaaaaatgggaacgagtattgcatttaaaattgtaacctaggcataaagggcagcaatagttttttttttgtaaatcggggaattcaattttaacttaaattcgtaaacccaccacgccaaccccaagagcattatatcaatttattcactcattaatttatctgttcgtaaaacaaaatgtataataacaatactcacaaaccaaaatgtcttcataatgaactcataacttgtagagtaggcgaattacatgtcttgtaaattagtatatagtttgtttttgtcttattttaacaactactatatgttatattcctgaaattttgtatacttttatcatgcaaatcaccttttttttaaaaacgtaaaagaaaaagagggaaaatggtaacaacaaattcgaaataaataaataaaaggtgagtccctgacatggtaattatagctaataataaagggttaaaatatctacgcaaacacaaaagctgtcttcttccccaccacttatacagcctgtcatcactcctattggttcataaaacgacaaaatcctacgtggcatccattttttttcttctcttcttctgcaaattctctctatttatacacaaaccttccatttctcttcccataatttattcatttcaccggaaaaactgagtcaactcagagcgagttaccattaccaagaatcatttaacactactgaatacatatgggtatatgcagctcgagcgagtcgactcaagtcgcgacggcgaacgtgatcttacaagatgggaggatgatggagtttgcgaatcccgttaaagtcggatacgttttgctcaagtatccgatgtgttttatctgcaactccgacgatatggactttgacgacgcc

SEQ ID NO: 27434 - DNA, 726 bp, Arabidopsis thaliana landsberg
accatacgataacgatgtgcttgaagtttccaagcaacttcagatacttcctagagtagcttcaactaaatgcaagatccaagtaatttctgacaacctcagcttatctttttccttttccacaagtggactcaccttcttcaatagtacctttcctgtttgaagattacccttcttaaagacgaccaacattgttttggttatagtttttagcttaagcaacaatgaaaactattactttggcctctgttctgttatttgcgtaatagtctttcagattcttaatatgcattccactttttcatgtaatatgtacacttctataggtttccaagttctcgatttgtttcagactaatccctaaaataactaaacgaaacattaatataagtaatacttagaagatatgaacagttctattgttggttttcgcctgtagagatatgtgttactcatattggctcttctttgctctttgtttctacacttcagttccgttgcaaagctggttattcaataggctctcgcccagacgttcatagtgtcgatcacttcctattctcctaataattgtcccaagaatcaatttccgaaaatgtacgaacatggctcttcagttctagtaccccacatatctcctatttaccatttgtcactgatgagcttgaaatcaaagacacgctcatcggaagtcacctcaacatcaactataacttcgaatgtgtt

SEQ ID NO: 27435 - DNA, 1853 bp, Arabidopsis thaliana landsberg
  unsure (1)..(1853): unsure at all n locations
ctcccctatttagtgaactctacattgaaaaaccaaaaccaaaacaaaatttcgaagataatattttccacttgaataaatatatttggttggttcgtctttggcattctaaggaggaacccatgtttcttcgctcagtgtcgtcctcatttatcttcactcatggtgttcctcgtaagctcaagaccagaactgcctttcctgtaatgcttgcgttcttgttttctaaatcatcccattgaaactccattgctttaacatggttctgattttgtaactctgctcctctttttgtagactctttgtgggaccaggagagctagttttgctgctatatctgtttatatctctgaggatgaatcatttcaagaaaagagaattgatttcgtggagaatcgtggaattcgacctaatcatcaaactttgaaatggcttcttgaaggatgtttgaagacaaatgggtctttagatgaaggaagaaagctacattcccagattttgaagttgggtttggatagcaatggttgcctctctgaaaagctttttgatttttatttttttaaaggagatttatatggtgctttcaaggtgttttacgaaccgttttagagaacgatttttacttgggtaagattaggggggagttagcttctaggaatttgattggagaagtgtttggtctttttgtgagaatggttagtgagaatgttactccgaatgaaggaactttcagtggtgttttggaagcatgtcgtggtggtagtgttgcttttgatgtagttgagcagattcatgcaaggattttatatcagggcttgagggatagtacggttgtgtgtaatcctttgattgacttgtactctaggaatgggtttgtggatttagctagaagggtttttgatgggttacgtctgaaggatcatagttcttgggttgcaatgatatccgggctttcgaaaaatgaatgtgaagcagaagccattagattgttctgcgatatgtatgttttaggtatcatgccaacgccttatgcgttttcaagtgttttaagtgcgtgtaagaagatagaatctcttgagattggtgagcagcttcatgggctcgtattgaagttagggttttcctccgacacttatgtttgcaatgcacttgtgtctttgtactttcatttgggaaatttgatatcagcagaacacatcttcagtaacatgtcacagagagatgcagttacttataacactcttatcaacgggctttctcagtgtggttatggtgagaaagctatggaattgttcaaaagaatgcaccttgatggacttgaaccagacagtaatactcttgcgagccttgtggttgcatgttcagctgatggaactctgtttaggggacaacagctacatgcatacacaactaaacttggttttgcgtcaaacaacaagattgaaggtgcgctccttaatctgtatgcaaaatgcgctgatattgaaaccgcccttgattattttcttgagactgaggttgaaaatgtagttctctggaatgtgatgctagtagcttatgggctattagacgatttaagaaattcttttaggattttcagacagatgcagatagaggaaattgttccaaatcaatatacctacccgagtattttgaaaacttgcatacgacttggggatctggagcttggagaacaaatccatagtcaaataataaaaactaactttcagctcaatgcctatgtttgtagtgtgctcatcgatatgtatgcaaaattaggaaagttggatactgcctgngatatacttataaggtttgctggaaaagatgttgtgtcttggacaacaatgatt

SEQ ID NO: 27436 - DNA, 1475 bp, Arabidopsis thaliana landsberg
aacctggataaaacgtcaaccactttgtatgcttctcaaagaaacgaatttaatagaaggagaaggttttacgccggagtgggagactgatctagatccgccggcgaaaaagcagagccgtcacattcatcgtcggaaatcaagaaaggtattaactgttccttataatcgatctctcactcactatcttcttcttcttccctttccgctattttgatgaatcacttagaaatagtatcgaacatttttgttttctttctcattttggcgatgttcatagtccagaagtcaccatgttcttgtaaatgaggttatctggagtttttatttccgtttatattgttcttgaaatagtgcacggaaagtgttcgacgtatttactgtgttagctcatcgctcgtttctacgtctctgagatacaaagtaatgaaaaaaatggcaatttttcgtagcatggttggtcaattttcatatttacttgtgtgatttgagtggctagagagacaaaatctactgccttcagattttgattgagcatcgttttatgataatggtgaactctattggtttccaagttcttaatttgaagaagctgagaaattttcctctttggcagggtaattctctgtaggatagagagacatggaagccaagtttttccggttcttgaagattgttggagttggatacaaagctagagctgaggaagcagggcgtttcttatacctcaaattgggttacagtcacgaagtcgaacttgcggttcctccagcggttcgagtcttttgtttcaagaacaatgtggtttgctgcactggaatcgacaagcaaagagtgcatcagtttgctgcaacggtaaggagttgcaaaccccctgaaccttataagggcaaaggcataatgtacactgatgaagtcgtcaagaagaaacaaggaaagaagtccaaatgatctctctttgtattctttttcttccttcttactctgcagagacaactttcatctatttgtggtagattatggttggatttttatcaataagttttatttggttgtatgagacatcattttgttgttaagtctctttcaatgaaacaaaatgagaagagttcgtcttggaaatatttatgttttgtctaatcatcgttacaatagaactgaaggaaaaacttagagccaatacaaagtcactgcatatagttgagtataacaagccattgattgtgcaatgcagtagtcgattagtcaagcatgtaaatcctggaggcaatgtcttgaaccaaccaatcgaatccttccaacaaaccttcacccgtgtatgcgctgcaacccactatcttccagtgccggcttttatccatggactctaagtttagcaccttcataagcaagaagatgaaactcagtttaacaccaatttctactcagtttacccactaatctcactgaagttgagaaactgaccgagagacaaa

SEQ ID NO: 27437 - DNA, 549 bp, Arabidopsis thaliana landsberg
  unsure (1)..(549): unsure at all n locations
ctttctccaccaattggctaccaaaaaaaaacacacaaccattataacaaaatcaaagaaacaagattgtttcaagataccaaaaaaaaacttacttcaataatgtcaacttctttagcaactgcatcacaactagaaagccattgtccgatctcagctttccacgaggcattacgataaactactgcaccgtgtgagtcagcaggaaagcggcgatcaaaggcaacaacaacaagggattgacttgaattcttagtcacttgtgagattgattcattacttggtccacaaagattctgagcttgtcttacagtaatagaatcaaaagaaggcactacaggaccaagaaacagatgaaccaaggaaacgagaacaatgacagaagcaacagtggctatctgagaccatgagaacttccatttctggtgagaaaacatgatggaaatccgaaattgttagttttcaaagttgaccgcctgaaaatcaganaaggaagcagtttgattacataaacccacatgctcacgaaacacaaagtatggaattacg

SEQ ID NO: 27438 - DNA, 2272 bp, Arabidopsis thaliana landsberg
gatgagacaacagacagtaccttatatgtttatttgtttataagtctaatgattctcaatacaattaatgtagtaaatgtgcatatataacttttgtttgtcattcagttttttttttctttacgtctgatttattttgtgtaaagcacctatgataacattatgtgaatttcttttttttaacaagatttcttatcaaaaacaaaattagtttttaagtaaggaataaagagaaaatattcattaaaataaaaatacatacattttttaagttatcataaaattatatcgttaggtattttagtataattattttaattatattttaagtcagcaaaaatagatagcatttgtcaaaaatcaaacattatacatattttatgttatcaaaaaattatgactttagatattttagtataatgatataattaatttagtgaaaatggataataagatatttagatttaaacgtaaaagacacatgtcaaatcagaaagtgttcggtgtaagcttctaagaacttgtttttagaaagaaactttactttattattatatatatttgattggtttagttccgcaagtatctcagataaaacctaaaatttctggtttgaataattcacttagagaaaactatattaaatatatggtatctaatgcagaggatggggcctaaactgagaaactcttagtaattaaaaaaaaaaagattttggtaaaaccgtacaacttgacttagcaaaggcataagtatttttatcaacatgcacttgatttgatttgaatacgaataaataacttgaataaaaattcataaatttttaaacatcatttacatataatttaaaacgaaaaaaaaatagaaagaaaatatggcttcaagtcatggcagagaaaaagattagaagtgaaatatagaaattaaaatgaaactaacacatgatttgctttataatgtttttagtctcgtaacaagatttcaaattaaaataccaagaatgaagatcatttcttctttgcaaatattgaaataagccttttaaatagcaacgggagcatttacttttctctaacgaaagcatttttaatttctatcgttactggtttgtcacataatgccatacatacaactataacctacatcaaactataacctacatacataccaataataatttctactatcatatcctttcctgaacctttttatatttcttttttggaattgatctttccttactctttaaacatttaaccaacttatctcttactttgactaacttcttaatatgaagaaccattaaaccaatttatacccttctttcatgtgatattagatgatctaataaaatattttattggtgttacatacttttatatcccctacatcaaaccaaactatatcctatatacattaccaacaagaatttctattaactaacaaacttcttctatctttcctcactatttaaccattaaattaacacatctcttacttatacaattaaattaacttattatgaagaaccactaaaccaacttgtacccttatttgatatgatattagatgatctacatattttattattacatactcaaaatccccacatcaaaccaaactatatcccaacatacattaccaataagaatttctactaactaacctacttcttctttcttccctcactctttaaccattaaaccaacttttctcttactttagtgtcaaactacaacttcacaaatcttccattcactattataatatcaccacatcttaaaaaacaaatcacatccttaattaataactctaaaaacagtttaaatgaaaaccacaatgaattttgtttttctttttttcctccctctcttgattaatgcaaaaccaaaaagagtcactctacatatccctcttgtgcataatggtgcaaacttttatgacagcaaagttgtttctcttccactctcgtcaccccactcccagcgagggctagcgttcatggccgaaattcattttggctcccctcaaaagaaacaatttcttcacatggatacgggtagcagcctcacatggactcaatgcttcccttgctccgactgctatgcccagaagatttatccaaaataccgaccagcagcttcaataacatatcgcgatgcgatgtgtgaagattcccatccaaagtccaatccgcattttgcatttgatcctttgacgagaatatgcacctaccagcagcattacttagacgaaaccaacatcaaaggaa

SEQ ID NO: 27439 - DNA, 10788 bp, Arabidopsis thaliana landsberg
gcttacacttgagtgtaattgcagaaattagcattgtgtcttgaagaacgatatctgggatatgtgtttctgggtcgacaaaaattctaaaacccggttcgaggtaaaccgaaggcttaacaacaaaccgacagacttatcaaccaaatttgcttaccagagttggtttgggttcgtctttatttaccattgcaccgaattgctaactcaaaaaaatcaactaaaaacatgacattaatactatcctgttagctaagagaggaaatgtaacaatgacgagtcaagagtcttcttcattccttgacaatgataatttttttgactcttattattcactgaagaacgaaacgaaacaatttgtgaaattgataactaaaaccaaatgcgtttatcttccttggaatgaagatctcaacactgcttaagtgaatggtgtacttattattgttatgattggctcacaaaatcacagtaagagaacagagaaagagaaagagagttttctttccaagccggagatggagaaacatgatcagtatccccagttgtcattacggatttcgtcatcaaacttctttttgagttccgggtgcttctcaaagtactcatctgcagtcatggtgctgagctttttctgattacaccaacacatagaaacaaccatgatcattttatcagaatcttgagttgaaaaaaaatacacacaaacttcatagaagaggatttgttttttctggctacttacgctgatctcttggacatcagcaatttctttctccaaccgttcagactccttgagcgatttctgttctgcttctttcagttccaccaactagatatagcatgaaacatggcacaagagaacaaaaacgatgtcaattgaaaagacctgtcaaaattgtaaaaaagtctcgagtgtctcagctattactcaccaaagcatcaaactttggcttgtattcaggagtaactttgtcaacgtactttggaatctcaatgcctgcagcaagccataaaagatgcagtttagtttctcataatcttctttgatatatctccacaattccaacaatcaaatagatatataacaagtataagaacttcagtttcagcccccattcttaagcacatctctctcaaaacaatatagtcaggtttgagagccgaagtaaggcaagcaaaagacatccgcttgataaccactgacaaactcattgtgataatgagttgcaaggctacacaaacgctcccaagtatcagtataaattgcagagaaaataaaacttactgtcataagcttccttgtacttgtcaacaatgccagctccaatacccttcctatagtaatcccaatctataggttcaggttcctggattaaaaggataaccaaaaacaacaatcactccacaacccaatacataaaacaagttaggaaataaaagatctcttaggaattggaaatgtagtgggctaatcatagtatacatcaatgtttttctcgatacaattccacatttctaatgatcaataaacaaagaccaaccacaatgttctctgattaacacgtcttaaggaaatagatcttaacacatatctggatcaatcaacaatgggaacaacaacatcaacaaaatagaaaaaaatgagtgtcaccaacaaaaatctgataatcgtaaaaattcgtgaaagaagcacctgatccagaaatcgaaattataaagatctaaaaagtctaaaccaagcagtagtgacaaaatcagatcaagagaggggggaaatcgagaggagaacctgactaaatttggtctggagctgtgtgttaacctcatcgaaagcacgacgaaggttagagaactctctacgagcctcatctgtgacaaggaccttagccataccatcccaatcgatagtccttgaagctttgaaagccacatccgcgattttcttaccggctccgctcattttctcgctctttgctcacaaagttttccccaaaatacacacactgacgaatatcgaagaggaagaagaagaagatgtaaaacgtcgtctgatctgaccaatgaaggaaagccctagaatccctaaaaggcttacaggcccttttacttctctttatttctaatttaacccctttattatttaattgacctaaaaaacacccccattaagtttcaatactggttctatgttttagattactttggcgttagcaaatatgttaaagaaggaactcagatagcatgtggaaaattatatatgtctcttcatcaatacaaatatgttcaaccaattaaaaaagtcaaacaaataattaagtttgttgtagtaaaaaaaaataccaaaaaaacaaacaaagacataacagaatcttctctgaattcacctctgcaccagacttttgcctaatcaacaatgtcagatataaactatatatatatccattctctgtttaagcaagattagtatctttcttagtaacattgctttccagctttggtggacctgaaaaccgtcttacagtcttaggagatcccgagaaggaaagccgttttttcgctgtcttctctgagcttagaggactaaggtttgagaatcgagctcttgctttggcggcttgtgtaggtgccatgtagcctggaactgactgagagaaactactggtgaagctttcatcgtctctagttgatggaattgatccacaagtgctatgcctacgattgcaaggttgttctgattggaaactcacaatgctgtttgagtcttcacttgggacttgcctcactctcgggcttgaccctcttcgactgtttggtgtctttcctcttggtgaaaggtttttgcctcgtggaatcatctcagacatggcacggcttgctacactcctagcagaagagtctttttcagcattatctggtgtgagtgagtggttttcgtttggtcgagcagccatccaacgttctagccaactccaaccccaatgcggattgttagggtccatgaatgtttgagaacccattttagttgagtttttccatgtattctgcatattaacaagtttcaccattttgagatatataattcttctggtgtaaagacacactaaagtaagataggaaactagtttaatacctggtgactgaatgcatatgcaagcgctttttctcttctcattgttgctacttgcttgttcaacatgtttgcttcaactttctcccgcgacaatgtactatcattccaattttctccagtctatttcacaaaacgtaatacaatctttaagtttgtagcaagaaacataatctatttcacattgtgaatttctcatgtatccgagatcaacaaaaagccaagtttgtaactaaaattataaacatctttgtaaggatttgatttgcttaccttatcaaagtctttattgtgtttttgttggagctgtcgtgttaaagcctgtttatcctcagacaatcggagccttctctcacgaatctgatattgtactctagctagtgtttgcatgctttgcaatgtagatgtggcttgacgtctcacacatttcccctggactaaagattttagcctcacaagacctctcaacgcacgcaatgctcttcttgcctaataaagggtaaccaaaaagtatgaactttgttccattagttagcaaaaccacctttatagttactagacttgaaaatgttaaaaaacaaaaacgttaccatatatcctctaaatgctgtctgaatcttgatagcggcgatctcttccattgatttcccgggaaccgtgataatgcagagagacgaacaacttcagcagcagcttgagcagctgcaacggctgcctctgcagctgcagcagttgcaatagccacagagtaagcatgtctgctctgttgctcctcaatctcctttagtttcgcgtctttgacagtacgaggagaatatgctgcaccagaattagtaacatctagcttcttggatttaccaaaccatttcttggacttatgtggcttctaatggagtcaaaaacaataccattttcagtatcagcttttcaattacatcaaagacatatagaagcatttctctttatggatatagataaccaaaaaatgtgaataatctagcataaagacctgctctttcttttgttttggttctgggcttaatgctttcttcacagctgaaaaccaactcttacccatttcttagtttcttcttctcaaatgatctgcaaatgcaaaaccacagaggtaaattcatgacccaaggatgatataaattgttacaattaatcataagatccatcaagacttaatcttttatccaaaatctataacattagggggaaacattgatacaggaatacaaaatcagagctttaaatggaatgcataaaactcacagattaggaatcaagctcggatcttcttgaacagagagagagcaaccaaagttttttttgaaggacaaaaaaactcggagaaaaaaccaaaacctttgcagaatctgagagaagaataaattcagtttcagaaatgaattaaagacaaggaaacacataaggacacttgtgtaactgactagtatacaatacacgcgtacttacactacggaagtgacaattattgaaacccggaagagaaatccatagaataaaaaaagaaaattataagatcgaccaaaactaaagtctttgttaggattcagacaagaaagataaatgtgtaagaattattaagggatctctctctctctctctctggtacaacaaaatctggttagagagaaagaaggaagaaacagatcttgaagaagaaggggtccaagggaatgaaacagtgcccgtgacaaaaggttatataaaaagtataaaatagaccttttcttcatagttggccttattattatattcacctaaatttttattagtttttaaaacttttgttgttcggttgctttcaacttcaagtgtccattgtgtaacgaactggtatttgttttgagtgattggttggtaggtttatttaagtgtaaattaaatttggtaatacaacgaacatgaatttttatattttttggttctgttatatacttcttcttctttggtttatattagtcaagtttgagatattgacgacggcatggcaattgaagaagaagaagtggaatgcacgttttgtcggtggttggactataaaactaccttatccatttatatgagtgtgtatagtgtatacataatcaagtacatgaaccaatttggttggaaaaaaaaaactaattaaattgacatatgagaaatgtgttttttttttttaagttcttgtgatggatgatgtgacagacatctgttttgagtttctaaaatttaatcgaattgatctgtttaattggaggactaactagaaacatatctaaacccagttggctacagaagcaattcatatccatgaaatgaacatttttttctagtttaatttccagttttaatgtttatggtagctagtaacatgaaattgttgaaccttctactttctttttgggaaatctataagcagttgataaacaaattatatgttttgcatttgtattaattttctgaatgagagaggccggggttcaattctcaaaacgctctttgtagaaagatttgtcgtttttcatccaataagatagacatgtggtccaccagctcctccatggctcttgacccatcaggtccaccaccattgccatttatgtttctattcttaagaattctgtgggaaatttgtggggatttttcttttgttacttagttggttctaagaacattcttaaacatactttagtttaggttatgtcccaaaatatgtcgaagataattataaaatgtcaaccaaacaattgaacaaaagggcatttggtctagtggtatgattctcgcttagggtgcgagaggtcccgagttcaattctcggaatgcccctttaaacgttattattttttaaaattctgagcagattagcgtaaatgacgtatctttgtcttgaaaatgaggaaatgattacaaaggaattcgtgtaaacattattaaattaccaagtttatgaaaatcaatgactaattgacttattttggttcacattgaaaaaaagaaacttttttatttttaacatggacaatcagatctctcagcgatactcaaatcagatgctataacagtatcagcgaatcagatgctgaaatctctaaaactaaaaacttggtttggctgttgttagattttgaaacctgaatctgaatggcatggaattgatttcttcttcaacaattggaaactcagctctgtgtttaaccctaatctccattctcatcttcttcttcctcactacaaccaccattcccactttcccggatcatcctcttcgttctcttctcgatgactcccaaatcactacgaacagtagctcaatcgttaatcccaaatcctcttgtgtctcctctagatcccacgataatggcggcgtcatcaactatttctccctccattactgtatcttcaacgaaaacctattcttctcgatcccaatattgtctcttctcattcttcttcacttttacatactcattaaaaccgctcagactcatttctccaccgtcactacaaagctcgccgatcgtctcaatctctctccaagcatggctgctgtgactcttttagccttaggtaatggcgcacctgatgtctttgcctctgttgccgccttgcgtggtggtcagtatcgaaccggattcggagctatcttatccgctggaactttcgtctctgcctttgtagttgggttcgttgcgatctatgcagcgccgtttccggtggatgctgcgtcatttgtcagagatgtgcttttttatttgattgctgctttgttcttgttctatgtgtacttgagtggtgagatatttgtgtggcaagctatagggttcgttgggttttatatattcttcgttggtttcgtcttctggatggattttggtaccaatgttgagaaagggaaaagtatcagtgaggaagagaaggatttgttgagacttcaggattgtgagattgccgcaggttctcttgggagttataaagcagagaaagaacatcaattttcaggaatttttcggctttatggaacggtaaattcttcttcactcatctttgagctttgtttatcgatcataatgctggaattttatggtagtatcatattcagctaccaattgtgaactccgatattgtttagtttagattatgcgtttaaaggttttaatttgcttcctgttttcttcttagtgtactctaaggttatgataagtctctgtgttagtctagtgaatgagcattttcacttgcttaggcgttttcaactggattgtagctgtgttgacagctcaggagcaatcgttagatcggttagctagagagctaacatgttagaaagaagttgggcaaaatgagtttgagagaatttcgtagggtttaggattgggaactggtcaagactcgttaatcaagtctctctatgatatgtattcctttggtgaattcgactctaaaggagtttacctgtttggatcttatccaggttactatattttttctgttagactgcatttaagtttgaaataagtttagtgaaggttgtctgattctgcttttgctgctgtgattgcagatctcgaggatgtgggaaactcctgtatcagttcttttgaaccttaccatcccaaaaccttctccttcggaatggtctaggttttatcgctctgccaacattgttttctgcccttttgcccttttatacacttgcaactcttttgtacaactaaaccacccaatttcattcctctttccaaacacccatctcccgctttggcttgttgtcctcttcatgacgtcttccctagcgttcctccacttcacagtagaaaaacaaccaccaaaaaccgagcaactgccggtcattgttgtagctttcataatgagtgttttctggatatcaacaattgctggtgagctccttaactgcttggctgcgcttggaaccctccttaaactgcctccggcgctccttggcctaaccgttcttgcttggggaaactcggttggtgacctagttgctgacgtggcagttgcaaaggcaggtagaccagcaatggctatggccggttgttttgcaggtccaatgtttaacatgcttgttggacttggatcggccttggtgatgcaaacagctaatgtatatccagacgcttacaaacttggattccatgtaggtattgtgatagctttcgtcttcttgttgcttagtctaatgggatctctgttggtaataacctggtctagattccgagttccgagattctgggggatctgtcttgttggactgtatgttgctttcacatttgttagtttgatcatcgccagcgtttcaacctgatcatatgcgtgaagtctgcacattgaataatctagggtcaaccagggttcattgtttaggaatttttgttgtctagaagggaattgccaaaattttgagctcagctgatggccaccgccagaccagtaatcttcgaatcccacaaaaagttcttgtgatcgtccgagccagattagtaaagtttggtagataggtgatggtaaaatatatgtgctttgggagaagattttgactcccccatctggtttacttttccattgattgtactggtcttgtttttttgggtctgttatatatgtataaaccacacatttgtattcttttgatattaatgagaaatacttcattgatcctagaatgtgtattagagcagaacaaaatgttgattctggttcatttctatgtgatttgattctctgtgaatgccaaatatgttgtgatacaacaaaactacttgtgaaatttgaacctccaaagaagataattaaaggttgccaattaaatcctaagaagataataaaaatgaattaattaatgtaagagataaaacaaatcatgatctgacaagagcagaagaatcttgacataagcccaatggttgacacgacacccagcttttaaagctctttccacttacttccccttgtctttctaaattcctcctcattgttaaagtcgaaaaaagggtaaagcagcaaaaccctaataaaatcacaacaaattaacacaaaaaaccagatcttaaaactctctctacccaccaagaggatcaaccagtctcttccccttcagattctcctttccacaggtcactctcgtttgcagattctttttttcaatttgacttgttcttacttatatattgtggaattcacatgataaaataatatgtttggtgttgtaggaacaattctagttgttctgtgttagcagattctttgttctgtctattttgaaggaaattaaaggcaatccctttcgatattttcctgttttccttatcaaatttatgggttggaataagtaggttgatgtattgtcttttaattcgaagctcaattttcatacttattgctgtttagatcttcaaggttaatctagaattacagattagaccatatataaagtaaattcagcagattcttatttatgtaaattgtttgttagcaaccttatctccttcacatttctttaaaattctggtcagatgtttcttaagagcttagaatgaatcccaaagttctgtttttttattctggtagtgaatggatcaacaagaccatggacagtctggagctatgaactatggcacaaacccatccaaaccaaaccgatgagcaccactgctgctactgtagcaggaggtgcggcacaacccaggccagctggcgttccaccagatccatcagcagcagcagcagcaacagctggcacagcagcttcaagcattttgggagaaccaattcaaagagattgagaagactaccgatttcaagaaccacagccttccccttgcgagaatcaagaaaatcatgaaagcggatgaagatgtccgtatgatctcggctgaggcgcctgtcgtgtttgcaagggcctgtgagatgttcatcctggagctgacactcaggtcgtggaaccacactgaggagaataagaggcggacgttgcagaagaacgatattgctgctgctgtgactagaaccgatatttttgatttccttgtggatattgttccccgggaggatctccgagatgaagtcttgggaagtattccgaggggcactgtcccggaagctgctgctgctggttacccgtatggatacttgcctgcaggaactgctccaataggaaatccgggaatggttatgggtaatcccggtggtgcgtatccacctaatccttatatgggtcaaccaatgtggcaacaacaggcacctgaccaacctgaccaggaaaattagcaagaaactgtgagtcttccagcttcttttaggcctaccttgtagtcttggggttttgtttctgttttcgaataatggtaacctttgtataacttatttcagtatcgtctcagtttggtactatgtcagttttggtattcttatcttattgaagtaaaaatgtgatagtgtattcgcttttctccctgcagcgttctagtctcgtccaggtgaaaggagggagaccttagacaagaaaatgaaaagaacatatcagaattgtcaaattgggtgttgtagaagaatctaaagtgtttatgtctatcgatccttttctaaacgagaaatttagggatgaaccagaaagaagaatg

SEQ ID NO: 27440 - DNA, 1124 bp, Arabidopsis thaliana landsberg
  unsure (1)..(1124): unsure at all n locations
aaaatggggttcggccgaaatgaaaatttaacttggtggtagggccaaagacaattctaaaaatgactattcacaaacatcatctgcaatggttgtccactacgaagcaaattctaccattgtttgcgcatgacagatccgattattgcttatgataatccggttaaccaacattagtctccctaagaatagcaagtgagtgaagaatagcgcatacatcatcatgctccacccaacatgcaagttttagctaaaaattgtcactcatgattggacgaatcacttagcgtcatatatatcgtggtttataggaaacccgttaacaccacatgtaactaagtttaggagaaccatagaacttcaaacagtacttgtttaatatttatggttcttccgactagtctctataggtatttggcccaatattacaatggtccgaacaactggatagataaggtattacagatgcctagtccaaacaattttgtagcaactcataaggccgaccacttgactcgtctagctagaacctatcttaaaagttataactttgtactttgttggttgttctattttggtatgcgctagttgtcacaccacctcaaaagccacacatgttatatattagcataatttgtaaataaaaaccatttaaaggagttgaaaatagtcgtgccatttgcgtaattggtcgggtcggattggttcccacacattttaacaccgacagcggtgaagattcatagcttcttttttttctttttcaaaaataagattctaagcaataatgnnnnnnnnnnnnnnnnnnnnnnacatcttatccaatcttacaccaacaannnnnnnnnnnnnnnnnnnnnnncaacataaaaatcttcatgacttgcagattgtcacagatttatgttaaggttttatattgagttacgccacgacgtgtttggataagaaataaataacccaaatcaaaactcacgaacaataacaatgtatgatccaaataaatgtgacaatatttactaaaaatcaaggttacaaatcttggtttttactcgtttggtacatgtacagactattcttaaaaactgggtctggctctctctctctctctctgtaagaattac

SEQ ID NO: 27441 - DNA, 2770 bp, Arabidopsis thaliana landsberg
aggatacatttacacataagcgtagatgtatgtatgtatgtgtgcaatgtagattatgtatgcattatgtatgtatgtatgcatttatgtatgtatgtatgcattaatgtatgtatgcatgtatgtatgtatgcatgtatgtgtgtatgcatgtatgtgtgtatgcatgtatgtgagtatgaatgactgcatgtatgtatgtgtatgcatttggttgagtgattgcgaacaacccataagaaatgtggctctccaatttgttgttgcagaagaaaagtggcacaacatcaaactccttccaaaggagatagagtcgccaattgcttcctacaccaaagttttgagaaaagaaagcataagatttcagagatcaaaatagatgagtaagtcaacactaaagatgctttcacttatctgatttagacctagcccgaatcttatgaacagaacacaatacaacaaacctttaaaattacgagtggcaatgacaaaaaaaacaatatgattttctatagagagttgtatatattaaggatatattagtcattacttattgagaataccctagactaactcatatatatgttgtacatgatctctcttaatgaatcaattcactctccctttacattttccacaaccaaaatgatttctaaaagcttcgttatcaaccacagacacaacaaattagatcaaaaattgatcggatcagatcgcgaaatttcaaaatcaaacttattgggttcgtagagttacacgaacacaagaaacggtggaattaaatcataataaattcgattgaaaaacccacaaacctccgtcacagcctccgtaacccacctcacggcggccacccaccaccaccacggcatcatccaccgtcgcttcctttaaagagtcttgttcatgtttcggaaggtcacaaatcataatcctcttgatcccccagtttcgcgatcgttagacactagtgatctgtcgaacccaaattaaacaaatcaggaattaaaaggtattgaaaaagcaatgaaatgacaaaatcaatcgatcgctcataaaatcaagaagattaacgtaaagataagacaaattaagtaacaagagacatagtaacagcaaatcgaatcaagtagcagagaaacacaaatcggaaacaaatctggaatcatcggaattcactcgactaaaatccagaattcgagaatctctaacctttgaaacgaataacgtgagagaacgctatttctagattctagtcgccggtggcttaagcagggtcgccggaaaagcaccgcttctcaaaatttacagacatttttcgaaatggagtatttagggttttttaaaattattaagatcagagaggaacttgtagacaatttaacaaaattcaattttggaagaaaaaaaaatgccgcccatttcgagaatagcaatttgaatttcatttttggacacgtcaccgattgtaaccgcctgaactgtttttggttaaagattaaccatgatgtaattaccgtgatccgtgaacaattttggattggctcggtttggttctaatcttattttgcctatgcactgagtgtcatgattttattttctgttaataggattaaaaccaaaccgagaagtttttagaagaagtttttttttactttttttgaaatctcataaatttagtcacacatgtcgcggtcatattagttgccagatgttgaatccaacggcagagacgtctagggtacgatccagtggaagatcaatacaaagtgctgtgtgtgatgatgttccgtcgctacggccgcgatggtaaagacatagaacaggagcatttcgttttcactctgagatctcaacaaaaagagtggagaaagattgacgtcaccggagattcttacacagatgtccaaggaggaatatttatcgatggtgctatatactatggaggagttgaacacaaaatattagctagatttgatgttagatccgagaaagtggagtttattaaaacacagaaagacgaaatagtaaacgtttatagttggacttttataaatcaccaaggaaaattaggaggaatagagtataattacttctataagatgcgtctttggatgcaagaaagagaggaatattggaattatatgacttgcgatgtgccttgtgagtggcgagatttgtttagggggaagagactatcttctccaggagagatttataccggagaagttatgttggtttcttctcgtttagaatcatctaaacctttttctgtttactattacgatccgatcaaagagagtttcagaagtgcggaagtggaaggaattgcggaccatgagtttagacgtatccatggaattggtaagcgtactcgtgaaatgttgtgttttccaggtcacattgagaatattatcttctttcattagaccatccgcaacgaggtgttttagagtggttcttagctttttgattgaataaaattaaatcaataatgctttctattacaagaggcgctcttatgtaagagcggttgttactttctaaaagatgttgacgtgtcaatggtgtagtattttcttttttatgaaacacaaaaaacattatttcccttttgttcctctcacgagcatcaattcttcatcgaactcatagttccggacgttggtttgaggccactaccatcgtctctctccgtaatcctctccatcatcggcattttctcagtttcgaggcattttctcctttaataggtaaaattatgtaattt

SEQ ID NO: 27442 - DNA, 1422 bp, Arabidopsis thaliana landsberg
tctcagcttagtaaaccagacattatattctgtcagaaggtcttttaacctgttgtgtgtgaaacaagagtcagtttgtgtgttgcttctgttactacacgaccctagaagcgtgaatgagttgatttggtcgtgttgttttagcaaattcccaaatcttatacatattttgtgaaagtaaaggtgaaaatcaatgtaagtggaattgtattgattttcatggcttattcatagctgaactaaattctcaagtacaattgaatgacaatgaagctacttcaacttctaattattcgtagctgctgctttgacagagagaattcttgtgatggagatatatgagttaataatattctgctaatatcttaagctttggtgatgtatttgaattgtcttcatgttctaatgctagtaggcatctgcttttcatcattaactttttgtttgtaaatgatatttaaatttcttgaataagatttgccgaaagtgagatatacaagtaaggaatctaaaaagtttgctggaatatattctccttcttctttagtttttttttttttttttttaattcgtatctcttgtttctgattgctactgaccgagaatttgatatctgactgtaaaaataaagtccaaaatctgaaacgaaaatgcaaataagattacaaaaaaaagaaaagaaaaaggtttgcatattaacaagattacagagcacactcgcaattaatagaagaaatacagagtggtctctctagttgagagatcaaaaatggatttaccaaacaaagccaaatttcattttacttatagtcaaacggaggaagatccgagagtcaatggcgatgaaggttgcagagcacgaggacgccttttcctgcttcgaccgcgaacttgaactgaaggagacgaagaagacgacgaaggagtagcaatggtagacctctctctgctcgatacactcgtcagtttcttcttctcattttctgcttcacatgatttgtcttgattgactctgttgtttccaaacctggtcgcgtttatagtcgcaggaagcacacagttgcacatgaagcctatgtataatcaatcaacacacaacaattcaaacttgagagcacagaaacagagtcctttccaaatatggaaagttaaagccaacaaacccaagtcagaagctattcttatcgatcatacgcataaagatgaaatctttcaagtcaactccgagaaaaaagaagctaaaccaagtcacaacattatagtctaaaagctgagactttataaggcattgagtattagcatcacaatacacacttacaaacataactacttgattcagtctctttgtctctaacttgtacaatcataaaagcccaaaatgtaaagaatgaggaagttaccagagaatttaccgattcgggc

SEQ ID NO: 27443 - DNA, 1744 bp, Arabidopsis thaliana landsberg
  unsure (1)..(1744): unsure at all n locations
aacacaggagtggttcgatctgttatgtcatcgattttcttttttgctcattatcaactcctgcatcaactccaagttttccttgggaacattcatgtgactattctttccttcacgataatactctttgctcaagtatatcgcctaatatcatatcatttctgacaattcatcttacccctaaggtttaatccattatctcactctcttcagcgagaaccagagctcgaactttggaacacagacttaaccttcccaaaagaggcgagtgagctaccaggctttggctcttaccagtaatctttacaagagcaagcacctccttcaaaatgatgaaacctatatgcatccctcactatgatttctcgatttgataccttagatacaaactttatccaagcatggcaatcgttgcaaacacgtaggttcttcattacatttataggcactgttgcaggcaagctaaggagtccaaatgaaattgctaatttctcgctgtggatgaaaattattggatctttttgctcgtgctgcagttcattcaataggctgaaacagtcttgcacatacccgatttcagatgctcgtttggtaagatcttggaagtattcatgtatctcatctgctaacgggtgattctggtcaccaacatagaaagagtgaattgagtttttaacttcaatccaactttgtcccggttctttcttcacacccttttctttcatcttttgtcttgtaagatccctagcatcccatttcttggacaccgcatacagatttgacagaagaacatatgttgctgagtcttcaggttctaactctaggagatgatgcgctgcaaattctcctatttccatgttcttgtgcactacacaagcactcaaaagtgttctccagaccaaggcatctggcttaataggcatttnnnnnnnnnnnnnnnnnnnnnnnctcaaaagaccagctcgagttagcatatccactacacacacatagtgttccggtttaggagataatccatattctgaattcatggattcaaagtatgcaatccccttgtccactagtcctatgtggctacatgctgatagaactcccacaagcgtcacatgattaggccttacattagaatgtatcatctggtcaaaagaatctagtgcttcagaaccaaacccatgtttagaataagcattaattatcgcattccacgaaacttcatttttcgtggagacttcaaggaactgcttctctgcatcagaaatgctcccacacttggcatacatagagattaaagcattgcaaacttcggtttctgaatcgtatccggttttggtgatcacagcatgaacctgcttcccttgtttcatgttagctgtctcagaagcagctttcacagcagacccaaacgtgaaattattactgtcaattccttctctgttcattcgaacgaagacacgaagtgcttcttcattgtttccactctgctgaaatccggataccagagcattccatgctatattatctccagcttcagtttgttcaaacgctaaatacgattcctctatttttccgcatctagaataaagtgtaaccagtgcattttgaaatggcaggtcagatgagaaaccagatacacaagcttgagcatgaatttgctgtccttcctttaaggcttgaagaccagcacatgcactaactgcatttgtcaatccaacttcatcagaccgaatccctcgatccaacatct

SEQ ID NO: 27444 - DNA, 1631 bp, Arabidopsis thaliana landsberg
gtgccacaactatttggctttgagtgtgtattgcatcaactttgtccatttccaagtggttatgtttggtagattgaagtagaaccgtatatatagagatggagaaccgcatatcatagtaatatctttttgccatgttttagtattttcatcttagcggtcgatcttgttctatctccgattatagtgtatatgcagaagcttatcatttgagtgtttgaaagtttaagaagcactcagattttgttttgttttctaatttagcctaaaaaataagtagaagaagtgtatttttcgaaaatcaatcacattgtagaccatttttacaaaatttctctgactatatatattttttaattccaaagcctattctgagacataagaaaagccgaatgaggaagtgagaaacagaaaaacgagaagtgaaagagatttaacaatttgtctaaattatataaaatgaaaagtcttttttttacatctgccgcaaataaaaaacaaatatactccaccaaatacaaaacaaaaaaaagccgaaaaatcaagtcagagagagaagaggaaaatggggacgatggaaagcgaatgaatcaaaaccttaccgatgaagaagaaagaaaattgaaagatatttatttatatctctaaaacctttctctatctctctgtttaagtatcaatcacttcttgtcccaaaaacaaagacttgagagtgtcttagagagatcttctctcttttatcttaggactctcacttcttatctcaaatctacttcaactctatctccagtctccacattttcccacaaatttcaactcttattctcttcctccatagaaacaaaaaaaaacaaaagtaagtaagttctgttcatattcctctgttttttttttttttgtgtgtttgtcagatccattctctatagcttgtgagctgtgaccattgtttatatgagacttgttttcgttaatgggcacttcaaaatctctcaaagatctgatctttcgatatattttcttcacaaactcttttttccctaaattttctcaaactcgattttttttgctgcaaagtttcgacctttggaaaaactgatgttgttgaaatcaacaactgttgatgttgagacttatatttttagcgttaaaacaaatgagagtagttgcgtctcatgtcttccaaattcaactttttgacctagtgggatgcttttaggggatgctttagttttggggacccataaatcaaatcacctatgaaaaaaatgtgataatgcaacagaacttgcactgtgttgtgttaaagtgtttattttcagatctcatcgatccatttgttctaaatcttaattcttgtgtattgtattgatcaaagatccaaacttaacttgctgatccagccgtttaagtcttcagttaggcttccatattcattacaaagtcatgtttttgttgtttcatagtgaaataagaaccttctatagttgattcactgagtatttgatctgaatatatacttggttacactgcacgcacaggtgaggtttggttggtgttatagaattatgaagagcgggaagcaatcttcacaacctgaaaagggtacttccaggatcttgtcactgactgtc

SEQ ID NO: 27445 - DNA, 1940 bp, Arabidopsis thaliana landsberg
  unsure (1)..(1940): unsure at all n locations
catatactgtaaatgtataagcattctaagaagatttgtggtttgttgatctttatggattcttgtcttctcttctttgttgagactagagatgatgtgaagagatgctatgagagtcttgagaagagactgaagaagaacttatgcaagtatgtttctccgacaaagatctctgcggttcctagctcgtaaaccacataatagttcttcggttttttgtttctggtttctagctcgttaaacagatttgcaagctttaatttttagtaagaacttggcatttttaagacccgttctgtaatatgtgtagtggaaattcttgtcaagcctggcaagaactttatagtaagaacttggctaacttgtgagatcctgttatcagtttgtgtgatgtaatgtgtatgtcgaaaaaaaagcttgccctgtctgaaatatagcaaaagcaattcctcattcaaaaaagagaaatccaagctttgattggtaaaccttagaacggtgaaatgattctgcaagttttacacaataatattttttttcccctttgtcgtgatattttcaccatcttacacctcacagttaaaccaactagaacaagctttgccaactacatttatggattcacccacacaaacccataataatcaacaattcaaataaacataattatcctgatgaagataaaagtatatacaactctacttttgaacctagctaccactcaaacaaagagtttcccactcagaggttattataatcgtcaaatacttatccacatccaaacataggaacctgaaatttcactcaaaacactactagaacagagacaaccaatgcaagagagagaatggttaagagacccctacataaaattttaactttggaaagctacctgcaagatcgctgatgaaagggaaatcttttttggtcacacatactcattgacacgaaaggcggtgacttcgagaatgaaatcccgagttctgagtagctcaaacacacatacatctccttcgcctatattgttctcgagtgtgaactcataccatccttggctaaacttagctctccctgctttgtagaggcacctcactggccattgtttctcaccgagctggagcttgatgaaaccagatatcccacttaggtatttctcagcaaacccagatggcaagtactgttgaacaaacaaaaaacagaaacgaagaagtcagcaagaacaggtcatgttaaccctaatcttgaaccttaattacaatctttaaaaattgtttaccatgatgcaacctctgtatagatatgatggtcgcagaacaactctaaagtaaggattcgttggttcgaatgttttggctgcattgacggctctctctctttcctctgcagttacagttctctttctagcagaagcactctcgtagaactttgagcggttctctgagtcatctccaccgggagttgaagagtttacttcctctgcacataccaaaacaataaatcttttgactctcctctgaaacaaaagttaatacgtaattaagagtctgtctctgatacttaccgggattaggattcttcttcttccttcctctcttcttaagtaccttgggcgtttcttcagctttagattctttgaaaaagctttggatggctgtagaaccgccataacctttattcactggttcagtagattcagggttcgatggataaatgaccttagcatctttgagttcaggatcttcaaacaatcgagcacgtttgttgaactgattctgtgcggaatccatttgcataagagcttcactactagaatggtggttgatctcagagtgtggaggataaattgaaaatgtagactgtaactttgtatctgaaaccaatccgaatggagaaacggttgacaaactcctgccaaccgtcttgaaanccagatttttttg

SEQ ID NO: 27446 - DNA, 2243 bp, Arabidopsis thaliana landsberg
  unsure (1)..(2243): unsure at all n locations
gctcagttttaggctgaacaaggaacagatgataacaaaagaaacttgaataagaactaagaagaattaatatcgtaatcacaggaaacaagaagagtgcacaaaaacaaaagaaagaccttgagatctctgtggtagacacctcgactgtggcagtaatccacagcattnnnnnnnnnnnnnnnnnnnnnnnnngcttcatcctccttaagcctcccttgttgcgcctatgtatatgatttaaatccaagaattaacataagagtaagaagagagaaagacagagaacatatgtcaatatttgtgaagagaaaagagaggaagattctctaagttaggttacttacgattttatcaaagagttcacctccattgacaagctcaagaacgatatagatcttcgttttgctcgccataacctaccacagagagatgttttacacgctaagattcaaaacttaatttaaaaaatatctaaggaatgataactaattagtttcgtacctcaatgatttaaccacatttggatgttgaatcagttatcatccgggatatttctcttttaagctgtgcaacaacaaaaaaataaaactttatgatcattatatcaccgggatcatgaccataacttccaatcatacatatatagcatacaaaactaaatcttcaacagattcaaatcgaaccaaatcaaaaacaaagctactcgaacttcaaaaccatatccatatcatagataatagttatcttgatcaatgcgtactaagatcagcatcgtgtagatatatacagaaacaaaaacattcatacaaaattcgatattttaaaatattattgttaacactttaatcaaacattaaccttaataaccgaacaccaacctaggaggacatgtgggtccctaatcacgaaattaaactgttctttatagtacttaaaaacaaacaaatccataatcattttacgtgatcaaaccaaacacaattaacgaacctgttcgaccattttgtgacggaagaccttttctcggtcgaggattttgatagcggcttgatctccggtgacggtgttcttggcgtatttcaccttagcgaagcttccttctccgagagttcgtcccatctcgtaattccctactcgcgtcctactcgccggcgtcgccttccttctgcttccactcattttctttttccgattaagaaaatcaacggctctagatcggcggcgaatctatcaatgtgattcttctccctcaatatctctccttcttctagtggctgcctggttttaaggctgacgagagaaagtggacgagcgagagatttaataggcgcgactgggagtcacgcgcgtattgtgggtcccgtatgccacgtaatgtcaaaaatcattattttgctctgttccgcgtcagtcccgtgttatttgtacttgtgtacgttcgtaacgttcattcttcattcatataaaaaaattccataattttgttcttgtgtggtaactatatacagaaactcctgtttaagtatatggattttatgaaaattttggggttttaaatttatgtggatatggttttatttgtaagggatgtgatttgatgtccttaatctttatgtgtatatgagtatatctttcagtgattcattccattctactgatgttcaaagttgactgttatcatattatttgatatagttgtattcttttcatgtagaaatattctctaaatataacttttttttttgtctttagttagaagttggaaactacctaagaacaataaatacatatatcaaatgttggtagttaaatgatgattgttatatcttggtcaaattttgtttaaatctatgataatattcgcatatacttacttttgtttaaatttgatgtagctgtttatttttgtttgtaacggttctaaatttgattatttaaagtatatgataataaataaatagataattgaaatagttgatctttccatgtgacgatgtgagtaaagggaacggtatgaatatgaaccccacatatccttcctgataaactcagagatttcacagaatgtgataatgtttttatttttcttctttcctttatttgtttctcttattttctttcatatgataatgccaaaatacgcagaaaaattaaaaaagtgtggcagacagtgtgagttgatgatttattgcatgactagtaataatgatacaataattttttagatatgttagtatatt

SEQ ID NO: 27447 - DNA, 1110 bp, Arabidopsis thaliana landsberg
gcgaaactcctaaagtggttgaagcagattctgaaaagccaaagattaatgtttacacaaaaaaacaggaaactcaagaagatctgccaaaggagggttcctctcttaattctcccaaggcatcgcttaataaatcctcccgtttcttttctgcatctttcttctcttctaatccagatgggaccgcgacagtgtttggtagtctggttggttctgtcaaacagcaatggcccaaactagttcttgggcttgctcttcttggagcagggtcagtttgaaaatttactcttctttgcttcgagttttgaagaatcatttttgtacagaaagttctctttttgttgatacgagcttcttattcgttccagactgacattatactccaatggagtaggggggaacaaccagttgcttcaacagccagatgttaccagcactagtacagaagatgtctcttcaagtacgaagccactgatccggcaagtgcagaaacttcccaagagaattaagaaactacttgagatgatccctcaccaggaggtatgaacaattgttcttttttttctttttcttttacgaagtgcaaattgtatggaatgtactttgcaggctgaaactttctgcaattaataggtcaatgaggaagaagcttccctctttgactttttgtggttactgctagcaagcgtcatatttgtgcctctatttcagaaaattcctggaggtaagtagtattttttttttcttcttttgttaattctatccattgcattactatttgtttcccctttccctcaaactcctacaatttctatgttctcatcagtcaaaaacattttcagttctggtctcgcaatcatgttgcatagagatttaaatgctatcttgatggcttcatctgctgcaatctataggcagccctgttcttgggtatttggcagctggaattctgattggtccgtatggtctttcgataatccgtaatgtgcacggaaccagggccatcgcagaatttggagtagttttcttgcttttcaacatcggccttgaggtattatttgatatatgtgtatgctatcttttgccttttgaactgtgtttggtgcttta

SEQ ID NO: 27448 - DNA, 3481 bp, Arabidopsis thaliana landsberg
tcattgattttgtttatataatctattcaaattctcattttacacaaagccatccacaacattcatatcatgattgttctcaagttactttaaccacttttgcattcaaacatcgtcaagttagaagattagagtttgagaaaacaatttacacagctcaacgttctcaaggctttctaacatttacaaaacccaaaccttaagatacccaaaaaatcgcttccttcaactatggccggtctctaagcttctctatttggcagcataccagttttgagcacattttgcatcaacagataaatcgactgagagaatattccttccgttaaagggcttagacatacagtccacaactatgtcctttgcgatctccgctgattcaattggtccttccaagattacttcatcatgaatctgtaggtagcccaaaagatatcatttagataaacaatcatctaacctgtagttatgtaaagaatctgtgagaagtattacttgtataagcaatttccaaccaagctcttttagccgttgattatttgatatctccagcatagcgcacatagcaacatcagccgcacttccctgtattaatagtggtgattgaggtttaaagtcgatagagttcaagatggttaagatctgatgatagtgcaaacaaacctgaacaggagtgttgattgctgctcgctcgatatggttcttttgggcacgtgaccggtattcagggaatttacgagcccttcccaacaaagtgagtacataccctttttgtatagcttctttcttgcgtagttcttgccatttccggacttcttgtctgtcattataccagagattaactgtatcttgagcttcttctcttgatacctgaaagatggaaaacaggcttctgtgagcttattatcttatatcaagcttgttcatatcaatcttaacggcttagttgatagtaccttccaatctctagacagcccaatagcagtcttcccatacgcaatcgagaagttaagcatctttgcttttcttctctcagaagcaaaggcatcctgaataagtaagaaaacattttgccagctgttagacgaattcaggaacaaagtttagtttccctagtctgtataagtcgactgttgcaatcttaaagtgccaaagggatgaaagagtcccgctctgcagttcagcactaatagaactattcttttagcttacaagcaaaatgaataaaagagttaaaaatccctgtttcaaaaacatttaaccaggattcaccttcaacagtggcactggcggcttctcttgtccaggttgtggatgccattcaaggagcacttcaccattttcaacagcttcacgaatatgaggatacatattcatggctgttcttgagtggaagtctccaccagctatgaaagcttccttcatgctttcgcaactagcaagatgtgccagaatcctaagttccagctgaagatagaaaaatcacctcacagtcaacaagtgaattagcttactagtcatcagaaaagtagatatcaatatcatttcacctgcccataatcagccacaacaagtgtatttgcaggcgatgctacaaaggccttacgaatcttgtaccgatccttctccaatgcaggttggttctagacagataaggggaagttaagtaacaaattgtagatgcaattacaaatcgtgtacttacagttgccaaaaaaaaaccaatttcaaatgaaattatgtactagctcaaggtaacacatcacataatttcacatcaaattgagtctctgttaacaatatgcttaccagtagataacaagaggaacttagctacataatggcctcactactcaaatttattacttaatttaggttcaaacgatattgatttgaacaatatcacaaagctttttgatatatacctgcaaatttggccttctagctgataagcgcccagtttctgtattgatattaagggagcaatggacgcgaccatctttgcctgatacattacttccctgtcagacaaaaaaacacaattcatatttcaacctgaaggtaaaccagataaagcagctgaaaattcagaaggtgatgttaagaaaacagaattacctgtaacggaagaataaaatttgagatcaaagagtctatagagcaaacttcacataatgaggcaatagcatgacatgcctcctttcccctttcaccccctccaaatgcaacatatgctgttccataagcagatgtgtcggtttcatcatctgtcttggacttttgtgtttctgaagtttctacatcatcatcctcaacaacttcttccagagaaatatctgagacatcatccgtaaagtcgtattcagcagaaactttcccagctaactctttcaaaacatccccacttacagagggccaaccactggcagtaaaattttccgttgacagtgggctatcacttatcctatgcagtttgatgtttcgaaacttcgtcggtgtttttttgccttcttcaataaccttatcaatattggggactttgaagagcttttcaactggaagcacctcgtcatgactactgaggaagaaataaacagaagttaattattagaggtaacactgagagactaatcatgtaattcttgttaatgacctgataagaaaggcatttcttctcaaatttctatgtatgcagttctggttgaaccaagagaaagaaaaacagtcttcaacaacttttgagataagaggattataagctcaaatctctataatagagaaagaacctctaagataccaagatatgactattttccctatgataacttcaatttaaacctatgcttagcagaaatttaacgatgacgtaggagaaagatacctgttggaaatgccaccaaaaaagagctgacgcaattgtgtgtcactgccaatattcatatacttcgcatcggggcaatacttagatgcccaattacgaaacctactaccagcaacttgttgttccgctttggctactttctctatctcagcaagatactctctatctacaagtatcccttctgcttccatttttacaagaagttcaccaaagggtcgccagaactcatggtaaaaatccaacattgtccttcctaaaactggctttccatcaagatgccaatccatcaattgcagtttctttgtcatgctctcgtaaagctttagtgtgcttatcgcatccaaggcagagtatgaaatccaagcctctcgatcttctcgctgaagctcttcaacagggggaatgacaacgattttcccttcagatccatcttttttcagtttccgtttgccaaaaatagtcttcatcgaaattttaccaaggaactcagcttcctcctttgtctgtgtgcccccaagaacttttgggtcacgtgtaagcgcttcaagcgaataaccaccctttatccgccgtgcagaatcccataatcgtgccatgtgc

SEQ ID NO: 27449 - DNA, 2227 bp, Arabidopsis thaliana landsberg
  unsure (1)..(2227): unsure at all n locations
cttccggcaagagcaaaaccatgactagaaatcacaatcctaatcaataaatttcaatatcctacaggtcgtgctacactaaaccaaggtttcaatctcactcgactgattctataaacagcaattcacaaaattcccaatatacttaaagatcaacacacaacatttttgataaaacctacagaagcatagctaaagttgtagataaaaaactgaccttggctctcatcttgtcgctctgaatcgaatcggagaaatgaaggcgtcgttaaacatatatacacacacacccttcttgtagaaaagacctaaaatatctgaatcggaaatacattaacttctcagggctatttgcgtcattatccacacaaggctctttttcctcttgaagaaaaccttaaaaaaccaacaaactttaggagagcctcgccgggaaatggagcagctatcagactcggaccaccgcgattctgcaaatgcaactactatctcgtcttcattcaccgccgcagaaaatggtcaaggcggcggcggcgggggagaagctatggctcgaggcttatcagcgatgctcgagtccgtcattaaagactttgactctaaagctcttgacacgctcaatagccaagatcaactctccggttctctcgatcgccttgtccaaggtacaatttaacctcttcccgagattcgtatttaacttaattggtgaaatcaatcgattcacaagcttcgtctccgtttttgttaattagattactcacaaatcaatccaattgatccgattaagtttcttaaccattatactgccattggtctaacaaaattgcttaagaattgattcttgtgaaatttttagattggatagtgttttgttttttcacacaacaaaatttgaatgtgatggaaacacagagctagatcaattactggaaaacgctccattgccattcattgtacaacacgcatcgagaatttccagcgtcaaacaaagagtttcatctctgaatcttgttcttaaatctgtccaacgacgtatcgataacatcgatcacatgctctctgccaacaccacgcaaggttattaatgctttaatcaaaaccaaatccaaaattttattagttttgggaatttgtgaactcactacttcgtcatctatatatagtgcattattatctcacttagttttcactgtaacacagagaaagcatcctcggaaactacatgatgacgaaacacttactcactctctgttactctgtcactctcatcttcggatttgggagcaaacccaaagaggtgagtgtttttgtacaagcgcaagtgttttctcatattgttgtgttattgggcttttagtgggcttttattggatcagttcgtttctagtttagaatacccaagtttcatttttttatttagattgttttattataatagataagtaattgttattttgtatcgttgcaagctctaattcgatgaaccacatggtccatcaatcaatcatgtagaacagaattttcaagtgaatatgtcgggtcgttttattttattttatttcgatttggttgcattgttgccttgttggtaataggctttacaaaaattaatatctaataatcataaaatcttgtcacgtgggtctacgacaaaatcgataggaggatgcccgtatataacagagtcacgtgtcttctgcgctgggtcacgtgattgaatgcctatataattggatctcgtaggctttcagttcttagatgtcctagtgctctctctgtagactacaagcttttcataaggaggagactacatgggccacaactttctttagttgatcgataattactatcttccttctataaagacccatgtttttttcatggttatgaatacactttctatttatgtgcgcgatgatgatgggtctccctcgccagggtgttaatagttattgatgatgcagaagaaaggaggttatttaaaactatggaagtccgagcctctgacctaatatctaattggtccgtttggtgggtacatccatacaaacacagagacttaagccccatttcgggaactcttctaaagtatgtcttaaacccacaggactagcttacttttgctcttatgttcgctgcttttacaaatcatgagctgcaaagtaatgtgtagtgggtgtcaccgatgttacttctaaaaacccttccncttttttttttctct

SEQ ID NO: 27450 - DNA, 1818 bp, Arabidopsis thaliana landsberg
ggaagggcccctcctgcggtaagctatgtgctgatctcacgtgtttacatttttctagaaacaacttctctgggcctttaccggccaacattagcaccttgactccacttgttacgattctagacctctcctataatagcttctctggtgaaatccctatgttgatctccaacattacctttttgaacactcttatgcttcagcataaccagttcacgggtactcttcctccccagctagcgcaacttggacggctcaaaacattctctgtgtctgacaatcgtctcgttggtcctatcccaaatttcaaccaaaccttgcagtttaagcaggaattgtttgctaataacctggatctgtgtggtaagcctctagatgactgtaagagtgcttctagctctcgtggtaaagttgttattatagcggcagttggtggattgactgcggcagcattagtcgttggggttgctttgttcttctatttccgtaaattgggtgttgttcggaagaagcaggatgatcctgaaggaaacagatgggcaaagagcttgaaaggacagaaaggtgttaaggtaaaaacatcattgatttgaattttgctgtatgtggttatgttctaaatttatgatatatgtttggtgcttttgtgaatgttcaggttttcatgtttaagaaatcggtttcaaagatgaaattaagcgatcttatgaaggcaacagaggaattcaagaaagataatatcattgcaacaggaagaacaggaactatgtacaaaggtaggcttgaagacgggtctctacttatgataaagaggttgcaggattctcaacgctctgagaaagagtttgatgcagagatgaagactttgggctctgttaaaaacagaaacttagtccctctcttgggctattgtgttgccaataaggagaggcttctaatgtacgagtacatggcaaacggttacctttatgatcagttacatcctgcagatgaagaatccttcaagcccttggattggccttcaaggctgaaaatcgcgattgggacggcaaaaggattggcatggcttcatcatagctgcaacccgagaatcatccatcgcaacataagctcaaaatgcatattgttgactgcagagtttgagccaaagatctcggatttcggtctagctaggctgatgaacccaattgatacccatttaagcacatttgttaatggagaatttggggatttcggttatgttgctcccgagtattcaagaaccatggttgcaactccaaaaggagatgtctacagcttcggtgttgtgcttctagagctagtaacgggccaaaaagcaacgagtgtaacaaaagtatctgaagaagaagctgaggaagaaagcttcaagggtaacctcgttgaatggattacaaagctatcaagtaaatcaaaactgcaggaagcaatcgacaggtccttacttgggaacggtgtggatgatgaaatcttcaaagtactcaaagtagcatgcaactgcgttctaccagaaatagcaaagcagaggccaaccatgtttgaagtttatcagcttctaagagccattggagagagctataacttcactgccgacgatgatatcttaatcccatctgaatcaggtgaaggtgatttcattgaagagctcatagttgctcgttgatcaagaggaagggtaagacttgtgaaacaaacatctcttgtcgtagcagtccaaagatatatataatgtaaaagtattgtttttattttatttttgggttctcgtcgtcgatggtgtggtgtaatatgatatattgt

SEQ ID NO: 27451 - DNA, 1227 bp, Arabidopsis thaliana landsberg
aaatgaatgtttcagacctttgtacttagaactaaagagataccgtgcaccccatgcagagagtcgattagtttccggtccactaagtccccaatgtgttacaagcataggaccaatcttgacagaaaacaaagtaatatatatgaacttttccttatgataaaggattttaaacaaaagtaagaatagcaagggggaaaaagatgcacacctgcacgaggttagacaaatccgggcatggattatctaatttcagtttggcttggactttcgagaaactaatctgggaaatagaaataaacaatgtcacatacgaagctcgtaaaataaattcgtgctaacgaattctggttttagaggaaaatttacccctgctaactcggtcagcaatggatcattgatcttaaaagtgaataagctcggtactggatctacaatggaatgaccaaatttagtggctaaagagtgaccctgtaacataattaagcaaaaccatcttaggaaaacatgagaacccaacagcattgaaaataaagaattcgtattctttaaatggggttactgtataaccttttggctacttccagttgcaatcagaagatatgtagcttctatagattcagacgtgtcagcactttgcttcccaactttaacaaggaactttccatcgggtttaatagaagcagctaacacagactttcctctctcaagcctaactgtttaaggaaattgagaggatatatgaatgggagacacaagacttaagaagaatatgtatttcaatagatgtgttatatatgatacctcctctaatgtttgcttcatttaagagacaatcaactacagataatgaattatcactaacagggaatactcttccatcatcttcagtctgtcaagagatatgaattaggcgaaagatacggagtaagataaacatctctaatgacaaatatgatgcaaattcacaacctttagtggcactccatgctcagaaaaccatgacatagtatcagcaggtccatgtgtgtaaaagaaagaacctttaagctctttatgaccacgaggataatgccctgccaaattctacttacagattcgatatttacgttaccaaaacttcaaaatcatactaaaaccaatatgcttcacatgacaaaactgcaataaagcaggttcatgattctgcaatttcaagcataaagtttgaagctttcatggttgaac

SEQ ID NO: 27452 - DNA, 1987 bp, Arabidopsis thaliana landsberg
agctagggattccctattaatatattaaatgcatgtttttgttcatggagccaaccttttattacattaggaatggaagttcacatcatataacgtcatatatgtatatgttgtaattggttgatcaaaaaaaaaaaaaagtatgtgttataattgaccagctttctgaattctctatagtttattatatataagagcatgattgttcacaagtctaaagatgtgtctgtatggatctataattcttcttaatgtgaattctttaaaggctaccagatttgtgatcaacatgtattctttttggtcaacttgtttaaaccgcatttatacataaagctaggtttaaacttttccgaatagtaaaccaatagattaaaggctctcaacaatgtttttttggctatctagcatttgtttaatagcaaataaatcatttgaaaatgaatttgcatacaaagaaacaaaaagtcttgaataatttggtgaggaaaggtgtaataattgatatttttaagagttgataatgggattaattaatactattagaaggcagcgcagcctcataaagtggcgataccttaaaacagagcaacttggatggcttttgctatttgtggatccacgcacattcgaatcaacgatgtacatactttatacgttttattgttagtgttttttttgttaaatactttataagattatgtcttataatcttttcagattagacactagatttcgttaatcttttgttacaactgcaacgaaaaatcccggtctacctctacatatttataacattgctatatttgtaaatttgattaacattacagaaacaactataacattaacagtcatgtaacactaattgtaaaatacatgtaacatttgcatggaaatgaagagagcataaacttaggtaaataaacacaaaattatgtaggaaaaaagtagctaagaacattaatcatacatgctaaaaataccgtttcattgaaatatatgtgtaatcgaaaaacagaaatacagaaaaatatatcaaaaggtatatttatttatagaaaacttgatacaacaaaacctaataaaattaggcagatttatggggtcggatctttgaacatggagttaaattctcttaaataccacaacaactagacaatacgtacatacgaaaacccacgaaaagaggacgcaagacaagactttcttcaaagttggattgcgtcaaaataatcaaaaaacgaaccaacagatgcgaaaaggcggcccggcccgataacccgagtaaaccgggtatggagttttgtaacactacataaaaattgctcagcaacctctcacacaacaacaaactcccacgtttgacagagaatagaggacgaaggagccttcactctcctctctctctcttcaccttccttcgcgccggcgaagattattactctctgttttttaagagaaaagtaaacggagagagagattttttgaaagtaatgtctaatctactaaaggatttcgaggtcgcatctaagaatccgtcgctggaagctcgtcaacgatggcgatcctccgtgggactcgtaaaaaatcgggctcgtcgtttccgtatgatcagtaatctcgacaaactcgctgagaatgagaagaagagatgccagatccaggtctgttgtttcctccttccatcacttttctctgtttcagttaatttactcatctcgactacagttttcgatcatttccttttacgctatcagatcacgatccttctatttaggaacttttttgccattgatgaatccatgtgtttgtttgctattgttaattagttttatgtttcttcttcttctaatgtacagtcaaccaaacgcaaaatgacgcgtaaatttagtgttgagtgagtctttaagattgatttagaatgttgaaatattgagtatgatcgaaatgcgtaacggattagttatttactacggctatttaattg

SEQ ID NO: 27453 - DNA, 2310 bp, Arabidopsis thaliana landsberg
gtgtcgctttggtagacaatgttatcttcccctggaccaaccagaaccattttcatttccaattcttgaatctctttctgtattctctgttcctctcggtccatattcctaggatcaccatgccctataatcctctcccgggttgctaacctatcttgttcccaaagatgaagcacactcgttgtgaaacggcgtatagcctcgataacttccttttctgatattctatctagagcttgttcccactggttacagatcacgaaaatcattggagccccaatacgaccaggagaaaaaggaacgattccatctggagtttcctcaggttcatagaaaagacacttcataagccaactattcagctctcttacaaaaacccttttgcgcactaacccaactcgaaaatcccacaatccaatttataagttcatatccaagcgtccttgttacctcgagatgctccccaccaaaatttttgcttgctctaatggggcctaaacctctggcttccttaatagcctcacactgacttttatggcactcaagcatggatttccacattttgctaagcctgaaagatggagttagcatctaatgagaactcaccgtaaaaaccaatcatagttatataccgattgcatttaaacttcgtccagcttacccttggatcaattcattgagttgcagccatagctcttcgtctcttatcttgttaattgtaactgatattttgtcaacaacttgaatcgcaatccttatctttgtggacaaacttctaactaattttcgtgttgaatctactttttgattctcggcacctctttcatccatacgcttaagcttccttaactttttctcatggtttacacgcattttttcctcggcctacatgcacaaactttagttcaaactggaaaaaagtaacaacagaagaagagagcaaacaaaaagatcacatctcagtatccaacgagagagtttatgcatcaacataccttgacctcatcgtaaagcttcttcttccaaggtggagcttgtgcaatgtcgaagaaagattacgagactttaaagcaagctctgcctcaatgtctgcataagtaggagcagtcactgaagaagaggcttcagctttagcttttttggaggttgatgattgagctgacgaaaccacagacggtgatggggtcccctcatatagcttcttcgaagaaactgctccaatacaaacacagtccatttttacaaaatcaagaatgattcaaacacaacaagctgacaatagtggcaacagaatcatatattgacacaaaaccataataaatattcaactgatttctacaaagaagcaaactttctgcaacacaatctccaaataaggaaaaaaaataatgaaataagagatgatgaaagctaccatttttgcgaccatatggatgtttccccacttcaagcatcactgcgatctcatttcctgactctgcagctctcaagaactgagcttctatctctttcgcaacctcaggaaccccacgtctgacaccgccaccaccacgtgccaccgcagccttactcttcctcacctcatccccaccactatcctcaacaatttttttctccacaatatgaacctcatgctccatttcttctttctcaactgacacacttggcctagtctgatacaaagaagccttacctcctcctcctcctcctccgctagtgctagcaccggagttacctaacggctcttccacagaaactgcagctacaaatttctgtttcccatgtacttccttaacaactacatcatcttcctctaaatccggaacacccaattcatctcttaactctctcgtatcacgactaggagtatacggagtataatacgtatcaaaagggtctaagaaatcccaaaccttttccctcggcggcgacggtggcggcggaggcaatttcgatccgtagttcgaattcagatatggattatactcagaggttgatgatgatgatgattcaccgaaatgaactctctgaggactcgaaggtctctgctcataaaccaaagaaggaggcatataactattcttcatataattcatatgcaaatacgatttcggattcgagtcatcatcttctagatgatgatggagaggagatgaatgcaacgaatcaatatcatcatcgtcgtcagagtcagaatccgaatcgaaatcgagatgacccgacccagaatccatcttgggtttagcttttttgggtgaatcggaatcgttgtaacggtgatggtgattgatgaattggtgaagagagtga

SEQ ID NO: 27454 - DNA, 1381 bp, Arabidopsis thaliana landsberg
aaaggctccgagttcgacccatgaaaataaaatcagtcaatcctttgctttttcttcatcttaaagcgtcgagtctaatgccgatttctctatggagaatactcatcaggatcatgatacaacctgcaaacatgttgcgttgcccttatcacagagaacagatcactcatcttttttttcaagaactcactcatgcatattaccactcacacatactatcaaataacacggcactaacactaaaacaaattactaagttacaaactgtaccaacacaagatttgcggttatttattcctctaagtaccaaactattcgtgtcctcgttttaaaacatttaaatgcagagacaaaatcagttgaagaagaccttaattagctgcaaatatgggataatattttcctagtaatgccaagttgccaactataaaaaatgagaagattgtcgaaaagaaccaactaattacaaaaactcatttcctcaaattctggtcacgcttcgctttaaacctgtgtgcttatccattgaaaacaaaacaacatcccacgtgtcaccttctttgccacacgtgtgaatcttaaaccacacatagccgttagaggtaacgtcgttaccgtgtcttatgatatacggaagttaacgccgtttgtttagttttttctttttaacgtccgtgacggtttcataacctcgggaactaagtaaggaagagcttttgaagcagagagtcgttacgtttcaaacaaccgatcatagtcatagacacaattatggtattaatttcattaattagtactaattccctatcaattacaaggaacgcaattacaaaattttgtctataataacatcaattttagaccctcatttcaaggaaaaatgtgggaatgattctccaatgacatatttatgattaaaaagttcatttctcaggttcgaaatattttgaccattttgaaatatactaataatgttgtttaaaaacatatcttattagaatgtttatatggtgttatagtgttgagatatttttttaaaatataaataattgagtacaaatctataaatttaaacaataaagagtgttattaacaattaatgataagtagtaaaaaaaaagaatattcttcaataaaaaccgtaattcatttttttcctatttttttaaaaacaaaacaaaataagataacgataggaaatgccactctgttacaactcagcagtctaatgatatttaataaaataccaattttagtggtttatggtcaacaaaaatagttacaagcttagctagatgtgaatacatactatatactacgaaactagtttatgatttgtatatgaatcaatagaagcgttcgataattagtatatataaat

SEQ ID NO: 27455 - DNA, 1112 bp, Arabidopsis thaliana landsberg
taaagctcaacttcatttaaccctcagctaaaaaaatccctttatttaaactgcaggcttataaagtcataaatatatgctattagaaatggcttcacaagaaccagatacttcacccaaaaggtccagttctgggattttgctctggtcatccagtatatcctcgaacctgtgtgcagactcttaaaacaaaagaaagatggcttcgtgatgggctacaacttaaggcgaatgaagttccctcaaaggtttccgtgttttattctctccctgatgattatcttagtcgttccccttttttttcggtttgatgatcaactcttgaagtccattattaccttagattcttaagcgaaactcgaagttcaagaaagtaaaagattttgaagatggcgacaacaacattaaaggtggttcttcttgcatggaactatatgggaagtggcaaatggaaccattgtgtctccctcccgctgttaatggaattgtgcccaaggtaaaacaaatgttgttgtatttgtccttgtttatatcgcttctgcagttgcaacttcatcaatactttaaaacaaaacatactttgtagacgggaatagtgtataaatgtataatccttatgtttttttcagaacgagcgcggtcaagttgatgtctggtctgagaaatgtctcccacctggaacagtccacttaaggtttcctcgaatatttgcggttgctaagagattcggtatagattatgcacctgccatggttggtttcgagtacagaagtaaaggtgctacacctatttttgaaggtattgtggtctgtaccgagttcaaagacacaatcctcgaggtataatctctttaattttcaatctgaaacagagtaccatgttttgaatatggatccgttggttatatcttgtttttcttgttgttttggttaggcatatgcagaagaacaagaaaagaaagaagaagaggagagaagaagaaatgaggcacaagcagcttcgagatggtatcagcttctttcgtctatcttaacccgtgaaagattgaaaaaccgttacgctaataactctaacgatgtcgaagccaagagtttggaagtgaattcagaaac

SEQ ID NO: 27456 - DNA, 1404 bp, Arabidopsis thaliana landsberg
caaccagcaattctgatcatcacttctgcagtaaaactaaaatcaatggatttgctagggcaagatatatgtgaggaataaaagatgaattttccaaaaggcgttgcagattggcacatatgtcaacataaggcacaaataaaatatcaagtcaatgaaactttagaaaatgccagaactgacaatgttggaatcatatatataagacatggattgctaacctcaattggaaactcaaataacaaaagtgttgaaattgcgtgacatgaaaaaatagctttacttttaggatatgcaagtaaattttattgcaactgcttgtcatacaacttctagaatcagtaactgcttgtagagaagtaaaacatcacagcaatctgtacctgtagaagtgttggtatctcaaactcagtatatgaagcttggtatcgagcaggaacatggaaaaagagagcctgttacaaaaagaaaaataatttctttaggcaagaattagacagtcacacagggcgcaccaaatacatctagatcttctagtgctggaactgaaaattttaaaagtattatgctagtaagaataattgacatcattcagtgcataaatgaaaatttcacatttcagaagacgttggtcatccatcattttataaaaacaagatctaaaactaacacaaaagcatatgtagatcctaaagtagtcttaaatggaagttgggactttggatatcctaaaccaaaaaagtgtttttggttgacacactatcaacaaaaaatacttaaagaggccaattcaaaatatgagcctatgaccaccaaatagctgaatctctacctttgcaatatcaggttgcattgttcccctgtatgaagcggccagaccaagcatcaaacctaccgtagtgctctcatggtcctaaaagatcaaggaaaaggaaggaggcagttcaggtaaaatagaaagtacttcaccagggtacaccgcttctatatgtgatatttaataaaaaacgaccacaattattaaataaggcagacatggaaaattagtttacataaataatgttgcattcatatctcctcactaagccacatatatggccccagttatagatgacatgtgataatccaaaaaaaatcgggcaaacaggtaaaactagtaataacttcgatcaagagccacagtaacgtgatgctcaatacagcagacatccacatatatatatatatatatatctcaatcaaagaatggaatatgtattaggcctcactgagcacgtcttactagttactattgcccaataatcaagtgcgaaaaataaataactaaatggaagaaagagccaatagaaacaaacctgagtgaaatattggtatatgtcactaaagtttaacacatgcaaatat

SEQ ID NO: 27457 - DNA, 2083 bp, Arabidopsis thaliana landsberg
aaaaaaggcaggtgctcaagtaagctcaaaatcaattcttgttcacacttttccgatcattaaacctcataggtggggtagcagccaggtctactgtactcgtctagtcaatgtattggtctatttctgtttcagatttcccttaataacattatgatggaattacgaaaagtatgctgccatccttatatgctagagggtgttgagccagttattcacgacgcaaatgaagctttcaagtaatatctcatttcccaaaaatggttatctgtttattactacttattaaagtcgtctgctaacttttgcgttgaacgttttcttatatgtatcaaagacaacttttggagtcttgtggaaagctgcaacttctagataaaatgatggtcaaactgaaagagcaaggacacagagtcctaatatacacacagtttcagcatatgctggacttacttgaagactactgtacccataaggtatttgaacttcttatatgtacagtctgtttcagtagattttcattcttgttgtttttgtagaatatcattttgacactgtagaatcaactctaccattttctagtgttagagtacttaggcacaattatggaaatacaagcatgtgctgaaattgagagtatatgagcattctgtgcccaactgaaagagcaaagacacaaagtttccttataaacacagtacaaatcacaagtttagccatcttctatgtacagtagttttccaataggtcgagcatgtgctgaaactgtgtgtatagagctctgataaacacacagactcagcatatgctggatctacttgaagactactgttcttataaggtactgaacttgttatctgtactgcgtatgtacgagatctctgtattcttgctcttttatttggacactttgttctcatatacactcggttcagcacatgctcgacttactgcctaaggatcttgaaaaaggtagagttgattctatgtctaggtgcaattactttcttagaatttttgtcattacttactctgttggcaatataacttctttattccctcaaagattactttttttggtttcttgaaatgccattatcaataccattgcttttgctgacgcatgcacttgagacaacttgtttttatctctttctagcacatttttttttaacatgcagttaaggaaaattctcatatgatttatgctgttcattttcttgtctttgtcagaaatggcagtacgagcgaattgatggaaaggttggcggagctgagcggcaaatacgcatagatcggttcaatgccaaaaattctaacaagttttgttttttgctctccacaagagctggtggcttaggaataaatcttgcaacggctgatacagtaatcatttatgacaggtttgaatttcagcttctcttagtgtcatctgtactcttttcatagttattgtgtcaagctgtaagaggaactatttggcttgatagcataatattttggaagtttaatgttgatttttaagtgaattgggttgtgatgagtgataaaaaggcacttggcttttttccaataacagctatttcttgaacatggatgttctaagacagcaggaagatcaggaaaattattaaccgctatcttgctaataattagattttgtaggcatgcaatatgggtggcgtccatgggatcctgcttggatggcagtttgttttggtttacgcctgttcacattttcatacgtacgattgaaactgttttatctgtttctgtagtgactggaatcctcatgctgatcttcaagcaatggctagagctcatcgacttggccaaacaaataaggttttaaattttatctcttagtgctgtcaacttgcaattttgtgttcttttttgtagtttccctaattttccttatattttcctttaggtgatgatttataggctcataaaccgaggcaccattgaagaaaggatgatgcaattgactaaaaagaaaatggttctagagcatcttgttgttgggaaactcaaaacaaaaaacattaatcaggtattcttttattgcttgaagcctttt

SEQ ID NO: 27458 - DNA, 1870 bp, Arabidopsis thaliana landsberg
  unsure (1)..(1870): unsure at all n locations
accctataacatttgatcaggactacgaacaatggtatcattttattagttacctcttttctttttggatcccagttttaaaaagaattttttaaaaacgcctctttcatgagttcattagtaatctcgtgtcaaaattggtaacatcagctctttgtttgtaagtaataccatatcaacatatacgagaaaacttttcggatttttcaatgaaccttgaggacaaggttttttccagcgatagagctagtattgatgacccataagatgataatgatgnnnnnnnnnnnnnnnnnnnnnnnnnnnnnnnnnnnnnccaaactccaaatacatggaccgagtcttagacaaaactcatatttctattgtatatgttttttttgcaaatatcaaaagactcctaagaataggaagccggtcttccattttgttatttcacattcaattacatactcgtttatagaaactgtgaggttccaatttcctatatttaaaccccaaattaatcaagcaataaaagtaaagagttttctgcccttgaagttacactaactaatattagtaggaaacttatcacacatatctataaatatatcttccatagaaggaagcgactaagacagataaaaactaaactacatattgacctagaagatccaacaattttgacaaaacttcacttaatttgttttgttaatagatatcagtcctattgtgaagttaagctctttgcatcaacctaagtatgcaaaaagagtaactgagtaactaagggttccacgttctaaaaggcttcttctttattaaatcataattaagaccaggagttctagtcaggtgtctcgacaattccaaggctggacctaactaggggtgaacaaatcctaacaaagtatgcatcaagtgagaatcggccagcgatcttgaccaacatggccaaactactacaaccatttggttattatattggagggttgtagtagacactacaccagattcaattttgacaacttatatataggattatattgattcattatagatccgtaccaaagaggttggtatttcttacatgaagacaagtgttgtgggattttcaatttcctagaggcaccaaagaaacaaggctgtgtgaatgacaatttccatgacaaaagacacaagatacaaaggttgtgtgattgtcgattttcacaacaaaagattgaggttgtggattgtcaattttaacgaataggaacaaagtcataaatgaacacaacgatgataagattaagggcgataattgatatacaatcacataaatatgaggcaaatctatgttgtgtaactgcaagagtgggaaactataaacctttggacaatcttcaaatagcatatcccataaaaaggagagaaattcgttaaaaatattatgtatatattaccaattcatcttttagtcatagtttcccaattaatgtggcttacatttaaaaccaaacttcttgatcctttttaccattaacctcatactaattttatttataaatctcccggacgtgcatatacaaatccaagagaacaatgaaatttaattagtctaaaattagaccagtttatgtacagcaaaaggtgttatatatatagcacacgacgattgtgattcaaagaatcgcaatcgataaccagattatgttactgaagtagcatatgtgcggtaagtactaattgtgaggctgagttttttgaagctaccaaaattcaaaactactgtgtatgaaaaatatgaatcaattaaaaacactaatttggataatcaccaagtaataggtccacagcaaagataggaattcatagaagattaccatagtcttatatagtcaatagc

SEQ ID NO: 27459 - DNA, 2055 bp, Arabidopsis thaliana landsberg
cgatcacttccatgttaccgtgattcaattcgtttattgaagctaaaagcgtgtcgaaactggcgtcgaggacgttcgtgtagataacgccgttatcgttaacggtgttttggccgtcaaagaaagcgtattcgaaaggaaagtcgctgcttaagtagagactgaggaaaggataaatgttgactgtgaaaggagctttgttctgtgcgaggaagttaacgatttgtgtcatttcttggataatgtcggaacggaatcttccggcggatgggacttgattgtccggaggagaattgtaaacgtcggcgtttaaaggaacggtggctttggtaaaatcaccaactccagcctcgtttaaagcggtttggatgttgaagagtgctgggtacgttaggtttatgaatgatccgttgtacgctgtcaagaacggttcgttccccactgcaacgtatctgcaaaattaaaataaaaaattaaatcatactttagttcctagttttaaaatttccaaataaatttattcttatgatttaatttcgataatttcatgatttatgggtttgtggaagataaataacggctatgatgcatcatacatgtatttttacgtttgtacctatgtaggaaatttcacatggtatggtatgcatctttgcaataaagaggaattgaaaaagaaagattccgacttttttttttttgtcagaatacgtttagatcattagcaataaatacttgacacacacatgacggtccatatttgagtaaagatgaaatatgggatataacatatgacggtccatacatgcgatatgcataaaccaaattcaaataattcactttcagaagtatgtatgtattatgttatttaacaaaaatacaaaaaaaaaaacctaaaacatatagagataaatgaaaatatgtggtgctcaacaaataacatgtcaagaactgatataataaaagaaaaataaatgattcaactataatagtcgtccaataatagcagttaaagaaaaatattgagttgtcaaacaattcaaaactcaaaaccaaacgtgtaaaggattggagtttacctcagtttgtctaatctagtgggctcaagactattatagacctcctaatccaactattattattgttttcaacattttattttctatcattttgtcatcatttttaatttttttgttcatacaaaattaaataataatacaaattcaaaaataatcaactgaaaataatgttctgtgaaattccaatattccaaaagggtctaatatctgatttccccttttcagatcactacccaatatctaaaaaatcaagtagtcctaagaaacttcttaccttatgttaaataacaaaacaatgagtttcaaacttacttgatcttaacgccgttgttaaagttgaatctagagacgtttctttggacccaatctttagctctttgatagtttcccatcgctaggagcagatcattagggatagccaccatcacttcgacgccggagccggcgagactcccatggtgtttgtgtcggcatcgaacaacttcactttctgtatattgttgtctttaagcatctccaccaccgtcttcggcggtaactgatgactcgccattgttccccagtttactcccaaaccagagacaccgccggagagaaaacatacggcggagatgatgataaagacaacggcagagttagttatagcactctgttttcgtcgataattcatttttcctttgttttcctctgttttttccgggaaaattttgtgcttggtattagaaaaaaagaaatcttggaaaagttttaaagtttgaaagaagaatctgatgggagaagaattggaagaagtgtaagagatatataaatattttttggtgtgttttgtgttctgtttgtttgttgtagctcgatgattcgaataaagaatagaaatgatttgtttaagctgacaaaaatctgagtgaaggaaagaaagaaggaagaggagacaaataggtaagagagctatagaaggaagaagaaggagaacaga

SEQ ID NO: 27460 - DNA, 898 bp, Arabidopsis thaliana landsberg
  unsure (1)..(898): unsure at all n locations
aaataaaacagcatatatcgtaacactgtttcttttcttgtgatatatatttgttacatatatctaagtgaacaaagttaaatacttaataactttgttcatctctttttattttgtttacactggtattttcaaaattgtatccaaaagtttcttccaagttgataatcctccacaatcacggcggcatctactgatacacgtacatcctcgtctatatggattagctggtgtacgcttataacaatcgggtgttggaaatcttggattacaaggatgtttttgccatggaggatattcaatatattttttcttatcattgctatttataaacacacatacaaaagccaaaactgtcacaaacataaacacttgtgctttcaacattattttttgttcggtggaaagattggaaatgccgattcttttttatagtgcaagagataaattatatatatatatatatatatatatacagtatagtttcattcactttaatacaaaaagttcattcttatctttggcagtgcagattctttgtagttttattaatgaaaaaaacaataaaatttggtcgttatggtttttgtttcagttaagactttaaaaaataaaagatacccattctaaaataaattcagaaagaaaaactgagatttttgacgactacttgatgttcatttgatttgatttcggttatggctttaaaagatttatgaaataaattttagtcagttttttttttcttaaatattntagtcgattttccatgctcattaagttctagtttttataataataaatgtgagaattttttttaaaaatagatttatgacatatgagagtatagctttggttagaaaaaaaacaaggggggatttaattgggtttgatcgtt

SEQ ID NO: 27461 - DNA, 1657 bp, Arabidopsis thaliana landsberg
cggcagagtgtttgctaacttgatacctttgcaaatgtcataagacagattttctataagatatctcaagctcgcagcctcgtctatgtgtgtcccttgatgtctgtctcggtgaaagcatcgactcccttcttcccaacttcaccgttgatcaaaagaaaggaagcacgtaaggttggattgcacaaaacaggtttggaaaacatcttcatcctctttttggtgtggagtttacttgttgcgaaaataacataaagtacatctcctatatatttacaattacttggagaattagtcaacaataatgcttggagaaatgaagattaagttatatttgatgtatgtggtgatcaagattttgtttggtcaattgaagatttagtatatgacggatacacaatattgttagtaattgacaatgagtcgacaaaaactattttaccaacatgtctattctacatggaattgcatcacatggccaaattttgcactagtggcactaatctgctattatattttattgaatattaattatccaagtcaagaatacaagattgatatcgaaaacaataattttattagaacagattgtatcacttgaattattctaaaatcccataataaaatgttatagtgtggtaggtttaaagtaccaacaaatttttttcttatcatgtagttagaaattaatttttgaacctttaaacacactcttcctagaattaaccgttaacaaaacttataatttaaatcctctgttctactatgacatgattcatagtaaaaattccattctttcttttattttaagttctcactataaatttatttatttatttccaaagctaaaatatcataatttgttgcagcatcaaagacttattcactcacttgtagaaaaatctcactctcaataactaatgttccacgtagtataatatgggcttttgaggcctaatttacacggcccataaagaaagatttctctagcaaaaataaaaccctcacggccagagatcatcgtctccaagcaaaaaaaaaaacctaaaacctccatcaacgccggaggaagaaattttgtgtcatctacaacgaattcgttaatcgcgatgaaggaagacgaagtaaatcgatgccagattcagaattggtatccgagattcaaatccttaaccatcaaaaccaaatttcacaaacttccagaatcattcatcaactatctcatcgacgattctggtccgtttcttctccctcattccgtaacaaacgaagacgcaatgcctaacagagtccacaatttcgaagaagaagatgatttccaagtccccgaagaatcttcagatgacgaaccattgaatcgtccttcttttccagaactcgaaatcgagatcagagaatcaatcgaaaccctaggcggcacaattatcccgaagctgaattggagttcaccaaaagacgcagcttggattagtccatcacagaatctaagctgcacttgtttcaatgagattgctctcttgtttcgttcctctgattcgttaacccatgatctcttcaatgcttatgattcatgtagtgacacagtcttctcaaggccagaaagtttctaccagaagttagaaaaatggtacccttcgttgaagcctgagatggaatt

SEQ ID NO: 27462 - DNA, 1193 bp, Arabidopsis thaliana landsberg
aactatatatatatatattatatgtaaaaacttttcttgaaatatttttttaatattttactgtatcaaaaacttggggggttgttttctagacatgattattattttttacttgtaattggatctagaaagatattttctataatgtttgaaatcttatagaatttattaaaaagttactaaattaggaaaatctctccataaattaataaattttgcagtcacaacattattaatttatagaggttttacagtattttcatttgaacatagaggaaatattattttaatttttacttaaatataatttaacgttaaatatttttttaaaaattgaattttttactatctttttttttgaatctagtgttaaattatatttaagaaaaaaataaacgtttatacatatacatgtaaactttttgaaaaaattacattaagattctatcactgattttgtgtcgatgcaaatcaaagttgaaaaaattacattgagattctatcactgatcccgcaaataattttatcttaatgattttgaaattctgcttcatatattttgttttttaaacttttcctcgattatctggttccacagtagaacaaattagagccatacatacatcatgatatatgttgaagtgtgagtgactagctagtgtacttattagccaatgtctaaaaatgtcggcttcttgcttgttagcttcttcttctttttctgtctattgcctctattattctctcggcccactccctcacctcatgtgctctctatagctataaacctttctctccttgtctctttgtgagttgtacgtgacactctctagatcttcattggactttaccccaagtcatatacagatttctatacattacatgttcttataacaaaattgacttaggcttccaaaacgttcactgtaaattgatgtaaccatcaaatcaatcgggccatacactccccctaagccttccctcttcgctgtgacagccaacgggtttcttgaggtggaccgcggacagcatggatgatacatacttccttgataatcaaatggaagaattgagagttgatgcatctactggtctacaatggatcgtgtgcatgcatttgaaatcgattagtaacaaagaaattgacccaaacgaagaaagcaatgttgtcgctgtttctttgttctaaattg

SEQ ID NO: 27463 - DNA, 1385 bp, Arabidopsis thaliana landsberg
tatgaccgataaagaagcaagtggagccattgattttacatagtctccaacttcagtttcagaactgaataggtaaccaaatacatttcttgcaccaaagactattgcacccaccattattgattctacacctgttataaccatcgctgtgtaaaccgccattcgagcttgtttcgggtttccagctcctaactcgtttgcaactcttgtactacaacagccacaacataaagaagggtttaaagttttagatagatagctccatattgcaaaattgggaaactcaggaagaaagaaccttgctgctgcgccgagactctctgggatttggtacaaggaggattgtgttgaaagactgttaaacaagaatgaaagcccctgatttgtatgataatattccattccagaaccaattctttagaagattaaaggaaacataccagactgagagaacagaggcttctagcttcggatttggcaaaatcccagagagcaggactagaaattggaatgaccaccactcgaggctaatccaacaacaccaaagaagattcatgtcaacaactctatgactaaaccaaaagaggcatgaaaagagaagcttaagataccaaatcatagacgcagatgggattccaaaccggaaaaactctcccattccttcaaacaaactcatggagataggtgcgcgactcttcctacagctagaagaaaacgtcatgtacaatccaagaacagtcacgtttagccagtaagaaacgccgatcgcaatagctgcaccgaggcttccaagaccgaacttaaagaccaagctccaacagaggacaatgtggacacagagagaagagactgaactcataaccaaaggcaaaatcagagactgtgcttggaaaaaccgaacaagcggctgcaaagtagcgtaaccaaagagcgcgggtatgagccaagttgcaaacttcccagcttcttgagcaaccatagcatcttgtccaataagagaaagtatatcaccaatgtagctccagagaacagagagaggaatacacacaagaaacaaagagacaattcctgtgtaagtatgaacaccaagcttctcgtattgcttagctccattagcttgaccacataaagtctccaacgcactagccaatccaaactgtgtgattaccacaaccacaatttagaatcttaagctaataaaaaagaaaaagagaaagatcaagaaagagacatacaacgacgctgaaaccggtgacgctgcagaaagaaacagcaatggctgtgctagagaggaaaagctcacggagatgaccaaccaacattatagatatcacctgaagatcatacatagacgagtacactgcaatgatcggaccggcgatgta

SEQ ID NO: 27464 - DNA, 1654 bp, Arabidopsis thaliana landsberg
  unsure (1)..(1654): unsure at all n locations
ggttttactatgcacaagtcctttgtttcaggtcgttatagcagacgaatcacattttctcaaaatttgtcaagcaaagaggacaagtgcttgccttccagtcataaaggtattattgatatatcattcactcattgttttgcctaccaagctagttttagttatcagccaacagaattggaaaatcagtttcttcttggtgcaactgtgatacttttgttacattattaacgagtaatattctcgtggtttgttctattctattaagatccatacctcatccttttatttcagaaagctcaatatgccatccttctgagtggaactcctgctttatctagaccaatagagctattcaaacaggtgatccttccattttattagtcctcatttctttattttatttggatttgcgagggaccttgtgtatctctggatgtaatttgattaactaaatactccttttgttctttcctcttggcagctggaagctctatatccagatgtttatagaaatattcatgaatacggtggcagatactgcaaaggcgtaagtccattgcacattgagaaactacctagaagttcatataaggtagctcctgtgcatcataaaatttatattatgttattcaaattttcagggattttttgaacattcaaggcgcaagcaatcatgacgagttgcacaatttgatgaaggcaacagtcatgattagaagacttaaaaaggatgtcttaactgaacttccgtcaaagcgcaggcagcaggttattagtcgtaactctttctctaagtccacacatataatgtggtatctttagtacttgtttatgatttcgttttacattgttaattttatctttgtttgattaggtcttcctagatttagctgcaaaggacatgaagcaaatcaacgctttgtttcatgaggtaacttgatttagtttttaatacttatactaattaccttcctcgacgaaactgtttttgagaaaagaaatgaggtttactttctcgtttacagttaaaggtggtaaagtcaaaaattaaggattgcatatcagaagatgacattaaatctctgaaatttatagagaagaaccttattaacaaggtacttatttgctttttccgaattatttctttacaaccaacagctaaaaggatttgtgattcatttgtgtgcactttttcttgccagtatatgttcttttatttcgttggacctgcttgtttttcatagtttcttataacattccctcgtttttttaattcagatttacactgattcggctgtagccnnnnnnnnnnnnnnnnnnnnnnnnnnnnnnaatgtgattgaggtaatagctaatagcaataagatgtttaaaaactcctatacatgtctgatacctgttcctgttgtttctcttcgagcattgttatgcaggctggctgcaaatttctggtgtttgcacatcatcagtccatgcttgaggaattacaccagtttcttaaagtaaggcattgaactatcaacaaagcttccaaaagcccgtctatttctcattaagtacgccaaaaaacaaaattacagaaaaagaaagaggaaatgcatccggattgatggtagcacccctgcctcctctaggcaagcgttggtttctc

SEQ ID NO: 27465 - DNA, 1953 bp, Arabidopsis thaliana landsberg
  unsure (1)..(1953): unsure at all n locations
ttcactgcttctctctcggcttcatcaacacagttatgaacaatcaaattattttcatttatctttaagttatactgactggaaaaactacagacacttaactgacacttcatcagcaggaaaattgttaaacgagaaagatgtatgcatgatcaatcttctacctattagaatctgaggaagagctcacaaaacaaatactaacctctcagatcaggggttctttcaacttttgttttgttcagtctgttaactatttcattgactcgcttctccactctgatagtccggacctgaacgaaacaaatatgagttaggtatcaatatcatcgaagctttacaaccatactttgagcagtttatgtatgcgcaaccaaaatttctttagagatgaagaagcttaccatctttgaattgtggaaaccaacttgaccaacatccatggaggcagttttcttcaagttggaccacggagtgtacacaacatcaacgttgttcaccttgttgcctggcacataatcccagacaccagtcggtaagaaaacagaaaaaacctatatgtgccctccttctaaaaaacaaactggtactctaagactaatggttatgcaaatgttaagttcacgacaggtagaaaaaaagattaccttgaatggagttagctttcacaagctgagcacagtcctccagcacaccttcactaatgtcatcaaaactttggcctctatgaagcctcaagtaaacatgagctgacgacattttatccacgtgaaacctgcatcaaatgaaaattacttttaacagcttggtcgtaaagctcctaaagtttataagaaaaataaaatattcaaattagaagataaagacaccctatacatgtctaaacacatcaaagattgacattagcaaaaaaagaatgagtatagagtagacatgatttaccataagtttactcatacatcccagttatgaataaacttactgaaccgcaaacgatttgctcagcagcatatgatcaatagaaatgctatgaaactcaactctagtttgtttttgaaaaaaggaagaacaaacccttatttatatcaacaaacatcaaagtttgaaaatagccaacacaacatgagtggacaatagacatgccaaaaaaacagctctcaaataggggtgagtacacaacttccagtaaatccataaatctaactcaaagaaggactaatcaattaacattatcacggtattttcatatggcagctgcaaaaccagaccaaacaacatttcagaaagtttccaaacatcaccacacttgaatgaacaccaagactcggcgataaggggccccaatatatctaccttttcagtactagttaaccataagaacacaaatctatctatatacccacgaaaaagtttaagcaagcatcataattctcagtcaattctaatccatctcacacaacaaacaaagaatttcagaaacagtgaccaactatatatccccttcagcaaaattttgactgaagataacaaaattcgatatgtatatataagataagaactgttcccatcgaaaggactagaacttgatcatcatttccttcctctttcaattccaataaatgaatcagcaatagatcatgacataacaaaacatctgtccacaaactcaaaatacgattaaagccaactaaatgaaaagctgggcaattcaaagctgataccgatccgagaaaactcgagaagcgaaacaaaagcaatagatgatcgggaaaaatcgagaagannnnnnnnnnnnnnnnnttaccagacatcttcagggaagccgtacttgatgagctcctcgttctcgaacttatcaagccccatgaagatggtgtagtcaccagcatcaagacgggccttgaagtagaaaaccatcgcttcgattcgagaaacgaatcaaatgagatggag

SEQ ID NO: 27466 - DNA, 1506 bp, Arabidopsis thaliana landsberg
taaaatacccgaaaccaatggatacccgttttttttggaaacttattatgtatctgaaaaccgaaacccgaaccaatggggtagatttttctacccaaaagaccagtacacgatcgggttttatccgagcccattctgaattcccgaatgcccagccctaaaaggctaaaaactaaccgattagtgggtgctaagaatcaagcttaacttgacattgaccataatgatttctattacctaaacccaaaaacatttgcacttccccaagaggcaagacgacataagtttgaatacatgtctcaagagtctaaatattctatctttaagtcaaataatcccttcaaagtgcatcgattaagatgaaacagcccaattactttcattaattttagactacgactctcctttaaccaatgaatgttatatccctttataaaccaacaaaatctaccaagaataaccattgtttactgcattatgttttgtattgagaattgatatcaagcatgtgctctgacactggaaagagtatgatggaggccatcgaagcaaaggaggcagagcccgtgctgatcgctggaaaagaactttttcccagatctttccttatgggcataaacatcatgggtgagaatctgagtgagccagccttaagtaggacctggtactggtctccaatagaaggtcttaagcctgagggagcaattaggaagacgaatgacttcataaggtaggagattgcaaggatgaacatccatcttgaaaccggtatcaactctaccttgaggcgcaagaaaggtattgtcattggggtggcaagggctgtatccactaaaatgtatcgcatagtccccggaaacctcacagctgaagagatggacactgcaaaactggtggtgggagatgatgggaagaccatagtgatcaaattcgacgtggactctgttaagttgttgctactcttagctcagattcacacaaggaaaagtataaacccaaacttagagaattacgatcgaaagagagattcaaattgattatcaaagcaataaccaaatcaaattcgaatatcaaagatcgctcgctaaatgtttgctcacgatctacaagtaatcaacatagactactcactggaacatctccaggattattcgctctctctcaacaactaagataaaagacataatgaaagagaaggccaccaacgactatttaagcatcttcagtcgtaacagcaaagcctccctctggaacagagtctttctcttccttctcttcttcagcaaacactctaattccttcagtgtctttctcatctgttgactggatccaacgtggcattgaccgcttcctgtagtaagtctgatgaaccgtatcaatactctctttgtcgaaaatcagcttgtcctcaagcttgaaagttggaaacgcgagaacaaagtctttggataacatccaaaagttgtcagtctccggatgatcctgccattgaaccaaaaattcacg

SEQ ID NO: 27467 - DNA, 1392 bp, Arabidopsis thaliana landsberg
  unsure (1)..(1392): unsure at all n locations
cctcagctctctttcttgatggaaagtatgatggtattagcagtcgagcgattcccttagcaacatgagtctgatcagatgcaagcacagataataacacatccaagttcactacctgcgtataacaatttaaccaggaactcaacaaaagtgaagaaaaaaatatcgcacatctgaaacagaaatggaaggcctactcctaccgtgttaaactggaaagcgcgaacatctcgtataagaagcagtagatctaccatggcaacgcgtactgaagtaacactatctagcatcaaatgccccagtcttggcagaatcactttaagaatgccatgggattgtgggttcgcgaggagataagttataccattaaccgttgaaagtctaacctcactgcacgattcatgtgacatatcatcgaaaattttcgtgaggaccttggtaattgttgctgatgggatcacttcccagaaaagatagaaaactcgacagagaccttccacagctacagacctcacatctgggcattcatcactcaataatttttccaacaagtagaactgtttgtcaagcaaagtatcttttgcttcttttcttgcatctggatcctccatggggaaaagatccagaagcaaatgtaaagcatttaaacgaacatttgaatttgcaacctgaaataagataagagcagcaaaatcacttcctaccaaataatcaaacaatgtcaactaaaatagccaagaaaacagtttcagctagaaaactaaagactgctaggaaatgacttagcttatcaccccaatgttacttctttaagataaaggcaaaaaagttaagaaacaaacctgtaacgagcgaaatatcataggctcagcaagagtaaagagaagcttctcaacaccttgagttgtccgctgactaataaacccgcccaaaaccctccttaacgaggcagcaaaggcgcaagaactagcgtgaatagcgctatcaataatcccctgcaaaaacccatcttcaatctcaccttttaaatctagctccacttctttccaagctctaaacaaaatcccaccaaaaccttcaagcacagatttgctccccaaaggaatctgagccttaacaacagcaagaccagatttcatcaactgtcgactaagcccgaaagcaaaagaaacaaatctctgaccatcttcagtcttcacatacaacggcgaaacaacacaccgcataagcaacatcctaagatcttcaatactctcatcctcaaaatcaaacaatgtaaaagcttctctaagcatataaactctatgaacatcaactttcttcttcaatgtcaatgacctcgacaagcaaaacngtaacgactgagaaatcaaagattcttttccactaaac

SEQ ID NO: 27468 - DNA, 1404 bp, Arabidopsis thaliana landsberg
cctttgtctggtcttctcatgtcacgggtttcaggtaacgatgatagatattcttttatactccatcattttatttatatcaagttatattctttgtttacttgaggaagacactcaaagaattattcttgtcttaatattaaggataatataagacttaacgaagtaggttaatctttgtgtaactaagaggacgacatcccaatttcaaaataggtttggcatacacgataaacatgttaaattaggtcaattttttctatttatttttttcaattcaatttttatttttgagttaccaaaaggattattaaaaaaatgaatacaagatttaactactagaatcaaaataaattgcgttaaaaaacaacagatataagaaaaagaaatgtaacaaaaactccaaatgacataaaaagggagtaaaatcaaaatgaaaaacttcgacgaaaatattgttagtttttggacggaacctaaaacgaaaatggcatagtgtgctcttgggctatttaaaaaatatgggccaccattaattgagtgccttgtcttctacaaaggccaattttcttattttatttttgaaaaaaagttctaaaagtttttccaatggttacaagcccatgagttttttccattttataagtataaatttagctctttcaaatttaaaaactgtcaagaaacccagaagatgtaaaagatttttttattttgctacgatacatgatcgttgccttatatacaagagaagacattagtcttatgacttaacctaattacaagatatggactaagttaaacgaggcccatatagcccaatacctagcttgcaaaggaactcttcaaactcctttcgaccaagagctttagtcatgatatcggcgagctgagactttgtattgacatgcgttgtctttactactccacgaattatctcgtcacggacgaaatgaacatcacggccaacgtgttttgtccttgcatgataaaccggattggcagccaattaaattgcagacaagctatcgtagtgtagtgtgataggctgtgaacaatcaattcctaaaacatttagtaactgacggatccataataactcactgaaggtgtcagccatggccctgtattcagcctcagcggaagaacgtgagaccacatcatgtttatttgtcttccacgaaataggagaaccacctagttgtataaaccagcccgtgagagatcgtcgcgagaattcacaagcagaatgatcgataaggaccccatagatcgcaatgaatcaattcaaaagcaaaacttgttttatttgaactcaaaggaaacgaatctcttgtctgcttggcactaatacaaatctcacaatcttttgaatcaaaacaactactactaaaatctgagaat

SEQ ID NO: 27469 - DNA, 1587 bp, Arabidopsis thaliana landsberg
cttatatttaatttcctaagaacaatcaaaataaaaaaattgaaaaagatttgaaccagtaaaagtgtaaatgtatgatatcacctaatttggttgagatgtatgaactgactctttcaaaactagtagaccaaaacttgtttgtagcttagaccttaattttaacaagtaaaaatactttttttggtccatatagaaaataataacattgacattttcgccattggcaattactagctactgagatagtatattgtatggacaaaatgaataggtcaacaagaaaacaattaaaaaaaaaattcctcggaaatgctagtgacgttagaatatagaaaaagtcaattgttgcaagtaaaaccgtgtgaaaaaggtcaacgggccatatagacaatttaattttagattgttaaagtatgatgtagttaaaagaaaaataaaggaaaaaaaaactgaaggtaagcgatttcaaaagtaaaattaaattgtctatatatatgtaaaactttgaatttatacttcactataagatttaagttattatatagtatgtgcttacattttgttaaattttatgaatttagaataagacaactaatagattaatcaatgtctagttctaattagggatttgagtatttgtaacgtaaatcttaacactatccctcccctccgaaatgatgaccttttgatctcatttcgtaccaaatttactatatggtcaaactcggactacaataagcatgttaaatttgatggattttttcgatcataatcaaccggcaattaatataataacacatctcttcttacattatttcagattcgtaataacatgtttacatattctaaacataaccattaatgtctaaataataaacataaaacatttttacatgtaaaaacataagttactaaaataacgaaaccataaatatctgtcatcaatatataataagaggtagatggatgagtaatgaagtattaaatgatatccatagtccacaactaaaaccataaatcacttttttgggtttactccttggtccttttcttctaccgtccaataaatgggaacattttcatcatcacaacaaagttttactttttggactcacaatatttgttatatccattccacacgttgagacagaagagcaattagtgactactgtagatgagttttgaacgagccagtcaacaagagactataaaatccagcaatggtcaacaaagcaaaagtggccgtactctcttggaaaaaaagataagcaacaataatagagagtacgagacggtgcaccgcaacacaggtggttcgtttcactcctacttgtcgtcgcgtcggtgcactttttctcctttttactgaaccaaccccgcgtcttcttttggaacctagcggcttcgttcttttggtctctcatatttctttattttagtattgtctcaaacgatttattgaatcttcactggcattctttaattcgtccttgtgcttcccagctggcttttcgctgttacgctatcactctctcatcctttgaccttatctctcgctaacctatatgtaaacatttattcata

SEQ ID NO: 27470 - DNA, 1855 bp, Arabidopsis thaliana landsberg
tccttatttcccatcaggaagcacaccttctgatctagcctatgctaatggtcacaaaggaattgctggttatctctcagaatatgccttaagagctcatgtttctttgctcagtctaaatgataaaaatgccgaaactgttgagatggctcctagcccatccagctcatcattgacagactcgttgacagctgtacgtaacgctactcaggcagcagctcggattcatcaggttttcagggctcagtctttccagaagaagcaactaaaagaatttggagataaaaagcttggaatgtcggaggagcgtgctctttcgatgcttgctcctaaaacacacaaatcaggaagggcacatagtgatgattccgtgcaagccgctgctattcggattcagaacaagttccgaggttacaagggaagaaaagactatttgattaccagacaaagaatcatcaaaatacaggtgcataaatgttttgataaaaccaaactaaaggtcttgattcgtttaatgtatgtcatattcataacggtttttaactggcaatggtgcaggctcatgtgagaggttatcagtttaggaaaaactacagaaagataatttggtcagtgggggtattagagaaggtgatattacgttggagacggaaaggagctggtttgcgcgggtttaagtcagaagcacttgttgagaagatgcaagacggaacagagaaagaagaagatgatgattttttcaaacaaggaagaaagcaaacagaggataggctacaaaaagctcttgcaagagtgaaatccatggttcaatatcctgaagctagagatcaataccgtagattgctaaatgttgtcaacgacatccaagaaagcaaggtaattatactaatacactaaccttaatctccttagaatcaataaaactaaacaatcttgattcttggtttataggttgaaaaagctcttgaaaattcagaagcaacttgttttgatgatgatgatgatctgatagatattgaagcattgttggaagatgatgacacattgatgttgcctatgtcctcatctttgtggaccagataaatcactacaagctttgttgtgatattgtgtcacagtattattgactcattaaacgtgtaaattcttctgtaatcactcttctcatattctgtaacagcattcatgactctaatttccatgatatatatttgcaacataaatcaaacttatgtatccaaatagtaatcttgtcattagatctgcacatggttatgttcttcgaagagagagtaagagaggagaggttatgttcttgtcaaatgattaaaagcttttttctctatcttgttccgaggctctcgtataacaagatgtagccatgatcagtattacttgagtactcttgcgatgaaccgaagaatgtttgaacagcagattcttcaattatttcgacactctcatcatcaaagaagagccagtggttatgggatttcacgaggctaacataatgaccgtggttaggtccacttccgacatgaaccacgactgcaaagagagagtactcaatgtccacatattcatccactgtgttgctgagtttcagttccagagggaagacgactctgtacgatagcttcttgtagcggcccaactgttccatgtatttgaaccgtttcagatgtataactaagatgtgtggcggtttcttaatcttcattctcttctgcgcttcttgtaaactgcacaaaatagcattaaggatcaaggaaagttaggaattaaagaatgaaaagcgaagggtgcggattaagaaatagcagtttcatacctgcagcatttgtcacagaaaaac

SEQ ID NO: 27471 - DNA, 768 bp, Arabidopsis thaliana landsberg
tggcctcccgtttcttgtacaagccacccactctgatagaaactcacattcatcttctttgtataaaggatgtgtgacgtaatcaagaacccattttcctgtgaaaacatcacagaattctaatggaacaagatcagtcttcttgtctttatcttctttgctttgttgtagtggagtgatgtgttcttgcaggttatgtgtattgaattcctgaaactggccaaccctcagctgcttctcgttgtacagatagcatccgagaaggaatacgggaagaagaatgactgcaaagtatagcagagaaaggtaagctttcctttctctgccgtcagtttgcttcatctcgttgtgttcggtttctggcgatatgagaaaattggttttggcattaatgaatgttgggtcgtagttggtctatcaaaacgttttaacttcaactacttcaacatcttttacaatcatgtagctgataatacacacctactaatcttgtcatttactgaaattatagtatctgtgtttccctgtgaattgtacactttattcaacaaatttttagccttacttggctaacttcaaatcccttgaatctctgtcctatatacatcacaagaatttttttaaaccaaaaaagaggatgaaagaatctcatcttcgagaaataatatgtgtatagagaaactcattccatgtatcaggaaggcctggtaaacaccagtgtatgcaatcagcaaaattggctggatcgttttgctgctcccgcgtcag

SEQ ID NO: 27472 - DNA, 1678 bp, Arabidopsis thaliana landsberg
cttcaagtttctttcatggtcaaatttttccctcattttatgtatttcattatctggaaaatgaagtaatgagaagatattttcttttatcataaaatgaggacaagatattttgaaaataatttttagcttagtttttggtcaaaattaataaaaaaaactgtaaataagcgatatatttttgatttttaacgtaatctcatttaaaataataatttctaattggtatgaatacgttctaaaataacattctcataattcatgttgtatagaaactaaatatttaacaaactaaatatttaacagccttgaccaatctacattttttgtgaccaactccaacacaacataacataagcttctaaaatctaaaaatctttaatgacatttgtaaaaaaaaaaaaaaaacacaaagggtctaactagttctaaatgggccttgggcccaaacaatagtgggccttaaacttagtacgacgattcttcccagttctgcgtagccgccaagatcttacacaaagacataacattttcatccatcgatggacgattcaaatgatctttctttaaacaatccaccactaatctctcaacaaaacttgttaatccttcaggtaacaatcttccatgaatcaaaatctcatcaatagctttaccttcatcgatctctttcttcaattcagaagcttctttaccagtaacaatctccaacaagacaactccaaaagcatagacatcaagcttagttgaaactaaaccatgttccaaatactccggagctaagtaccctcttgttccttccacgtgcttggtcaacacgaaatcttcagtcgttgatcttgctgaacctaaactaccaatctttgctcgaaactcgaggtcgaggaacacattgttgctgttcaaatctctgtgaacgtatggaggatcagcgaagttgtgtagatagtttagccctgttgctatatccaaagcgatttgtagtttttgtgtcaagcttagtaacgatttcgtcgtgtggatccattcgcttaagcttccgtttgaagcgtgttcgtagactaagtaccaatctccttcatggaaacagaatccagagagacggatgatgttaagatggtttagtttagacaataagttgacttcctccgatgcatttccttcgattctcttgatcattgcgccatcggcgttgatttttccgatgtaccctgatcctccaatcgagctagacgatgtgaaatcgcttgtagctgattgcagctcgtgaaatttgtaaacttttaaggattctaccaccatacctgacaaaccatctagcggatcgaattcttgatcagacatcggtggtttcttgcccatgaagctatcgaggtttcccgtttcctcttgcgtttgcgttttcgttttcttcttagacaggaaaaatatggctgcaccgatcacactcaaaaccaatgctcctcctagtactccggcaagagcatagacccatgttttcttcttcgatttcctaccatccggcgacattggaggaggagaaaccgattgtggaggaggaggaggaagaatgatagagttagtatttgaaggaggattcaccaaaaggatcaggattgttgtgaaagggaaaacttcagaattctcaaaagacatttcgttagcttctaaagtcttg

SEQ ID NO: 27473 - DNA, 1976 bp, Arabidopsis thaliana landsberg
caccaattcaaattttacaatgtgtctacaaaaagggctctgagattaaccaaatcagatcctttctatgccggagttgaagcactagatagaagaaacagagacgtccaacaatccatcgaatccgggttattaattggaggtaaaagtaatggttttgcctatcggcggccgacagatcggcggtgacaacggtgataaatactagtctctcttttttcacaaacggtaagaaaaaaagaaagaaggatcaaagctctcgagtctatgctgcgattctgacaaagagattgaagaagagtgatattcagaatcgcaggaaagtcgaaatagagaaaaacaaaatgaactttttggttttctctccagaaacaaaaacttccgccttcttccgttcttttttttgtttgtttgctttcttcaaccattcttttttaattacattaatattgcacgtcgtgttattttattttaactttatgttttaaaaaaacatataaggaagtaagtactactcctcagtgttttaagaattactatattagttgactaaatataatttactcaattaaacatgcatttaatttgttcagtctcgtaatagacagtgattagtgattactgtattttaatttctcttgtttacgaattcataaagaaaagaaattagtagtacacattacacaacaacaaaacgtaatatagaaaaacttgacaacttggtctgactctgagccgtctctgctcggtctgctgtcaaaatcttttctttggacaattctaccccttgttttaagtgtattaaacattatatattcgaggccgaaagagttttcgcactttattcaaattgactaattgagcatgaaatacagcattaagaaattagttatttgtaattaacgaaactttgacctcactttttattctccacattgtatgatagatagatccattcattgaccattgttcatcgtgatgccaaaaaaaaaaaaaaaaaaatacattcattgtccactttagttaagctggtaataaagcgagtatagaaaataataccgcaaatatccgaatatattacctaatttcctaatataagacatgtatatataagtcgacggaaaagacggtaataattaagatttccatttaggacctaatgccatctcattttcatttccaaccgtaaatatttttaatgtgaaaacggtaaattttggtgcaagataagtaactttactaatactgttgatttgtattttgtagttgtagttaacaaaggaaattcggggaataaagaaacatagtaagggcacaacaaaaattttatctattaataaccacatggtcccaaaaagccataataaagtcctatgatgacatgtttacacgaccatcgttagaaaattaatacatattacggatatcaaaatcacacccaattttcaaatctctttatctaattatctaaactgttccgtttttagagggacccaacaacaagccaaagcaaaaactttctggtaattgaatgtatattgtatcatttcgccaacaatttgtttgaaaatggatgatttcgccaacatagtttttggaagaatctgaagttttggaaccctatttataaattatataagtccattaaataaaagtatgggccgcgaaggaaaacgttatgggtttcgtattgggtttataatagaaagcccaatatgttaaaatttatgaaggaggctgggcttcacgtgagttattactactagacctctgtattcttctgaatctgacatatcgctgattttaatgcgacgtggagctttataagacgcaattcatcaaaatgaatgagccccactattttgttgtcgttttggagtttttctgattgagggaaaagataaaggggatcttcacagtcccccaacaacactccattggagccatctcccaagttggtaacacgtttatcaaag

SEQ ID NO: 27474 - DNA, 3574 bp, Arabidopsis thaliana landsberg
tgagaagtccaggacttgttacttcttgatgtcactcctctgtccttgggtttgaaactgccggtgtgttatgactgtttgattccgaggacaccacaattccgaccaagaaagagcagatattctctacctattcagacaaccagcccggtgtactgatccaggtctacgaaggagagagggcacgaacaaaggacaacaaccttttgggaaagttcgagctcagtggtataccacctgctccacgaggtgtaccgcagattactgtctgtttcgacatcgacgccaatggtatcctgaatgtgtcggctgaggacaagacgactggtcagaagaacaagatcacaatcacaaacgacaagggaaggttatcaaaggaagagatcgagaagatggtacaagaggcagagaagtacaaggctgaggatgaagaacacaagaagaaggtggatgcaaagaacgctctcgagaactatgcatacaacatgaggaacacgatcaaggacgagaagatcgcatctaagcttgacgcagctgacaagaagaagattgaggatgcaatcgaccaagctattgaatggttagatgggaatcaactggctgaggcagatgagttcgaggataagatgaaggagctcgagtctctttgcaaccccattattgcaagaatgtaccaaggagctgggcctgatatgggtggtgcaggaggaatggatgacgacacacctgctggtggtagcggcggtgctggcccaaagattgaagaagttgattaagccttttggcttttgtttactctgtttgcttgagattctagttggtttcttgttcttagttttatctttctatgtcactctgaaactggtgtgtgatcattttgatgttttaagaatttagctttaccgtttttaaaactcgctctgacctatgaaagacgactgggcataatactctacacgaaatatagtaagttcatggtttaaggaatatgatcttagcactttaattttataattaaccatccaatatgaatccaagatctcttgttatacatattaaagaaaattttcttcttatttcaattcattttatctgaaaaaccgtacaaattgtagtgggattccatattctatatatgagatgtaagatttcatttgttgttgtccaaaaaaaaaaatgatttcatttgttaaagagtcttccattgaatgttgtcacatattgcgtaacacaaattcaagcatatgaacaaataaggaattaagaggttaaaagaacacaatgaaatggagtaaatatgattaaatatgaataatccaatgatacatgaacaataaaattcttttaagaagttatgcgctacaatctcactctagcacgaacggtcggagacagacgcgaacctcatgctcctctggtcccattcggtgtttaggcactaaaacctctagcgttgttcctgtttcgtcccggtaagcttcaagcttggcgtcatctggaatcctgttcggcagggagacttcgcggacaaattcccccggtgggcaatgctctggtgttggatctgttagcttaaatgttctatcatgtctcttgatgaatggctcacatgctgtacttacacatgatatcttcactattccatgtgctggtgtattcctccatgtcactttcacccttccggaatcaacaaatggcaggctcataactatcaagaaccctctgtcgtcttcatatatcgtttttgcggctgtgactggaccgtacacattcttcatcaccccgctaaaatcatttgaccaaggcagctccgttgcatggattttcatgtccagagatttctcacttgagcacgagtcatcgcagtttcctagagcaagacaatcccttttgcgtttattgctaccagcgagttgaacttccactgtatcaactgcatggtctggggaatgtgtagacaggtttagacaggtaccattcagctttttcaggtgggtgtgcccgttagctttagccagaggaagaggtctctcagcctcaaattcggtgtttgggagattcctccatgaaccgtaatcactagcttcagctggaatagcaaagttcacatctcgacctgtgagttctgtccacttcttcttttcatcctcgctgagtacagaaaggttgggtgaataaacaacttcgattccatggaggcactgtgggttagagagaccacggtaatgtttcctctgcatcctatgagagcggacaaaacctttgtccacactaaaagggaaaggacgctcaccctcgcgtgagtgtccgttcatgtagctccgcagctgcatcttgccaagggcattttcaggcttttccttgaacacccacatgtacatattctccatgtcatgctgaaccaagaacgagtcgagctgcaaatcagatttatcatacccagacaagccattgctgtccctcgttaacttacttttagacttctcatccaaaacaggtttgaagtagaaactgaagaaaagccaagcaccccatgcactatcaacacgcttgttgtacttcttagcaaccttaggcacatgaacaacagcctcaggctcatatagctgaggtccaagtccaacgtctaagatgtcacagtgttcgttccacaaaagcagagatggcctagcttcagaagagagtggtagattaatatcaggcggtccagtaagtatgagagacccattcatagccctctctgattcttcatgagtaaaagcacctgaatccatggatagcagtgttgacgggtgatagttctccatagacagggtggtgatgagagtctcacccatatttcttccagaagcgaacccctagcagatacagtggccgaatcaaaacccttaggtggcaagagatgagaacatcaatcaacaaagccatatatgcaattcaaggatatcttcatcatacaggatctcacaattcccacctcaaagttttcacagaatttgactataagctccaaaacattgtcctaagaggcactagtacaacacatggagagctacaatcccacctgaatatcaatcgagagatcaaagaatgggattaagttcaatctaatctcaacaagtcctaaattttctaaaacgagaaacaaacacaaatccatcatgttttcaaaaacgaaaaattcacgaatcaaatcaggaacactacgaaatatcaaacgagctagggatctggaacaaggtcatcaacaatcgtatccacaaatctgatagtatcaaattcgatatgtatattccagagattcgataagatcaaacagtgatttacttcgatcaattgtaaaatcaagagagattgaattcagatagaatcaatacgatcatcgaagaacataaaggtgaagagaaggataaatcttaccagaggaacaaatccgatgaagaagagtgcgtatcggcggcgaaagaacagagtcgctcctatcaaaatgatcccaatcttttcagagaaacgagaaagagagagactttcgacaggggacgcccgttgttaacgctgtatgatgacggagctg

SEQ ID NO: 27475 - DNA, 2994 bp, Arabidopsis thaliana landsberg
taaaaaaaacttttttgaaaaataaaaactttcatcatcgataaagacagattttttattaagaaaaaaatcaagcaatcaagctttccaaactaatgatccattaaatgctctaaacttatggtaatgattttggtaggggttgatattcgattttctatcacattagtttttatttaaaatccttggtgtttcatatatataaagggaagttagtataagatggtgacaaatattaaaagggcgtggtccatgaattcatcatatcttataaaaggatacagtgtgtgtgttaggtggtgataaacacaaattagtctttagatcatatgcaacttgaagagtggtggtagttttggttggtaaaggctttttttgtcattagcccaatttccggtcttccctttaaattttttttttgtcatcatccagattttgataagtggcatcaaatttcgaatgttttaaatgagctacctaaaaaagaaatattatatgtaacgtggcataaattaagttaacaaacataaatattggaatatatttttatactttccaaattctggattttcaaccttttgttttgttttgagctttgtaaatcaacaaccaaaagtttttaaatgttatctagtatctaccaaattttggatcggttcaatcaaattgaatcattctttactttttagcatcatctattataaaatttattttttacatgaaaaacgtttcctttaacggtggccaaaagagacaaaagcttccacgtcgcctgaaaaatatctcaaagcacacaatttacataaatacccctacgacggccaacaaccctctttttggtacactagtgttctgtctgcaaaacaaaaactctgaaaagtcgaaaccaaccctctcccttataaataccttcttctctttccacattgtcttctctctcctcacatcaaaaccgcctccatttctcattctctctctctctaaaaaaccaaatccagagtcagagaaaatctgtgatggctctttccaacgcctcttctctctccaccagatctatctacggcggtgatctttctcaccgtccaagcaaccgtcaatcatccttcacatttcatcccgccgtcaacaccaagcctaaatccgttaacctcgtcacggcggtacacgcggctgagccagctagaaacgctgtttcagtcaaggaatccgttgcgtcttcttcgtctggtgcattgaaatggactccagagagctggaaactgaagaaggctctgcaacttcctgattatcctaacgccaatgagcttgagtctgtgcttaaaacgatagaggcttttcctccgattgtgttcgccggagaagctaggaatcttgaagagagattggctgatgctgctgttggtaaagcttttcttctccaaggaggtgattgtgctgagagtttcaaggagttcaatgctactaatatcagagacaccttcagggttctgcttcagatgagtattgttcttacattcggtggccaggttccggtcattaaggtcagatcttcgaattcaatctttcttgttttttcttttgagcggaacttgagagaatttgtgtgtttaggttgggaggatggctggtcaatttgcaaagcctagatctgatgcatttgaggagaaggatggagtgaaattaccaagctacaagggagataacatcaatggtgatacttttgatgagaaatccaggattcctgatcctaataggatgattcgagcttacactcaatctgcagctactttgaatcttcttagagcctttgccactggaggttacgctgctattcaaagagttactcaatggaaccttgattttgttgaacaaagtgagcaagctgacaggtacccaactcatcaactcaattttgaaagcaaacttttctagatgaattagtgatggtgatagcagctatcctaggttatgtaaggtgctaaaggttttgctgtacaggtaccaggagttagctaacagggttgatgaggccttggggttcatgtctgcatgtggacttggcgcggatcatccacttatgactacaactgatttctacacatcccatgagtgtttgcttctgccttatgaacagtcccttacaaggttggattcaacttctggtctctattatgattgttctgcacatatggtctggtgcggagagcgtaccagacaattggatggcgctcatgtcgagtttctcagggggattgctaatcctctgggcattaaggtacttttaactttttcaaagaaaaatacaaaattcaacgcgtaggtagagcgataatatgcagcttcttactgatatacttaaaccaatgattaggtagatattacttttggtttatgataaagcaaaacagagtaacatttgagaggtttatgcttggtctcgtagcattttttgtttttttattctcttatcatgcaaatcagacggttgattttgattgtcttttcttcagtgacagattggtagctggtttgatttgccactgaataacgagagtttattaagttgagttttaagcggaatcgattgaataaccaaaactcttgttgcaggtgagcaacaaaatggatcccaatgagctggttaagctagtagaaatcctgaatcctaataacaagcctggaagaatcactgtaattgtgagaatgggtgctgagaacatgagagttaagcttccccacctgatcagagcagtccgcagatcaggccagattgtgacatgggtctgcgatccaatgcatggaaacaccatcaaagcaccttgcggtcttaaaacacgtgcctttgactcaatactggtacacacactttataagctaaacctctcataagcataacatagatttgccataacatagataaaaaaatcctgtctttttctacaggctgaagtccgagcattccttgatgtgcacgagcaagaaggaagtcacgcg

SEQ ID NO: 27476 - DNA, 1564 bp, Arabidopsis thaliana landsberg
  unsure (1)..(1564): unsure at all n locations
caggtggaaaacaacctgaagtgtgtagccacgtcgccggctcccatgatcagctccttctccgggatcaggtggtaatgtttctaaagatggacagcagcgaaatgctggggctggtggtgtatctgaagtcctagctgcagtaaaggatgagaaaagtagcagctccagtcagtcgcacaataatagtcagtcttgctcgagcgagcatgctaaaacaggcaatttatgtggaaaagaagatgcaagaagctctactgctggttcaactttgaagaagtgttccggtggctcttcaaggcatcggaagtcaaacaatgtgtttcaaggttcgtcttcgtcagcatcccctaggggagctggtttgagtnnnnnnnnnnnnnnnnnnnnnnnnnnnnnnnnnnnnnnnnnnnnnnnnnnaagtttgacatctgaaaagactcttgaggttcctctgactgagggttccggtaataaattgattgtgaagctgccgaatcgtggtcgaagtcctgctcaaagtgtgagtggaggctctttggaagaccctgcaccggtgaatagcagagtttcttcacctgtgcatgcggtgaagcaggaactgtgtgacaataactggagagaaaaaaatcattcttatcgagctgatgtgagctctgtcttgaatgccgagtcttggcaaagcaatgaattaaaagatatattgacaggctcgcaagaggcaactggttcaccacttgttgttgctggtgatgagcgcgaaggggctcttaaggattctgataaagcatctgggaatgttaaagccacatcttcattaggaaatgagttcaaatctggagaaagacatggcggaacactcagttcgatgaatgctttgattgaaagttgtgtcagatactctgagacaaatgcctctttggctggttcggatgatgttggaatgaatcttcttgctagtgttgctgctgatgagatgtctaaatcgcctgttgcatctccctcagtatctcagcctccaaattccgtgatgaatgaaaattctactgtagggaacaatacaaagctaatggcttcggatggcttgcctcacgagcaacatcaagctgtttgtacctctgtcagtactgagcaaggtgagcaacatgttagcagtagtggcacacagttggagtcagaaataaaaaatgaatctaagaccggagatcgtgataagagctcgaattcagacactgaagatctgcaaaggttggtggatcagtgcttagagagcaatgacaattcagatggtgttgttgcttcgcctgctttacccactaaagccgttaaggaaaagattttgaatgatagtgactctggggaactgaaggatataaagactgatgttaaatcagaggctgattgcacatctgactcaacgaaaagagtagcaagctcaatgctaaccgaatgtagagatgtaagtaaaaaggtagattctgtggctgttgaacagactcccttggaaggaaaaaatgatgataagaaagaagagaaacccccaacggcgttgagttctgagcta

SEQ ID NO: 27477 - DNA, 1788 bp, Arabidopsis thaliana landsberg
  unsure (1)..(1788): unsure at all n locations
atgtcgttaactcgacaacttctattcacttactacttcatcgtctttcttatccttttctccgatttcgtatcctctgcgacattaccaggggaagaaggtaccaacttatacaaaagtttatgtctttgtacgtatatgttttattcggtgtaatgatttggtccaatcgacaatttttgaaattggcagtggatgctttacaaagcgtcgcgacggcgttgaagaagagtaattggaatttcagtgtggatccatgtgacgaaaccttgtctgaaggcggatggaggaatcctaacgccgctaagggattcgaagacgccgttacttgtaactgctcctccgtcatctgccacgtcaccaacatgtgcgttcttctctctttttcaacatcctatcttttctttgtcaaaattatcattaatatctagttttaaatattgaagaaattcaattatattattaatggaaaaaaataaaaaaaatcttggtctcnnnnnnnnnnnnnnnnnnnnntcaaattattgaagtactgttaaacccacttgtttttaatttaataaagtaggtttagatgcttgaacgtggacaatttattaacgccgtcgctattgacctttttctgacgcgtccgtgaatcttgttttggtcgtttttgacgagtccgtgaatttccaaagtaaaaactagtcgacttttacttttaaattatttttttactttcgtgttgggtcgaaaacataatgggcctataatttcgaagaccgttttttaaaaactcgttctgttttttttctttccctcgtaatattgaaacagagttctcaaggcacaagaccttcaaggatctcttcctacagatctttcaggacttcctttcttgcaagagctgtaagcagaagattcactcaccaatgttactattattacaacatctgctgccactcttagtatctctcattaactattcttttatcttcagtgatctgactagaaactatctcaacggttccattcctcccgaatggggagcctcatcacttctaaacatgtacgtatagataattagatatagactcattgatttgatatatatgtataaatatagattgatttgagtatgtttgtttgttgggatgatgaaaatgcagctcactacttggaaaccggataagtggttcaatcccaaaagaacttggaaaccttacaaccctttctggtctgtaagtacacttctttgatctcgatcttcaataatgtttctcaaagtttttttttttttttcctttctatctttaatttcctggaacatttggtttttagtgtcttggaatacaaccaactctcagggaagatacctccagagctcgggaatctaccaaaccttaaaagactgtatgaatatttgttccaatttcttccaaactgttccttttttcttctgttaacaattagttattggtctttgctggctggtgttgagactatgtttaccctttttaggttacttagctcgaataacttgagcggggaaatcccaagtacattcgccaaacttactacgttgactgatttgtaagtattcctgtgttcttatttgatccgtggaacatatgtgttgccgaagatttctgactttttctttatatgtatcttcgtcttggtttatagacgtattagtgacaaccagttcactggtgctataccagatttcatccagaactggaaaggactagagaaactgtaagcgaccctttcagctcaatgagattttttcattttcatgtc

SEQ ID NO: 27478 - DNA, 1382 bp, Arabidopsis thaliana landsberg
agcttggaaagcttcccaaagtaatggaaatgatctctcggagaatttgttgagtggggagattccagttgagctgagcaagatcagtgagttgaggctgctctatttgtttcagaacaagtgaactggaatcataccaaatgagctcagtaagttgaggaatttggcgaaactcgatctctccatcaactccttaaccggtcctattccaccgggtttccagaatcttacgtctatgcgccaacttcagcttttccacaattccctcagtggtgtaatccctcaaggtcttggtttgtacagtcctctatgggttgttgacttctcagaaaaccaactttcaggaaaaataccgccttttatctgtcaacagtctaatctcattctgttgaatctcgggtctaacaggatatttggaaatattccaccaggtgtattgcgctgcaaatctctgctgcagcttcgtgttgttggaaaccgactcactggtcagtttccgactgagttatgcaagcttgtcaacctttctgctattgagttggatcaaaaccggtttagcggaccactacctcctgagataggcacgtgtcagaagctgcaaagacttcatcttgcagctaaccaattttcctctaatctacccaacgaaatcagtaaactctccaacctggtaacatttaacgtttcctcaaactctctcactggaccaatcccctctgaaatagccaactgtaaaatgcttcaacgacttgacttgagccggaacagtttcatcggttctttacctcccgagcttggaagccttcatcagctcgagatactcagactctcagaaaatagattctctggcaacataccgtttaccattggaaaccttacccatctaactgagctgcagatgggaggaaacttgttttcaggaagtataccgcctcaactcggtttactctcgagtctgcagattgcaatgaacctgagctacaatgatttcagtggtgaaatacctcccgagatcgggaatcttcatctgctaatgtacctatctctgaacaacaaccatctcagcggcgaaatcccgaccacattcgagaacttatccagtttactcgggtgcaacttttcctacaacaacctcaccggacagcttccacatacgcagatctttcaaaacatgactctaaccagttttctcggaaacaaaggactctgtggcggccatttgagaagctgtgaccctagccactcctcttggcctaacatttcatctctaaaagcgggttctgctcggagggggagaatcatcatcatcgtgtcttcagacattggcggtatctctcttttactaatcgcgattgtcgttcatttcctaagaaatgccgtgg

SEQ ID NO: 27479 - DNA, 1959 bp, Arabidopsis thaliana landsberg
cttattttttggcgctttgtgtttggttgcgtgtgtcgtcaatttttaaagtgggttactttcagattctgatagtctgatagtagtgggtgggtgaagaaaactacacgaaatctaattggaaccaaaacttatatcaaaatcaaagcagatcaacgtagtgttaagtattaactaaaagcttaagattgtaataacgttctgaaaattatgaactgccatagaaattgaatcaacggtcgaatcagtgaagctgagacttttcttctgaaaaagaagcaaaattctacatcaaaattgatctttcttatttggtttgtgggaatctgcaacttttgtgcttgacacttgcaatgcttatcaagtaaataaattattgaaaacttgaagcaatctccaactgcaaccccacaaacaaatcgacaaaactcagaatatgacccagatacacttcatttttcaattcactattagtcggtcaaatgttgcaactgaactaaattagaacttatggctttatttatacatagagaggtgttcattgaaactacttgcaagtcttgcaatagataagagttaacctttagacacattaacaggccaagcttggaccatccaaatatattcggattaaaagcatattcccagaaagaacaagagccaaatgaccattcaaattgtcttataaagtcaatagattgtaatgacaaatgaacaaacaatccaaaccaaatacatgatgagagacaatattcctctgttcccaaggtaaatcatctaggaataacaagaaaaagacgagaaaaattgatagaaggatttgctcaaatagtatagaaatgcaacaatgatgtatgctaacaacaatctgatttctgttcaggcatagttcaacctgaatatatcgttgaacacgtaaaagcttccttgtggcgtcggcatcaaatgaaacatctgtagcacacaatgaaaccaaacgttttgtagttgtgttagaacaagatcaaagataccaaaaaaaacaaaaaaaagatcagagataacaaagcaaacaatacataacatcgacataaccagcttattcaatctcattcatggacaagaaatccatcaattgtggcgagggaaaacaattctcttcaatctaatcaacaaaactcagagccaaacttgttcttcgagactaaacagagactgatgcaaagtttttcatcaatgagctatacacgagtcataacatcatcgatcattgtagctcaaaacgaatcagataacaagtcgcaacgaatttgcaattctacatccttgaaagagtcagatttacagatccatcagctaatctaaaaccctagcgatctaataactaaactcacaagcaaatcaaacaaatccaaacaaagatagatcaatcggaaatcgaagagaaagagagagagatacctggctgaacttgagagcgtgttcttctccggcgagctggagattaccggaaacgaaaacgagcataccggaagcaggaccagaaggctgacaatcaacggtggagatgtgatgcttgcactgctggaaaggaagagaggtgagcttagcgacgatgctctggactccttggatcttttgaccttcgaaggtgagcatagaagcttcctgatagagaccagcgagaccgacacggttggtgtcgaaggtggaatagtaatgttcgacgaaggccttagatacagcgtcgggatccatctgagacatttttagagagagcgatgccgatgatgagagattgagcagcagaggattgagaggatttgggagaccctaaagggttttggtttttctatttattctctgacctgttgtttaacttcgcgtctctacgacgctgcttttcttcttttcttctcactgtggttttgttttgtctctgtgtctttcttaagttctattaacattgtttttgaacaa

SEQ ID NO: 27480 - DNA, 1425 bp, Arabidopsis thaliana landsberg
tgctctaacgttattacactttgtctgagaaggccagagcttatgagctcttggagggtcaatcaggaagaagaagcgattcgttcgtcatgggaatctgatatgtcaattgatgatcccagtgaagacccatctagagacctggcgacaaatagaaaccaacaacacagggtatatcaaactggtatggaagagcaaagcgcaacaggaaccagcttctgccaacatgaattaaagcttaagccagaaagtattcatgatgaaaatgatgaataagaggaaaaaagtacggttcaaaatgagcctttagtgagtcatcctaagcgactgacgagacggattaacgtgcaggagaggatcatcctgtttgaacacaagcagaaagagatctctggagagacaacagctgtggcacaatctactgtgctgaaatgacttttttctgatttatcatgctctgcatgcatggaaacggttgcggtacgaagatggagtggtgctagtgacatgagcatcgatttgggaaatgacaggaaggttgatacgggtgatagtccactgtgcactccctcgtcatcttcagtgtccaaagatggaagtggtgcatcctcaaaacaatttgtcggctacaataaaaaagagcagaatggattgagccatgctgcgaatcctcataggaatgaggaagaatgtacttccaacaatggtggtgactggggaatggatgaagtagagtctcaaaattcaagttctactttcttacccaaagacaaggaggtagacttgaatgtgccatttagaacgaataatcaagtgagacatcaaggaaattctccggatcgatatttggagaagaattccaagtataaattccatgagaagaatcccagagccagttcagattacacagggaatgcaaatataaatgatgatgcgaacaaccagatgagcgattttatatcaaacaggcagaaccagatacagtttagggatcctcagagccattcattgtctacattacagcagttaggtggcactgaacctattatcacaagtgttcagagcaatggagtaactgcggagtctccgaggaaagaactaatgccttcggataggcaatcaccacttcttgaggatcgccagagaaagacaccgttttctggaggttagtaaagaaagaaaatagtaaacttttgttggtctttcgtttatatgcgtgttcttgaatggatactttttatatgtgggaattcctttataatttcagatgtttcttatgctttgacccaatattaaatatcaacgggaatatgagatcatcaaatgaccattatgcactccctttctcagtcatttgtacgcttaaaagtctatagttaattctttgcttacctgtgttctaatgcttgaaatgatcatgcgaca

SEQ ID NO: 27481 - DNA, 948 bp, Arabidopsis thaliana landsberg
ataatttgtagtgggaccagccttaacggcttcagtcacaagatgaaatttgtgttaggatcaaaccagccaaaccggttgttcttcaagttcggtctgggcaaagaaaacatgtgatatgatggttttgataactgtcactctctcagttccctaagcctatcaatgtactcaaaacagtcggtttgtggaacccatcatccaatgagatgaatcaaacaaaataagatgaaatttttggttttgaaatttaagaagtggcattctcaaaactctatctaaacgtagatgatagaaataatttaaatacgtaccaccacttatgatgaaatgagacatccagctctttctagtacgtacatactactcacgaaaatagatgcgtgcaatatataaatctttatagaccataataaaataatatagaaattgcaggtataatcatagtgtttgcaagtggagaattggagatagaagcgtactgcttaagaaccatctttttattttgttttcatattaatagcaatatcatagagacactgaaatcagagaaaagagaaagagactctgccgtcaaagatataaaataagaggcctagcaatctagcattaggtcataatattttgctatggaatctagtgatccatatgatcactaattaatttctctgattttgtttaagaagaaatttatacatacaaacaacatgaaaacaaaatcttaaaattctagttagatcgataaattttcatagaataaaaacacaactaatctcttatagattaaagtgaatttgatgtgaccacaacaattaatcgaatgaagaaaaacacgaaaatatcaaagattattttgattgaacttgcggattaagaatttgttgaataaaatggcaatgtggaccatgtggtatgagtagtacataaacattagaaactcaaatcggg

SEQ ID NO: 27482 - DNA, 1438 bp, Arabidopsis thaliana landsberg
aaactaagccaacttacttgaaattaaaaactaagtcaaactttttttttgtcaacttcataattcttcattaaaagtttgccaaaaaaagcagtcaaaactgtaaaactcattagttcttttatggtagaaaagttaaacaaaacagtcaaagtttttaaaacatttatcaatagtattttatggaagatggttaagatcatttgactaccattgtagatcattaaaagcaagatagcctctatatatatcttagtaacttttcttcttctaatcattgtattactggctctgcctcatcttcctaaataactaaatcaaaccaggattcgagtgggagaacaatgcagccttcactttcaactttcaaggtatagaaatgtagcatatctttctaatcaacctaataactatgtgatacattttctacataatcaccagttatcttcaccatcggcactttgctaatagcggattattgaaatattttaacacaaatacattcacttccatattataattaatgatgatttattgatattactttttgtggtttggaatctacagcctaagatgtcattgatgctacaaaaaaatcaagctcgtggaactagagcaagcctgagccaatttgagccaagaaagcttctgattgctagcactaaacccaccatcactgatctgaatgctgaaccttgttccgactcggaagaagaagaaacagtggagaatctcacaagtcttacacctcaagatgcacacaatggtcttcctaagcttatgttcgaccttgaggtcgagatcttttcccgtctttcatgttttcaatattggaaactaaatcttctcaacaagcagttttcgcaactgctacaaagtcgtgagatttttaaagtgagacgagaacgtggacttgtgaaaccatatgtgcttatattttcgagcggtgacacttgttggtcaatgtttgataaaggtttcaagaatttccgacaacttccagaaattccttctgacttttgtttcttttatggagataaggaaacgattactgcgggtacgcatttgatagtcatcggaagagaggagaagcgtattgtggtgtggcgatacgaactagaggtaaacaagtggatcaacgatactgaaatgatcacaccgcgggtaatgtatgcttccgcaagccgtgggaccgatgcatttttcgctggaggaatcaagacaagcgaaaacgggggtcctgatgttgtgaacgttgctgaaagatacaactccgatacaaaaacgtggaaagcgatgaaagcaatgcacaagcgaagaaaatttagctcgggatgtttcttgcggggtaagttttacgctcttggtggtcgagatgagaatgatgtgtaccttacttgtggagaaagttagtatgagttaacaaattcatggaagt

SEQ ID NO: 27483 - DNA, 2148 bp, Arabidopsis thaliana landsberg
aattacatatagatcaagacctgtaaacatggaaacttcaaagaagcagctacacatgatattcacaaccctccggatcagttgacccgctagatccctgaatgccatcttcgggatcgctatcttccatcttaccacctttgggttgtgacttgaagtggctattgacaacaaattcagctagcatttcatctgtaactgggtcaaccacatcctgcagccatataattggtcaatagccaaaaaattaatacaatcaatgatatgcaagaacaagagcagaggtttgaaaaaataccttgacaacacacaagatatcaaaacgagaaaggatcggatctgtcaactcgacattttgtgcaaatgatttcgatgaatcatacctgaagttgcaatgtcacaaacaaattagcaagatcaaaattacaaattttaggtcaatgaagggcattagtttctagcttaccttccaccaactggattagctgcagcaataacagagcaacgagcttgaagagaagtaactattcctgccttcgatatactaatactctgttgttccatggcttcatggatactcaccctggttacaaaaacttatatcgtcagcaccatttccttcaaaaaagtaactatcattagttgcattttgttacctgtcctggtcgttcatcttgtcaaactcatcgataagacaaattcctcggtcagcaagtacaagagcccctccttcaagcgtccactcccttgtaactggatctttgtgtactgctgcggttagaccaacagcagaagctccctttccagtcgtgtagacagctctttgaccagttttttcaacatacctagaagaaacattaatgcagttaatgaaaatattcaccaaagatattaattaagtaagctggtcaggatagttttcttacttcagaaattgtgattttgctgttcctggatcacctagtaaaagtacattaatatctccacgcaatctgtgtttccctttgatatttttctcttggccaccaaacatagcaagagcaagagctgttttgatatcttcgtggccatatattgacggagcaattgacttaatgatctgaaggagaaattgaaataatgttaaaagagatgaactctgaagcaattcaaaggatttattaggaggattgatatccaacttacacgttcgactattcgtggatccttggatagctcttctttttgtgtcttgtcttcttgggttagcttgttcgcagagaagaggtcttgtttctttgtaacatagttagcttccaccacagtggcaaagactggaaacccattctttgtgttcaaagataggtcaaagttgttggtatatatgccagtatcctcctgcaaaaaatcccatgcaagataacatgaatgattgatcatatacatgtgtgcaagtattctagaaggctaatatatgatgaacgtacaatttcttccccaggacgagcgcaatcaataaggtcattcagcaggataacttctttgtgtcttggaagtcgtccagcaggcactgttcctggactctcttggattgtaagcttctgatagttcctgtatattgtctgaaacaagggagtaattaacagtatggtcaatttcacattccaataacttacattgaagttcgtagagttaaaggaaaataatgatagagagattacagaatcctacctgttcgacattaacagtaaacggtccttttgactggcattcagaacaagaaccgaccttgacttctgaataagagttttggaagaaaggccccaaaactgctccacacttgttacaatcatatttcacttgctgcagctgaggaaagaccccagaacgcctagtgacaactccaccgatacggatcatcgtgttaagatgaatctgcctgacaattcacaaacaataaggtttaagttgaaatcttgaaaatgtatacaaagtgagtcactacccatgaattcagcgatattattacctgatgttccgaatctgatcattaactggtaggttggtacacgaacatatatcttcgtgtgaatattcttgtagtttggatgcagatcaaagatgaccttttcagaacttccccattacttcaagcacaggttgtggagc

SEQ ID NO: 27484 - DNA, 954 bp, Arabidopsis thaliana landsberg
aacatatagcaaaagcatacttatattaaaccttattgtgatcctttatctccaaacttccattattgcgtatacttcagggtaaagctgggtcagaaccaagtgctatagagttgacagaagcattagaaactcatgatctctttctatactttggtcatggaagcggtatgattcctctaacacttgaattctgaaccgtttaatcgttaatctgtctctggttgtttacatgagattgatttaaaaaaaaatcctttactgtttatgatacgacaggagcacagtatatacctaggcgtgaaatagagaagctagataactgttctgcaactttcttaatgggatgcagtagtggttcactatggctaaaaggctgctacatcccacaaggtgtaccactttcttatctcctaggtggatctccagccattgtggcgactctatgggacgtaacagaccgagacattgatcggtttgggaaagcgttgttggaagcatggttgcaagagaggtcagattcttcttcagagggtggctgcagccaatgtgagtcattagctaatgaccttgcagcaatgactctaaaaggcaccaagaggtcaaggaaaccatcatcggcgtaacgagccagctcaatcagatgtggatgggtcagggaagattgagtgcaaccacaagcatagacgtaaaatcggttcattcatagccgcggctcgagatgcgtgcaacttgcaatacttgattggggctgcgcctgtctgttatggtgtgccaactggtatcactaggaaaaaaggaattgatgctcttcttccttcttcatctcgttagtaggttagagcctctcttaaaatcctcattgtttggtcgtataacagttttgagggagcaaataaatttaggagttaggacttcagatcagagtttttatggcaacaaaacaaaagaagg

SEQ ID NO: 27485 - DNA, 1125 bp, Arabidopsis thaliana landsberg
tttttttttaaggggttatgaaactaaatggatcatggaggtgttgtctagcttaggtttcgggaacacgtgatttacgtgtttccaggtaataatagcatataataatttaacgattttcaaaagtatttttaatctaaagacttgagggagtcgttgatagtgggggttagataatcctaatgaacccttagtttcgtggaggttgagacttatctttatccttgatttcacagtacgaaaataattcagttttgtttaagtccggtggatatttcattattcactccttctggttttgatatcatgttccaagtcttccgaatactataaattaagataacgttctttgtattttataagtgattttaagaaagtattttatatatgatttgtattcattttaagaagtatacgaagagaatttgaattttttttttcctcgtgacggaatttgtttctgataaatttgaaagattttattttctgtcttcgtaaggtcagttatcacattaaagactaaatagtatttttttttttttttttttttttcagaatttcttgttttattcatttaataatatagtatatgttaaatgatactattacactttagaaaaatgtgcttatttctatcgtaccaaacttcttttttttaccgaacttgttactgtttgttttgtgaacaatttttgtttataaaatcattactcgtttgtgataaatttaacacattttagcataataaattaaaaatgtatcaatcatatacaaatgacacattaattttttagtataatttttagtcaataagtagacgtgtgtatcgtttgacaaaaaagtagacgtgtgtatcatgattagttaatttaatcataattatgatattgaaaataaacctagtttaatgtcattatgttgttttaatatttttaattaacgtcaaactattttgttattcctttttattttatttttataactatgttgttattgaagtcactgctaatttaactgatagaatacacaacagttcctttttcttaataaatcaaaatcaaagagacagggtactgaagtgaagagccgctataggacatacataattacatattagtacctgat

SEQ ID NO: 27486 - DNA, 929 bp, Arabidopsis thaliana landsberg
agatcgcagagacagcgtcaggttagtttatttgatgagaggaggaatcatatactttcactgagaaagaaactgaattttgttttatggtaatgtagttgaaactagcgaagaagagtatgtataatttgtctgatggtgaagaagatgtttatgaagatggtgctcttggtggttcttctgtaaaggatgattttgattctggacttttgtctgatgaagatcttcaagatgatgatttagaagcttctgcatcaaagagtatgttttcttgataacattttaacagcttgctcaactttgattgtgtctgttaaacttggcaaagctaattttgtctaaccatcacaggactgaagcatctaaacagaaacagagaggttgatgcatctggagaggaagaggtaagaacccgtcttgtagatgtttgtgtgtaatttaccgtgatggttgagaaatatggtcttgaagatatttttttggacttttatctgcagaggcgtaagagtaagaaggaagtcatggaagagatcatcatgaagagcaaattttttagggtgagtattccgctgttttccttgtatcgtcttttgcatggcgtgtcaatttgcagttggtaattttttttttttgggtggtctacagatggagaaagctaagcaaaaggaggaaaagggaaagctaatggatgagcttgataaaaacttcaagtccttagtgaattctgaggcgatggagagtttaactaagccttttgtagccgaagaggtgaacatagatcacagtttgtagctgtttaaatactgagcatatatgtatctatctatatgggtgttatcaggcttatctgttcataagttttctttttcgtgatgtaatccttttgtttgcagaatacacgcgatccttatctactaagtctgaatgat

SEQ ID NO: 27487 - DNA, 1847 bp, Arabidopsis thaliana landsberg
aaaatctggacggccataaaagtctttagctttttctctttgaaaattttgagagagagaagagagaaaaagcttttacgtgtttatttatttcctataaccaactccaacaagggattcttatctaaaattctaaacatttttgatatacaaaagaataattgaatataaaagagttcttaaaaaatgaaagaatatatctaaaagtttttatctaagaactattttcttcttttaagagctctttttgttttgttttttttaattcttattttgttttaagagatttttcaatattcttaagaacccatggatggaaatgctctaaaacttttgaccttggctctggccaaacgttacatgtgttactaatttatgaaaaacaaaactttgacttaatgccttacattttttttgccagattgcttcattacaacttttactaactcatctcttgtaaggctcaaaaggatatctttgtaactcagacccgaaggttatagattcctcggcgagtttcttcttcaacctcctccaagtcctcatcttattagactgtattaatgcctttatacaaagtctcaaaagttagcttttgtggtaagaaacctctctctatcatctgcacaaagtatccacaagcctccttccatttctccttactacacaacccatgaaccaacgatgtgtacgagtccaaatccggacccgtttcacttgctttaagatcatcccatatctctttcacagtctccatcttccccaaattgataaacgtacctaacaaaacattatacgtctgcgtacttggcttacacaatccattcttcatcttcctatacagattcatcgctccattagcatctttccttcctttgtactctttaaaaaaacaattgtacgtcgcggaagacgggctaatcccgctctccaccattgtttcaagcaactcctccgcttcctctaacctcccacaagaacacaaacatttaacaaccgatgtatacgtttcaatcgtcgggctaatccctttcgctttcatcaatttcatcttatccaacgtcaactcagctttatgagctcggctatacatatgaagcacgatagaaaaactcgtaacatcgggctcaatccctctctgacgcatttcatcgaacaccttctctgcatttctcacattcctctcaaatctctcttccggatgcaaactcgccgtcctacaaatcccgttaagcaatacattatacgtaacaacattaggctcaatcccagactcaatcatctctaccaaaaacttctccgccatatcaatcctcctaagcttacaccaaccagcgatcaaaatagtgtaaaccttctcatcagaaccaaactcttccttcctttcattaaaaacaccaacggccattttcgtgtaaccgtatttacaaagcgtatcgagtaaaaacccgaattcgactaaacggaaacgacgattctcgagaaaacaaggcgcatcgtcgaaagcacgaaccgcttgtcgagtaagcccggcggcgattaaccgtttaacgaggattaagaaggtctcaggagaagtttgatccatttcgactataagttgtctaacgacgtcgaattgacgaacacggccgaggatatcgatgatgagattgaaagaggttggtgttgttgaaggagagggtaaggagcgtagatattggaagaaggagagggcaattttggaattgtgacggagacggaggagggtttggtggatgaggttgggagtgagggagatgccgttgagttggagagatgattccatgaagtggaatgggttgtgatttgttattaacgttgggaga

SEQ ID NO: 27488 - DNA, 1072 bp, Arabidopsis thaliana landsberg
ctcttttatgcgacttatgaaaagtacattttcagggaagaaaatacattttgaagaaacgaaggatatagataaatgtagatacatggtacaaataaagaagaaacataaaacgttgcatataaaagtataaaaagcaagaacattccaaataagtctatgactgtatctacatgttaattccttttttcgacactgtttttggacttttgggactttgggaaatcaacaaaagactttttgcgtcatctaattgacaatggaaagttcctggaaagtgtactctcttgatatttttgtcttctacttgtatgagttagcaacatatgcatctacctaaattgcccttccttgacgtcgttctatgtagctttaccaacttttaagtaactagtgggttatgtatagtattttttttgtcttcaaaattgtatcaaaaactgagattgttcacgcatacgtcttaacagaaaattctgttttttttttcaaatgataaaacaaattgatgattggagttggagatagtgcgagttggtaacttgttacttcattttgttggatttggatacatgaattagttggtatcactttgccaaaaaaaaaaaaaagaattagttggtatcttaaaatatcagtgtatcacgttgtggtgtggttaggaagcataagacttggtccactaacgcgtagaaagaaagagtgatatttcaatacattttatatatcaaaacagagcacatttgaatggacaaaaaacttaaagaatatataatgatatagatttgaagtgaaagaataagatagaactaaaagagtcaaaactcggaagtcgcagtcgtgttgagcacggagtcacatggaatcgttggcaactacttattgtgttgcatgtttatcttaatttatcagacaaattatagactgtccgatcaaacatgatgacacattacgttagatcactactattactaagaatgcttgcaataaaatatgtgaattgtgtttacgttcgattcttgtttaatgtagggaaataacgaattgtgtcataattaagtagtaagagtga

SEQ ID NO: 27489 - DNA, 119 bp, Arabidopsis thaliana landsberg
gcagcatatgagacagagatagcaagtgtttagacaactttatatagggaatctagcattcaatacaattgtggagtagcaaacaaaccaaagctaaccaaggaatgcatacgaataga

SEQ ID NO: 27490 - DNA, 1329 bp, Arabidopsis thaliana landsberg
gtgtttgtaaatcgtctgttgagtaacgatttaggtttgactagctcgactctttctataataggatttgatcaatggaaaagatatttttgctccggtttttgatttccagcaaaagaagcgtgttgattccaagatggtgaagacatcctctggtgtggtaagtcataaatgtgattttggttttggttttggtatggctcctatggttttacgttttggtttgttgtaggttattgttgatgggacgtatgctctccatgcaagattgcgttccagactggatattcaggttgcagtggtaagattttctcctcctagagcagttattggtctagctaatgtacaaccatgatatcatttattctctctgtggttaggttgggggcgttcattttagccttctctctaaagtccgttatgatattggagattcgtgttcgcttgattaccttatcgacagcattttccctttgtttagaaagcatattgagccagatcttcatcatgcacaggttgaattgtcttctttttcctccatttaagtgttcagaagtttgacttctccgtttgttgggcgtgtgcagatcagaatcaacaatagttttgtttcatcatttcgggaagccatatacaaattgaaatgcaaaactgaggtctgtagtttcttccagttgttgtggtttcatgttgggacgtatgtttaccacttgactaagattcatgtaacagatagtaacttcctttcctcaagaaagcgacgtgcagaaggataagtaagaaggattcttctattatgtgtgaatagtttaagatttttagttggttttcataggtatactgacttggtgagttggttttcagttttattgagatgtacctcagaccaccttctgcaagcgaagaggcacggataaatgactggattaaagttcgtcaagctggtataaggtactatctgtcacttggagaccaaaggattgttgacaagcatttcattatccggcctaaagctgagtttgaggtgagttattacatgtaattgccgaagtttcagtatttctatggtgtttccttcttcctagttctgcaattttttatggaatgtgaagtatcgctacctctttattgttagcgcaaaagataatggtagtaatggggttatgtaggattatactgttttggagactggtccaatactttccttggttgtgttaatttctcatattatctacagaagaggcatgcctatatttgaggaatatggattctggtcaagatgacgggccgcttgcacacatcctattaaagataccccttacaatcctc

SEQ ID NO: 27491 - DNA, 1243 bp, Arabidopsis thaliana landsberg
agccctctgtatgaacatcccatggctgcaattttcttgaatatgaaactagtcctgctctttgatcttgtgaaatttccacatcctttcgtcatagtttccgttgttgtgtccttaacctatatacattttatcgcgtaaatataaggatcataaattgtaatacatgagaaggtatgaaaacaaacttcttctcacctctttcttgataaattgaagttgtgtactgtcagtttctgacttgtggctgttaaggttaacctgaagacgcagccttcttgaggcatcgccctgcattacaaactgctcagcacaacccggggcttgtgctcgtcgagctctaatcttaattcctgtcttagattcatcattgatcttgttgcatgagctaagattctgtggctcatatgggatctgttctggctcatagggaatgtcaagaaaagaatccaagaacttggacatatattcatccgcatcatttgtaccgtactgagtctgaatgtaatcctcattgtggtttttgaacaattcactagactcagattgtaagccattgaaagaggaaccgagctcagattgcacctgagagtgcaacggagagaacagctttggggaatcaaactccataaacgagagccaatcgatatcgtcaagctgttgagtaaaatgaagtttgtaagtttacaaagcggttgtaccgcctcctgtaatgaaaagaatgtattttgttcatccttaccccggtggttgtaacctcagggacagagtatccactacgacattcgctggggattacaagagaagactctgcgacgtcacaaggattagtctcttctgttttagggaaaacaggagatacctcagacatttcaacctcgtccacaacagttggagacgataccgctggttcaacttcacatgactttgactcttctggttcagcagctccgttcacaatatcttgcttcttaaacaacttacaaacaacaaacggattctgcaaccaaaaaaaatcaaacaaacacaatcagaaacacaaaagacctacacacacaagttaatgccatcatttgccaagttggtttttacctggccagactttgttccatcaagatccttctcagtagcacgatactcatgcataatccaacaagttcgtgtccctttaggagcacgacctgtataaaacactagagtcctcttaacacctataatcttagtctttcctgatttgatctta

SEQ ID NO: 27492 - DNA, 1690 bp, Arabidopsis thaliana landsberg
ctataaataatggaatttggaaaaaattgaaccaagggtcttagaattccttataaaaagtcattccattaatactttttagaaaccaacatattttaatttttgtttcttaaaatttttaatgaatttaatttttaaaaattccaacctaaataaatatcttagtaaagtttttaaaaaaaatagaactaaacttataacatttactaaaacattagaatatacaactcaattaacatactagtcggaaaaaagatcgctagtggagatagagacacatactagtcggaaaaaaaattactcgtttacttttcactaatttcaatatatgaatacaactcaatcatctaaacaaacacaagagcctttttggtcaaggcttcttgatattggctaaatcatgaaaatattgatcttcccaccactcaacttgacgagtcaaattagtttttctctcaagaatctcttttaaatcatgagggttaaaaggagaaggcatctcacaaggagactcttcactaggaaacataaccatagactcctccatgaaatctctccaccgtcccgtcgccgagcagcccataatatccggcgtaatctccgtggctccccacggaatctctggtttaaacttcaaaagttttgcatactcgttcatcaaatggaacatgtagtcatacacatattccattttcacttactctcaaataaacctactcccttcttctcctatcttactcgcctatataaaaaaaaaaaccacactcaatgtgttaatttgttacaaaacaaaactttttgggtcttaatgtaaaaaaaaaaatacaaacctggtccaaatgagtattcccccaatgtacggcgaatttgagggaagtacacttagaggtgtctctgattggccagtaatgttgtaatggcatcattcctcgtacgtaaaaatcatagaacataggtctcacgtacaatgtcattgaatcacatgccattatatatttctcactcactgaccatgcccatccttctatataaatcttgtacctattccatcattatcacacatttaaaatcgaatctttgcaaatatttcctaagtacaaaaagtgtggcttaagttaaacctgtgggtgcattggttctctaggttagagttcttgaatccttctcttgactctctatcccaatccttcacaataataaacatttttgatcatttagattatttaaaaattgcaatatataaaaattatacatattttgagaaatcctaacctgaatgtagagacgtgtgttccaatcttcttgagctgagacattacatctgagaagatctcttctagttggagccacattagggtttcctctccaataagcatacgccacgcggtctttccattgagtcatcttattcccttcttctatcgccactagcgatttatcccaaggctttatattaacctcagccctagcccaataataatataattagctaggtccaataacaagcccattaaatagagaacagaatagaattaacatgtgtgttaagcccttaccagccccagaaggaccaatcagggaagacaatatccaagctggcgtcatcagagcaataacggaacaaaggaggcggggccgggtgttgttgacccttgaagtctttagaatcgacggttggtctatcatctgg

SEQ ID NO: 27493 - DNA, 1566 bp, Arabidopsis thaliana landsberg
gtaaaagcgtactatagttattggcaaaaacagttgtttcgttttctattgtactgtagaagattcacaaataccatgtgttagcaaatttgaggtctagttgtgctggttttatcgattatttggcgttcctagtaccaaaatctgcaacacaatatagttatcataagattattgtagtggatataaaatgttgttatgatataagtctaaacctaactttaaaaataaaaattggtagagttatggacttaattatggtgtcaagtatttcacactttcactttgtttcaaacacttattttatgtgaatacttcttttcttaaacttgaaacatttcatatttaaaattataacccatattttcaaacgaaaacaaaattatccattggccaataggaaactaggaatggtgcgaccaataaactcttaaaagtcaaacacctctgcgtgactcagaagtttccctccgcgtttgccgtaacgttacctttaatttcgtcagtaacgcaaaaataacagatccgaaagaaaaaaaatcaacacaccgagaaaaaaaatggaagatctatggaagagagcgaaatcgtttgcagaagaagcagcgaagaaatcacaaaccataacactacaatcatcttcaacaacattcgtcaatctcgtcaccgaaaccgctaaaaaatccaaagagttcgctctcgaagcttctaagaaagctgattcgatcaatgtctccgagttcgtcgccgagacggcgaagaagtcaaaggaattcgctgctgaggtttcaacgaaagcggatcagctcaaagtcgtagcattgaaacaagctgatcagatccagaatataaaatcgattgccgacattatacctggaggattaggaggatcaggatctggtggtggttgttctgagatttctgaatctgagcttgttagttttggtattactgatgatttgagagagtttgttaaaggtttgacatctgctacgttccaggcttttcctgaacaaggtattgttgttttgttgttgttgttgctttatctttgttttggaattgaggatttgaaatgtgttatggtaaatgtggattagatgaatcgtcgaaagtttctgatttggaaacaagtgcgtcgaatgttcggaaggatctttctgagtggcaggagagacatgccactcttgttcttggttctgtcaaggtagatttttcgaatttgagattggaattagtttgattagttggagaagctgatcttgcataattggttggtttagttatagattcatctcttctgtgctacattgtttgattttgcattttgtgtatgttgcagcaaatttcgaagttgagatatgaactatgcccacgagttatgaaagaaaggaggttctggaggatatactttaccttagtgagcactcatgttgcaccgtaaggatctaccatctcttctcaaagtctgaaaatgttatcgacactagactgagaattgcattaagcgcataggaggtggtaaagatagcttaagatctctatatttgtatgactaggtagtct

SEQ ID NO: 27494 - DNA, 1564 bp, Arabidopsis thaliana landsberg
tccaaacattcaccaacaccagctatgtaactatcaaacatattacttggtcatattttagtccacattggtaatgatttaagtcataattgctgtacataatgtcccttatataaaagtcatggtattaacaagtactatatagacggagattaattacgccaaatatggctttgtacacttatgtacattatgtacacacaatataggcgtatacaatatttatgatttatacacacaatatgataactagaagaatctcctttgtattcctacatattcatattcatgtttaacttctacttaaatattttaaatttttacataacaaccgccttgagtacatataaaaagctcattaacccatataacataaaacatttatgtttataacccatcgtataatatacttaaaatgcaccaaacattttattacagttgttgttgttcaggggattgattcaaaatgtggatctaatatagattttctacaaattattatacaagcatatacatgtacttaataaacttgtcgcaccaatattctttaaatccatgttttaaacatataagacctcatctggatacaaaagccgatcatgtttccacagagaggcatacaacaaggcgaccccctctccccatatctttttattctctgctcagaagtcttgagtcgcctcttaacaacaacagctggaatcaagagactgaaggaatgaagattagcaacacgggacctactataaatcatctactttttgcagatgatgctctcttcttttgtcatgcccatcccaaatcatgtgcaacaataatggagattctgcagaactatgaacgagtttcaggacaggccgccaaccctcaacaaatcggcaatcacatttgggacttgagtcaagcagcacgtcaaaacaaatctaaggcgaatcttaaataggtccacaaaatagtcgctagcaacaacaccattattttcatctcctcgatggatcattcccaagtcgtcttcgatggccattatcctattacgcgcaagtctttgttttgctgctgcatagaaaactttggtgtgcctgtcgcctagttttaaccaattgtttctgcttttgattttccagaagtgttcctcctctctacaagcttggttcaactcgtttctgatctgttgaatctcttgagtgcttcgggttccatgtgttagtgcctgatccagctctttctttaaaatagctatccgtactgaagcattcattctgttctgtcttttccattccgccatttttctcctgctgaccataatccttgtgcttaaatccatggatgaagctccttctcgccaagagtctaatatggtataatctgctattatatctgaaacaaccccttctttgctctaccatattgtagacattagtgattaatggtctatggtcagatccttcgaaaggtagaaagtcaatttgggttgaaggaaaaagtgctaaccactctttattggcaaatgtaaagtcaagtcaccaccaaacattgtggttatatcgctttccggtccaagaga

SEQ ID NO: 27495 - DNA, 1372 bp, Arabidopsis thaliana landsberg
  unsure (1)..(1372): unsure at all n locations
tactcaatccctaagatgcttttctgctgtgttcagtatctactactactagtagggacatgaatgaaactaattgcttcttacaccgataactgtagatgttggtcgaaaggaacccgctctgtttgctggtgaattctctatcaacagtgaagaagaaatcaaagacacatatctatcattcaacggttggggtaaaggagttgcttttgtcaatgaattcaacattggaagatattggccggtataactctgtcctctcctcctctataaagctcatccccaatgtacagtttctcttacacatgatactttttgcagtctgttggaccacagtgcaacctctatgttcctgcgccacttcttaagcgtggcaaaaacactttggtatgtcaacatgaacatgagatttaacctttttgttagttaggacagaggaatggaaaatctctatacattctcattccatgtaatccattacttagatttgttgaattcttttgcaggtggtattcgagttggaatctccgcatctcgagctttccctggaggcagtggatcaccaagacttcacatgcggttcaaatgtttccaaagttaatcagttgtagattttcagttcacggatacaaccaaaagttccagtcgtgaacaatcagcccgctataaatcatatgttggatgataaagaatttaaagttaaccaaaagatttttgtgtgtccaaaaacatgaaactatacattaaaaagtcagacccgataaaaaaagattttatggtcgaaaaaacatttccaagtccgtaaatccaaaaatctattttagtgttgttgtttaagcaattttatccacacaaaanaacttatacacgccactaaaatataaaaacattaatgaattatcagataatcctacaaatattagatgttaatctacaaataaaataaaaactagatacgtctaattattagaaaaaatcaactaaaatctgataaaaatatcattgcaaacagatatatatttgtgaaaatcagaaaagggctattgttagtactctatttaactaccaaaatttctcttaagataccattgctgaaaatttctctacccacaactcggaagaactctctccacgatcttcttgcaccttctcttaaggagaaaaacaaggaaactctgccaaatcctaaaacttccatatatcccaaaacataaacctaatgtccttaagcactttcttcggtggttccaccacagcttgcgctgcctgcaaacaccaaagaaaaaagtgtaagaataactgtattcttcgctcgttatttcccacaagatggcacaaataagtttctaaacgctcataaactgtttggagt

SEQ ID NO: 27496 - DNA, 1295 bp, Arabidopsis thaliana landsberg
gccccagcatttcggacctaaagaaaaattaaaaaatttgagcccactaacaaatatacattggtaaaatagaaaaaacaggtctcaaaaattgctgacataaaagtataaaaccatttagcgcttatacttttaattgatgccgttaatgttagaagatctcaaggattacaagatgagcttgaagaaaagtatatatttgcaaaggcatcaattaaaagtataaaaccactatttttattgttaaataggtagatttactataatcgtatttgcaaagaacttgctaatcaatatatttgaccaacttgttaaggttttagatcctcctgcacacaatttcaccaaatttttgaaagagtaaattcataccttaaatgtcctgaaaaagaagtggtcgtaagagatcttttcgttgtccaccgacttaactagttcccatatcgtcttcgccatcgggttcttcctcaaatacgttttcagtatactttcaaatacattctggagaaatgtttcacttcctccctgataacaacataattagtgtattatagtgatgagtaattcatttgatctttataaatataaactgagaaaaaaaccttgaacgatgaagcgtaagtcaagtcaagagaacccatgtgtagtaggaatatctttgagatctttatgagaaacacaacttttgcttgattcttctcttctttatcttaaattcgtaatttataatgccaagggtcacagtgtcaatgcttcactatgataacttgcgtacaaggattaattgttttttattgagctagtggggaaatcattcttatcaaataattgagcgaactacttgcatcgagaattttggaaacattatcatatcttcattttggtcaaatttgtatcataacgatagttgtctttcattttcttgtttcttgcctttttgccatcttggtcaactttggtgtttaaatattagaaaattttgataactttcaactatttacatttttcaactaaaaccaccgagtattttccctatctacatggtagattgtattttgattattactccagtttcgtttccctcttatctatctttggtttaatgatagatccaaccaaatatgttccttatttttgtttctcacttgtgtgcttcataaaactcttatcttctcattgggtttccagatgataataacagtaaatgggtgtttggttatgtccgactagatcagtcaaaagatggctatcatacaaactatcataaacttaacaaatttctcaaaagtgtagca

SEQ ID NO: 27497 - DNA, 1204 bp, Arabidopsis thaliana landsberg
atcttcgtgtgttttatgattaactttggaacaacactggtccaagcttgatgtaacataaccagaaccataacttccggttgaatgattagacatgtgtccttgccggtttttgtgtcccaaataaggttctgggagagacgcaaaaggggaggtctcattgccggtttttgtgtactccatggctccatggcatataagagcatttcagcagattctatatcggatgaagaatcaggaagagaagcttgttgctccagacaaaagtgcttccgtaggggtaaacatggctgattcttcaacacagtttcctctttttgctctgagtcacaaggtttccgcagtgactatcatcagatcgttgatatcgctgaaagcaaatagtcgtatagtaaaggtcatatattaacttattttccatgagagtaaagagatgactatctacaattgtaacttccaagttaatttcttaagtataaagtatccacaccggttaactaaagacaacattttacatttaacataggtaccactgagatgaagaggaaggatctcttaaagtacaaatcttgttagtccagaatctaaatgcacaagtacttcgtttgaatataggggagaggggctatgctagctatacttacgattcaagtgttcagtatctcgtaggccatcaacatgttgctatgctagctatacttgataatcctaacaccaaaacgcactacttcacctttaaacacagtgaggaaaaccatctagcacctcagaggcacgatactttatagctcatgtaaataaccattcacagaagatgaaaaaaatgaaaagcaaaagggaaattccgattccgagcagagtatatgagaaacttggagtgatttttcagattcaagatacaagtttttcgaaaatttgttaccagatttcaatcaatgcaaatattcatacaagaaaccaaatttttttttgtaagaaaattgtaatatcatcaaataccaagtctactcgacgtactcgtttaatccctaaatatatatatcttcacaaagttatttgaacctatcgtacgtctttcctctgtgccttgattttcaaagatccgatctctctcactgctgagaaattatggggatccgatccccatttttttttgttttttgattatcaaagacctagtgatattctctaaatatatccgata

SEQ ID NO: 27498 - DNA, 1084 bp, Arabidopsis thaliana landsberg
aagcttctctattggcattgcaaaaactttttgaaatggatgaaaacttccccactctaggtcttttcactcagagattttccaatcgaatgatcgagatggctgatgatgttgatatgtctgcagctgtatgtgctatagggctttgtaagcaactgctaaggtattccccctcaagatcattttctcaaccaaagcgtcaccgcaaatatgttgaactgccatgagttaaaacctgagctcttttttgttttgcagacaccagctgatacctgatgatgacctatgccctttgtacgatttgcttattgatcaacctcaagaaatcagacgtgcgataggagagttagtgtatgaccacttgatcgcacagaagtttaacagttctccgtccagtcttacaggttttcctctgatagatagtccatgtcctgggtaccagagtttttactcttagaacttagttcagagttattacatcctctttcaggtcatgatgattcttcctctgagatccatatcttcagaatgttacaaatattacgggagttctccacagatccgattttatgtgtatatgtaattgatgatgtttgggagtacatgaaggccatgaaggtagagtctaagagaaattacttttcactgttgcacgttcattatatagctgtgacgtgtaccttctgcagtttttataccatcgtcatgatgctgcttttcttacaggactggaagtgtatcatctctatgcttttggatcagaatcctcgaactgggtctactactgacgaggactcgacaaacttgatcagacttctgtttgtgtcaatcagaaaggctgtcggggagaagataattccttcaacggataatcgaaagcagtatcacagtaaagctcagcgagtaagattgtctttgctctttttgagaaaatctcatgttgttactatgatataacgttgcagaagcatgaagacatacatcagttttttccttttttcttgagcgaaactaggaaggacaaaatacatttaaatgatcttataaggcactttactccatttatacctttttgtatgctcgt

SEQ ID NO: 27499 - DNA, 1623 bp, Arabidopsis thaliana landsberg
  unsure (1)..(1623): unsure at all n locations
aaaaagattattctgtggatgctacccttatagcattttcacctttccagaaattgcgcagagagaagggtatctggggaactaggaaagtctttgttgagaagacagatatgagggccaaaagaatggcaaggaaagctggagccctggtactgaaccttgtccatacattcttctaaaagattgtatataaacagtttccttgatacaacattattctcactttatactttaaacagatgtttggcatgataaatttgacagtttccttgacacaagcttcagtgaaaacatagataatatctgattacgcttctgtttaccattgttgtatggcaggttatctttgtggttgatgcaagtggcagtatggcattgaatcgtatgcaaaacgccaaaggtgctgcactcaaactactggcagagagctatactagcagggatcaggtaaaggttactttttttgaatagttaacgtgcttgttgctagtttggatgnnnnnnnnnnnnnnnnnnnnnnnnnnnnntacaccagtaattggtttaggtttcgattattcctttccgaggggatgctgcggaagtgctcttgcccccttctagatcaatagcaatggcaaggaatcgtcttgagagacttccttgtgaggtggttctcctcttgcccatggtttaacaacggtatgtcaaatattatggtgttgttagtaagataactactagtatcgactaaattgtgggtcagcataatcgtaacagtaacaactatattcatatcaggctgtaagagtaggacttaacgcagagaagagtggtgatgtcgggcgcataatgattgttgcgataaccgatggtcgagccaacattacactgaaaagatcaactgatccggagtctattgccccagatgctcctagacccacgtccaaagaattgaaggtaaacagcttctaacggaaaacataaagcaacacaagctcttcactgatattatgtaagaaggcagatgcagtgattaaaaatgcgggtgttgtgttgtttaggatgagattctggaagttgctgggaagatatacaaggcagggatgtctcttctagtgattgataccgagaacaagtttgtttcaactggttttgcaaaggagatcgcaagagttgctcaaggttgggtctctgcaattgattttgagattttttttttgtcatttcaaagcagaaaataatcacattgtgttttgattgttcttcttcctcacaggaaaatattattacttgccaaatgcttcggatgctgtaatctcggccaccactagggatgcactatctgatctgaagaattcttgacctcattttgtctgcaataccttgattctggatcaaagtgtatattctaattgtgcaacacatcagtcactaaacatgaaattataagaaatgaaattttgttttaacatactcttaaaatgaatttccgattttattccgttggtcggtaattgacgactgatatgatgatgcattagtgacagatcactgtttgtattcagaagaagccgatgaagctgcaatattcaaaattgatacaagaattaagatagtcggtataatcccggtttgcagtaa

SEQ ID NO: 27500 - DNA, 1223 bp, Arabidopsis thaliana landsberg
gactgctaaaaattgttttttttttcttcttccttatagtttctttagttaaagtatcttatcaaccaatattcaacctcatactttcgttattaggtaagaatagtatctttattttgacaaccggaagaatattatctaattcctaaggatagtatccttattaggtgatgagttattaaattttatggttatattgattgcgaagagaaaacagtctgtcatagtgcagaagtgactgtacactacaatattaatttgattagttagctgtaatccacggtttaataaaaattagtcggataaattaattgtgattagcgaaggaagaattgaatgaagatacaaaatatccaaatcgagagttcacaagaagacatcaactagaattctataactaaatcaattagataaacaggttcatcatagaaattcatacaattgcatgttcgaaaatatatttaaagagtaaactctctattataaatagtgtaggggaaaatatcatcaagagtcaagactcgatcgagagaatgttatatgttgttaattttgttttagttgattcaagaggtattactactttttaattattaacatgcatggcacatacatacgaaaataagaaaataaaagactcagaaatatatgtgcctatgtggtttgggcttgatcactatagaactgtatgtgaatttaagagcataggcctaattttggctaaaaaagaagaagaacatgggcctaataaaagcccaaatattatcaaagatggaccaacggcacacagatctccccgcctttatatatcacgacggagataaactcaagccacgacggttctccgagagagagattttttaaaaatcaaattgcaacagaagagagataaaagaagaaccctaatcgatttcgcgctctgattcgttctactttttccactgattaatctcaaaaaatggcgagtgagagttcgcaatcttcctcgccgtcgtcatctcaacctccgtcatctgtaccttctccgtcgccgggtaacaacgtcggcgatacgtttataggaagtttcatcagtctaatttctaagtacgagatccgttacgaaggcattctctaccatctcaacgttcaggactcgacgctaggtctaaaaaacggtacggattcgaaacctatgcgaaatcgaaattcctattttagttttccgaacattgcagcgatta

SEQ ID NO: 27501 - DNA, 1390 bp, Arabidopsis thaliana landsberg
  unsure (1)..(1390): unsure at all n locations
ctaacagcgccgtctactagaccaagaatgaagtagagttgtatctgaggttcaccagtattgaaacctatggttccaggatccattgcttcttctctgtccttctctgttttcacaaggaagaagttcttgagatgatatattatcaatggctttaacctcagtatctctccagcaacaccagcccatccgtctaccattatgtaggtgataaagaaagtggctttcattggtatcgagacaccaattgtcttcggtatttcggttgcagattggtttaggaagctgtcaagttgttgaagcgcagttcccgcgattatgctacagaggaaaacgttgatgaactggaacatgtagtatctgcttgcacaccttctttctagtgaagatttgcttatgaagccttcgaacttcgacattagcattagtatacttgggaggacaatgaggaatatcttcaatgcgatacccggaagaaaaccttggataaatgactttacagttttcctgtccacatacacaaagatttcagagaaacatcatcacaagttaaggaacagagaattaaggttgagagattatacacttcgataagcggtttcaagaacggaacagccttttcgatgccttcgatattggcgagtgtctgtacgaaagctatagggatcatgaagaagaaagtgaggaagaagaaagctacagctattactagtctccggattgtgagctgaacatatggtaatgctagattgtcccagtgtatgtctcgcggctctggagcccactcggttagccactctgtcgggtttcgagactgttgagtttgagagcaaacaacagcgccccaacgctttttgaaggatacaaaagctgcaggtacgagtgattttgtgctgctcattactgtctctttctcttcacttatctgaaaccatcaaagtaaagaaacaacaagatgatcaaaaacaagtttagtagcacaatattatatgtaagattgaactgatgcatttacttttctcgttagaccctcgattttttctatgtagtgatcaattgcatcaacttcttcaccccaacagccaaggaaaccaatctgctcaggtaaatagaagattatcaagattcaactaaagagaagatcaagaaagcaatgtggttgcatacatttgtcttacctttattaaaggcctttttgtatggattcctagagtgtttgttttgatagtaatcaagccaattctgcaatttcatcctcttctgtaccagttccgacagcttgtttgcgttgtagaccgcctgttttgttaaacgagaagatgaatacaccgtaaacatggtacatcctaagttagacaaccaaagntgtagtacctggttagtgaggtaa

SEQ ID NO: 27502 - DNA, 1889 bp, Arabidopsis thaliana landsberg
ttgtgtctgaaaggtaaatatgtctttttcatgggtcagagtaaagcaacgtagttgttacaggctcctccaattatacgcgtgttaaactagtcatattgggttccatatgctggtagttgtggtctatcgttcatgaaatgagtgtggttgcataatctagtccttgtggttagtgttgtgatgtgactcattcttgataagggccgttacacagagacatcggcactttgtattagtttctatctctacagcggacagatacacttttgacatgtctttgatcagccaggtacataggcctaaggttatatatagttataactcccacagatggatcatgtaagtagacagagatttctttgcttcaataaacaatgaatgacatgaggcacataactacctactgttttgtgcagcagttgctcattttaacagtgcattggtaacgaagccagatataagaaataaaatatgcttaaacggatggatatagttgaagaataaaactctcacatttggctgtaacaggaaatcaggtaacaactacagttgcaatcagctatatataagcatatgcaaggctaaaataagttgtggaggtgaaaaaggccacttactgaaagatgcaaaacttggcaaagttttgccatcttcggctttaaaacagtgtggagcctcctctgtgattcatccggtattttcccccaatcttgactagctaacatatcctctgggattccagagatatggctgcccatagaatacaagccaaaagcatcatttccatccaatgtaccatctgtaccagaagatttacatgatgactggagtgttatgacttttggtgactccaaagcccctgtaggaaagatagtcagcaaagtagttgcataatcaatgaacactagaggtatcggagcagaaattaaactattttacccatgtgatccttcccagaggcctttctttcatcatcatctactggcggatcagggacccttggatcagtgacatcatcagaagccttctttcgcttctttgcatttccaccatcgccagttttgggactcgcttcagaaccctcaaaatactgaactcgttttcgattcctttggggagtatctgaagggtatttccacataggatttttttcccccaacagctttgaccaaaatatatttggactctcttcatctgacaacttaatatggtcttcaccaaatagagtagaatcactgctgtaagttccctgagcatgcttggcctccaaaagtagacacagcttgacttcattttcttctccacctttggaagaaagtatggacgagaattcatgaatcacgccgtccataatagattgttcaaatgaaactcctgaatctggagtttcactgctgtgaaaatgatccagtttatcaaataagtatgacgccccccacatgagcagtgcgtgcgtgagagagcggtttaggttctctacagctttattttgccgcttattttgcctagccagaatcagggctttttcttcaactgtacatactgagtacaatcggaatatcttagttctttcagaacatgactcgatttttatcttctctacgtgcttaacatcatgcgatggattcaagctgcttccaaaaagaataaacgcatcagctcgcaagagtttaatggtttgactgcaggcacgtgtttccaacagcagaacacagcattgactctccttgttgaaattgtttatagcggagttcttctttgaggaatatatcccatgctcataagattttggaccaaatctttgacccacaaaatcttcaaaaatataaccaagcagaagcccttcaggggtttgtgttgcctgctgaaaataaaaaatgtaattc

SEQ ID NO: 27503 - DNA, 819 bp, Arabidopsis thaliana landsberg
agaacaaaaagatttccaaaaggtaaaaggtgtactcctaaagttggtaatttttaggtacaggtcaaggggtacttgggagatggacactctttcttcttcttttattccctttttcggggccgcacattccaaagcccccattggacttagagaagagtttttttttcgttttctctgctttctcactttttcccgtttcctttgggaatacaaacggcggcttctcaaaagcctccgatttcgatttttttttcctctcttttttttttgttctttctttagagtctcttcttcaacttcttctccggcatcttccgtcggagctaaggatcagaagtttttgtctgtgcactgtttcaattggatcattacatagtgaggattctctgttcgacgaaacgagtaagtaactacattgttgttcttcctcaattctcttctggtttttctttcgttttttttttttaaaacctttttcggtaattttctttttatctctttgaaacaatttgagttctttttttttttgattgatcactgtgtctgattccttatcacggttcttttgtttaaatttgatcgatcgttgtctttgaactccgattttggttctatgaactttgtttactttggatgattgtgaaaagttaagtactatggtttatgcatgttcttatgagaaatcgatttctttcgtttagagatcatcttaaggcggcgaatgtttttgcgctaagggtttgtgcgagtcctttagaagaacatttgggaaaatttgtccttttttttttttggtcaagggattttttttttttt

SEQ ID NO: 27504 - DNA, 1172 bp, Arabidopsis thaliana landsberg
ggatccaaaaatttctgggaatatagttcttattcaccaatcatttgtttcaaacaagatagaaaaagcatgcctaattctccaaagtttgttttcataagtaattttgaataatttttatttctctttatttacttccattattttgatatatagttcatatccatatctcttatgattaattttttaatcataacatgagaaacgataggaatgaaacctatttgtaggcgtttacgatatttcttatgatacatttttttgtaaattagaatttagaagtagtcactttcgttttcattactggttcaattagaatgagatatgataaaactaataatttttttcaattgtctgctctacaatctacacaggattccaaggaaaaaaatactttagggcttcacatcaccacatcagatattgtcaaagacaattttgttttgtgaaatcgaatactctgaatccggctttgatatcaaggaaaaaacgcttgacaaagcattggaagaaaaaaaaaatattagttaaaggaatcttatacattttatgaagtttttttttctgtaagcacccgaaataaaattgatgaagtttgagtatatcactatgccttatggtttttgccgaccaaaatatgtcgaaattatgaatacatatattttatttgtttatttatattctattaaaattattttgggtgtaataataaaattaaacttctatcaattttaaagggaggattattaatttaaataacattaaatcatatatgatatataatcaaataatattttagtaatcttaaaattaaattaaaatttaaaaactgatatttagataatcataaagtattaacccacaacaataagtgattacaatttaaagaactactattagtttcttaaaatattttaaaagcacatgtgttctaaaaaggttacaggtagataagcagtctgctcctaaagaacggaaggagacttgtttcttctctgcgatgttcttggaaatcgcggcttttgcccgccagctgcgaatcattcattcagaaccggatggtattttcagtccaggtattctctttcaacctgggtatactttgtacccgtttgatacgcaatttagtacctgggcagctaatgaagggatgaggtttcatgaagcttgat

SEQ ID NO: 27505 - DNA, 1302 bp, Arabidopsis thaliana landsberg
tttgatcctaaaaattcggaaattagttttctaaagatggaacccatttaaaaaaaacatcttatttgatacatttaaaaaatctaaattctttagcaaaaagaaaccaaactaaaactaaggatgtttttgttttttcaagttcatatatgatttttttaaatcactaaggatttctaaagcaataaattaactaaaatttttgaactaataactaccaagttttcgatatataaacaattctaattgaattgaaacaagctcattcgatttagacagattgtttcgaattattcagatataacaacctttcttatttttaacacaatcttgcaaaagcttaagatatatcacaaaatgagcaatcactagcgttcaccaaaaactcaagataaactctgaatcagaagataacccacaatagcaccgttctattcaatcacacacacacaaaaccacagcttcgcaaagtttttgcccttacgcaatcattacacaacaatttaggataaaatgattgaacctaacgccacagcaacgtttagactcctcccaatacagcttgttcgcaggatttgcggatggacggctcgtgtaaaccgacattgtctcggccctagacggaccggctgatgctccaatcacaagcaacttatctccaagtgacttaaacgcaacgccccatcctccattagacttagccctcacgggcacatctccaagcttcttccaagagtttgcatttgcatcataaacgcggagctcgttcgccgaggtttccaatgagtaaagatcatccccaaccactgcgatgagcggtggagattggacagaagagaaagacatgtctttgagaatgtccggtatgatttcccatgtgttcgtcttctcgtcgtaactttctccgcaagttaggttttgaccattctcatcccggcctccgagaacataaaacttgccacgcaagtaacacccagagcagaatttccgccgcttatgcattccgcgtagaagcgtccacgttttggtcttagagtcatacttctcaacgctgtccacaacttccatggtcccgtttccttcaattttcaacccaccagctacaaacacaacagtcccacaagtagcagaagcaaacaagattcgcggtgtgatcatcgcgggacctttgaaccatttgctcgtctccaactcgtaccgccatagcgcaatgctcttctcctctttcccagtgacaatcaaatgagttccagcgcaaagcgattctttatctccatggaggaagcatatgtcagaaggaag

SEQ ID NO: 27506 - DNA, 1778 bp, Arabidopsis thaliana landsberg
tgacgtaaattccaacttaacattttgcataatggactcaacaacatttgcataattatttactaactttcaactttggctccttccacttgtcattttacgggattatttgaaaagctggttttttttggtacaattaacaaatagagttatacttattcccacaagatatctttgattcttaatttctccctccataatcaatcataatggaatactacaagtgtaaacattaataaacaacaaaacgtgatttggtttttaaaaagtgaaatcacatctcatgtcctatgctactcagcaccttcctcgacaaaagtggttctatttcttcttgtatcttttgtcgcagttgattacaaacaacattgttcacttaaatgtattagatttggtgaagtagagagatctctttatggattttcaactactatgcccatacaatgatgtcgatgtttcattctttcagagagttatgcacacatgtttattaattagggagcccatatgatacagattgttttgtataaatgatggacctaacgtgtaactggcagatcaatttgtatgttgtagtcgaatcttctaattccctcaacaactcttctcgtaatgaacactgtcgtacatggttgatgaatcaatttttttgaacatggatttccacaaagcaatttttaatttatctttgcatgtaatgtaagaaactattttaaccttaactaaacaaaaaaaaaagacacaattttcaaaaaaaatctttaaaggaataaaactgcggcagcttccgactctcgaatgtaatcatcgtataagcggctgtaggaacccgtacgtttacaagttcaatgctatatgaagcaaattatttatggtttatgtatatgtaccataaatattatcaataaatggttttggcttctaaagatgattggtatacatgatcaaacaccactagttggtcaaaccaatcaggcaatcaattcggaaaaaagttttgagtatattttataccttcattcgtttccacgaagccaccgaaccatgctctagataagatttgtacttatatccaatgtttaatttagattgtgggaattatagtagaatttctttttcgattagtcgaaagtttaaatagccacgctaattatatattcgacgttgtgttgaactgtattgcaaagatttgcctaaacgtttttcgttcgacatgagtagttaggttaatgtgggggggggttcaaaccagacgtgaatcgtgatgatagacaaaacattatctcaaaaattagatttgtctatgctcaattcaaaaattagatgaacgttactgatggataaagtttgtccttttgaatcagtattccgtttccgtaacatagacattccacctatactcatgacatgcatcaaatgagacacatcaaatgataatgatactgtatatattgcggctcgacggtatatttgcatctattaacatgcatgcacaaacatatcatggtcaacatgtgctctcggaaaatgtccttttagtaattaaacatattttgagatatatttattattacttaacttttttttaatagaaaaatgctattttaaaaaatatacaaatctgcctaatgttgtttgtgatttctaatatatatgcagatttcataatttaattaattaagtggaacaggttgaatcaataattaagacaaacagaaaagtggaaccgaaaagataatctttttatatagtatatatccagtattatcatgtaactc

SEQ ID NO: 27507 - DNA, 1094 bp, Arabidopsis thaliana landsberg
aaaattaagttaatccgagaaactattattacctataagaaacaaggacatcagcaaggaagtttaatctagccatcagtacatcaagatccaaaataagggtttggaattttgcttggcataatccttcttgaatatctctcaaatctttttcaattgcattttgaaaaagtctaagaccatgaattgggctccgtcctacatttggaattgaaagggactttttactccactcccaaaagcgttgaaaacatccgcttgacggatgtgactcaggtgatttcttcatacttttagacacattaacatactggactcctttcatgatctctgtaggagtcccacaagaagattgactatcgtcaagcagccaagagcttatgaccttcagaaaattttagcttatcaaaaggaaagaagaaaaacatagcatatctcagcaaaggggatatgtatacctgttgcaatgagtcttcatttggggcaacatctttgatacaattctcaacttcaattttctcctcgtgagagagatgagagatcatccatggcaaaaagtcttcaagcaccatcactggaacactacaaatgaattgccacacaagtgatgcttgttctcggaaagaaaacttctctattaacaaaggaaacacctacatgaagcatgactcgttaggcaccactatgaaaagtgatagagtatctgtaactgaaatgttgttttccattaaaaagtattgtagttgtcaaaacagagttgaagtataacaagactatatacctgccgctcttctttaagcatatgttggcatatagatgactggatggtgcctatgcataaaataacttcacgaagtacatcacttctacttcctatttcttcttcaagaacatgtagccagtggaaaattgaggtaaagagatcatctgtgccagcatgctcaagtgagtaattagaaactatgtttttcactggtgtatctagcgccgaaaatattacttgccagtaagaaaagcatatctgaagccgtggttgcgtatcataataaggatttcgatctaagagtcagattgttgacatcaataaaagattc

SEQ ID NO: 27508 - DNA, 1562 bp, Arabidopsis thaliana landsberg
gttttttaacttccttaccaaggtctagtcatattaaaaattacaaaagattaattaactggaatcattattatcatatgactaaagttatgaaatatatttcttaaatgtgaaaggaaggaataaagttaggtaggaggcctctcagctttcacctggaccatacgtatatgttctcgtaaagtagttcagcttttttaaggaaacaaacagaaaaaaaatgttttctttttgatatgataaaagaaaaagaaaaagtcatgaatctttaattattgaattacataaggaactacattaacatgaatgttcctttaatagaggttttggtttgatatttacttcaacacttatctgttttcgacgttttgatttaaatttcaatcaaccaatatatactttattgcttttcatttctcgttttaagaacatctaataaattataaacaaaattgagatattcattctatattggtactctctcggtcgagaaattgaaacacatcggttaacataaaaaaagaaaaagttgaaacacttccaaacaaaactgaaattgggtccgagaatgggcctaagcctggaatagcaatagattttaagtggtgcacattgcacactccttaccgttttatccttttcttgtggatcttatggaaccttaaaaaaaaacaattaacaactggaagtgtttagtgaaaaacggactacataaatttaatcttaatttcataaatcaataaattatttcgatttaatcatagaaatgtgttaagctggactaaaactacaatgacgtatacaaatagtatcatgatacaaatcaaatgattattataatgaacaataactaggagaaggggccatgtgggtgacatgaggtcgatgagacgcataagtaaggggcaatgaaatgaaaatatgtttttgctttggagagaataaagggaatgcaatgggtgtgagaatattaaagagtggatgtttggactttctgttgcagaatctgtttctgaattttgcaacctcatcaatatcgcatgttgttattaaacttctgcatactccaaataaatacaatgtagtacattattccttttaatttgacttctctatcgttctttgtcgtttcttatatccacatcatcgtccctgttttaacatatgtcaccttcctcttcatatacgaagcatgttgttactctcactccatacaatttttggacattaatgacggaatctgacattttcatataagataagagttagttagaactataaagtggtacaaatgttttacacttcaaatcaattttggtaaaggtgagacaatttggcatctacataaatgaaagcattgattttaaccaacgagtggtatatatgtacgtgctaattaacacggggtaaggaatgttgcatgtgacgatggacaacaacatttaattctacaattatttacgcatcatatctacatcgacaaggactcaaatcatctcacaatttttgttacccactcaagccagcttgttcatgatgatgatgatcacactgtcccaccc

SEQ ID NO: 27509 - DNA, 1710 bp, Arabidopsis thaliana landsberg
atgacacggataaccttgtgaagataataacaacgagtaatttatgaatttgtacgttactatttatattttgggatgggcgagaacataacataaaaccatgggtggtttttctcctctcgtcggtcgaagacagagacaaaaaatatttaaatacgtaagaatctttgcttcttcttgatgctgatgagtgatgagtaatcgacagagttattttgcttcttttgtatgtataataaaggagattgcgactctacaagagagggctaatatagcatgcattaagatcaatcatacagtgtacttaaacaagatttaacatcaccgtgggctcgagattcgagatacattattttctttttgtcttctatgttgatgttaatatcccacgtgagatatcaaatgtttagaacaatgtgaaaaccattggcaaaaaaaggaaaagtggttgggaattttcactatatattcgaattcgtatcaatgagagttagtcacccaaaaacaaaaactaaatagagagaaataagtagatatggcaacccttaagtgcattgattggcaattcagcggaagcgaggcggccaaagatgctgccgcggcctccttaggctcatatacctctgcactctatgcactgtgcgatcctcatggcaaacccattttgcccccacgaaatgagatcctggagaccagcaatacagccgaaaaagcagttgttaaagctgttctttatggctcgggaaacgcctatgctcctagcttaggcctcgcggccgccaaaaggtatatataaatgcattattattgataacatgtctatataagatttcttgaaaaaaaatttattacaaacagctccgtattagtacattttatctgtaatggttatgtgttgaaagtgtaactagatccaaattattttggtagaggaaacttttgaatttggaccggtctttttggtaatttgttcacaaaacctttccaaaatcatttgtcatttttggtatatatgcttaaatgaacatttagtttggtttaactcaaatttagcaatcccaaaattttggaacttggaagggaccaaatatttttgattaattctgatttagccccattggacacttctattttgcatcctaactctatttatatatctttgacacaatcatttttgcttccgtattctcagtgccgtagcagagtatctaaaccaaggtcttccaaagaagcttacagcagatgacgtgtttatgacccttggatgcaaacaagctattgagctcgcggtagacattctcgctaaaccgaaagccaacgttttgcttccgagtcccggcttcccatgggacctagtccgctccatctacaagaaccttgaggtccgccactataatttccttccagaaaagaactttgaaatcgactttgatagcgtccgagcgctcgtggacgagaacacatttgccatatttataatcaacccccacaaccccaatggtaacacctactccgaggctcatctcaaacaggtattacatatttatatagattctttagtcttggctactagtgaaagcattaacttacttaccttgtttggttcttgtataatttttgaaccgcagctcgctgaattggctaaggaactcaagattatggtgggtttctgacgaggcttttagaaggacactctttgggagtaacccc

SEQ ID NO: 27510 - DNA, 1119 bp, Arabidopsis thaliana landsberg
  unsure (1)..(1119): unsure at all n locations
agagtaaaaataaaataaaaacttgacaatatttttacacaaacattgaaccttttttagaaaatggaaagcaaaggctacaagaaattagaagaaaaattacttttggcaaaacgatccttccgaggttacccacgtcgctttgcttcaagactttctgcaagagaaaccgcaaattcttttctggtttccatccctaaaatcaaaccaaaaagatcaaaatcatttcatttccattgcaaatgtataatcttccgattcacattttatcaaaaaaaacacatgtaaaatctttagcttcttcatcaaaccaaacgagtggtgcaattacacaaactattcgagtattgctaaattaaagaataaacaatgagaaagatgattgtgcatgtctacctgccggcgatctggtaccacctgctgacgtggcatagcagaagctgagccagctcggtccatggtgggtaactgagtctccatcactggcgggtaattgaggcggcactgccgggannnnnnnnnnnnnnnnnnaggtccctcccgtggcggttgtggccacggggttaagttgtggagccaccgcggcacaggtttctccgatttgggtttggttctgctgattattgttgttgttgttgttgttgttatgtctgtggtgatgagacaagaacctcctctgtctcgccatccgtttctttcttgcctctttagttgctgaggaacacaaacggagtaatctctgatctctcatttgtcctgcaggaacataaggatattggtacggattcatgttgtatccattgaaacctgttggatctccaaattgattatactgcgaggttggcggcatggggaattgttgatgtggcatgggaccagactgtggtggtggtggccatgacggtggagattcaagtaaaggaaggaactctggctgtggcggatagcttggagcaggcatgtatacaaaacccgggtccgagacaaaagcttgttattgcggtggtggaggaacccatgttgaaggtgagaaacatgtttggtcggacggcgggattaagttgttgttattaaggttagggttttgaaaaggatcttgtaggaatgattgctgataaa

SEQ ID NO: 27511 - DNA, 1194 bp, Arabidopsis thaliana landsberg
ttttttgttacatattaatttgtttttaccccaaaatatacataggaaaacctcatagggacattatatctatttatgtaacattgatggacgacacacacaatggaccatgtgatattttagttcatatatcaataataaagttttgatcattattattataattatatttgctcgaccatgatagtgtatttaacgtcaagtgtgggtccaatttcggtccaaggatgctgactagaaattagcatttttatagttttctcctaataatttactatttaatgcaaacggcctgtgacgactgaattgtcctctgtctggccccgtgagcttcaccgcagcttttagatattttctttccccgttcttccggattttttttttctccccctctcaagcaaagcattatcgctattgctctgccttgtgagctgcgatcacctgtttactggtaagtctctcctcgtcttctccttcttcttctctgggagatcttctactgttctctctgtgagctgatttgtttggtttcctccatagagctgatcatatcatcatcgttgggaaccgacgagatttagtctatattggtgaattatttttgtttatctggttttgattttttgaatctgtgactttagagagaagaacactgcgacgtcgttaaaagtaggttgagagcgagaaaggccgagagaatggagatggaagaaggagcaagtggtgttggtgagaagataaagattggagtctgcgtcatggaaaagaaggtgaaatgcggctccgaggttctgttttcccttttttttgtttgtttgttgctcgtctttcgcgtttttctactgaccaacagattccgattacacggctccatgatgaccggtttgtcttttttttactacgtgtgttctcgctcatacattccttgttgttgttgctttataggttttctcagctcccatgggggaaattctcgacagactccagtcttttggtgaatttgaggttcctttctcacttgatgatcaatttgatactctctggtttgtattcttatagttgtttttattttcattggagagagattgtttttttttgatggaataacctgtatttttgtgattcttgggcaaatgttattggaagatgcttctgagtaactttttgcattagtctgctaaagaagagttgttg

SEQ ID NO: 27512 - DNA, 1920 bp, Arabidopsis thaliana landsberg
ttctattcatctctcactaatgacggtggagaaaaaaagaaaatacctaacaaacaaatatatattgtcatactttaatattgctatatttatagttcattagcttatattcctcacttttgagggcttatataagaaggtgagcccacaccaaatcagaatgcaggagcagatactataatcacccatcttcttagttgtattttataatccctcttctttctgatcatagctctggaattatagcctatgtctctttaggctcaagagaggaggcactataactacactgctctctacttttacttgtattttagcataaaaatcctaaaatccgttttaaattcaaaaataaacttagagatgtttaatctcgattcggtttttcggctttaggagaataattatatgaaattagtatggatatctttactagtttccattcaaatgattctgatttcaatctaatactctcactctttaattaaactatatgtagtgtaatttcacactgttaaatttctaccatgtcatgtatattagagttgcatagaaaattgtaaaacatccatttgaattcgaatgaaacaaaatgttttaaaataaaattttggtttttaaaagaaaaatctaaaactgaattatatcgtttaaccaagttgtaaaagtcataaaacgtagtatcttgtaaatcgctcttccacggtccaaatagacttctagtaataaacaagtaaaactaattttggtttcttactaattttcacagatgggtgaaaccgctgccgccaataaccaccgtcaccaccaccatcacggccaccaggtctttgacgtggccagccacgatttcgtccctccacaaccggcttttaaatgcttcgatgatgatggccgcctcaaaagaactggtcacgatttaaaacataacaaaaatacatgtcaaacttatgtttctttcattgttttataaacgtaaatgctgaaacgcaagacaaaaatgcggttttgctccagggactgtttggaccgcgagcgctcatataataactgcggttatcggatccggcgttttgtcattggcgtgggcgattgcacagctcggatggatcgctggccctgctgtgatgctattgttctctcttgttactctttactcctccacacttcttagcgactgctacagaaccggcgatgcagtgtctggcaagagaaactacacttacatggatgccgttcgatcaattctcggtaacaaatactctgtttttctcactctgtttttggctctgctttttgttttgagtattgaaatgctctgttttcttgtaggtgggttcaagttcaagatttgtgggttgattcaatacttgaatctctttggtatcgcaattggatacacgatagcagcttccataagcatgatgtgaggtcttttctttctttttaaaatcttcttacacaaataacgaaacgaaggaaaggttttaaaatttgggtaacttggatggatcatgcagggcgatcaagagatccaactgcttccacaagagtggaggaaaagacccatgtcacatgtccagtaatccttacatgatcgtatttggtgtggcagagatcttgctctctcaggttcctgatttcgatcagatttggtggatctccattgttgcagctgatatgtccttcacttactctgccattggtctagctcttggaatcgttcaagttgcaggtgaaaaataactacgaaagactcttataagcttcacgagaattaaaaaaaaagctaaatcttgatgtgaattgtctcagcgaatggagttttcaaaggaagtctcactggaataagcatcggaacagtgactcaaacacagaagatatggagaaccttcccagcacttggagacattgcctttg

SEQ ID NO: 27513 - DNA, 2845 bp, Arabidopsis thaliana landsberg
aattgcgtccatggccttgtcgaaaccctcatactctatttggagatactctttccatgtaattgaccggtaaagagacggttcagccggaccggttaacttagagataggtgcgatttgcacatcaccagctggaccaccccataagtacgcaatcgaaattcttgaccgagtatggttaactttggctcgatgaaccacgcttgggattttcccgttcgataagatgtgaaagagatcacccatgttgaccacgaggacaccaggagccggctcaaccgtgacccaaccggactcttccctgaacacttgtagccctcccgtgttgctctggtgcagaatggttaggatagtggagtctgtatgagcggctagacccatggctcgttctggttcaggacaaaccgggtagtggtttagtcgtatggcgcctctgcccacttttgatccagatttctctagcttgtgagcccattcaatgtcttccacggtgacaccaagtgagcctaatgtgcaatacagaagtctgcttgctaatttttccatttcgtccacgtattcttggattataccgctgcacaataccaaaaatgaaaagcaaatacaatttacagtaattaaggtttttggtaatctaatgttaagacctcgacattagccaaattatcacatttcatagagactttggtactttaatttgctgtaatatgcaataagaagtactacttcataaaatataaggatgttgctcaaactatttaattagaaactttgaaggctacactctatgtgttatcagttatcactaatcataaacatcaattactcggaacatataaacacttttttatgaacagaaaaaaacatttaaacacttttaataataactaagtcttagtgcaaaaaaaaagtgtgcaatttcctttgccacacttttgcgaaataagcaaaaaatatatatatgtgtgtgtaatagacgttaccagtacttggtgtgatcatgaggccaaagagtattgaaatggttgcggtaggagtcatcggcaatagtaaacccttcagaccacattttcttctcgaaaaagggggagattcgaggttctccgtagccactaactcctttatcggaggaagccgcttcaagcttcctctctgacggcatgtcgaatagggttttggacagagactcgatatcatcgagaagcttctgagaaatcccgtggttggctatctgaaacgctccccatgttttggaggcatctccaatgagggtggtaacgtcaggattagagaggtcgatcacaggaatggactcttccactgcgtcgaatgagacggcggaggagggacgcagaagggagtcggcggctgtgagtttccaggtgaacgactcggggagtgtttggagactgcctaagttaccaatacatatctcttctgctagtgaaggcatgacttgtgaactaatgagagaatgggatgctcatcacataaacaattactttggatatatatgcatagatactacacacatatgttatgaatgtatgtagatcacagcaaatttattacatgcatatatgatgataaagataaaatcagtttatttctgtccttttttgttgagcgatcaacccccaagagatttattagcaaatgtagtgattagtgagatatacatcattagtttttctttgtatatattatatcaagtttaagtatatttggtaaaactttcaatttttcattgaacctaaagctagcaattagattggatccacgtactatcattagcaaataatacgtggtttgattggcatatctttatgtaatgtagttgacgaaaaaaaaaattttttatgtaatgccaatttcttattaaacctaagcaatttgtttggacccacgtaatattacaattaaacaagtgtgttcatgcatgctatcagttacaataggttttgtcatcattaattagttgtaacagagaacttttaaggacctttagggcatttccatccatgagaaacccacaaagtttctcaaacaaaaaaaatattaatattatattataatttaattatttgattaaaaaagtatttttgttaaaaaattgaaccaatagtaagatgagaattgtcatgatgggttgtatagagtatctcagagtttttcaagtgagaaactttctacactctctccttcatttttattatttttatttttttaattgtgaaaaacttttatgagatactgccaatggaaatgatctaagaggctcatatatatcgtccatcaattcaaatgactgcaccttgattcatgattgtacccaagtacccaacagttcgaaacctgatcaggctctaaaagtgttacaaaacaccgtaatgtttcggaaatttccttatagagaaatttcaaaatagtaggaaatatttttcaattttttaagctttgaggaagaagaaaaaacaaaacaaaacaaaaacaaaaatcttttcgaagtaaactaatactgacatcccaagtcttcgcttctgtcactatcctcacttgacttagtcctcaagcccttcacctttcaacctcaacttgtatgcttatctcttttttttgtttaattcatttcctctgctcttttcaacataaactaaacccagaagacactttgttcatatctcaaacaacatgtactactactaccccactttatgttttggcctgttcttcctcttttctttaatttctcttgcttgatcttcaagtatacaagaacttcgattatgcgagactcattttcagtgtgggaataacaccgctggttatcactgctggggaggga

SEQ ID NO: 27514 - DNA, 1222 bp, Arabidopsis thaliana landsberg
tatttttttattggttgattagaaaatagatgatgtttttgtttataaattataaaataataaattcttaatatgtgtgtaatcttctaaaacatcatttataaaagaatggaaggagtataagacttaatttattacgtatcggatcacaacaaacatgcacttgaatcacatccacctaacttccatctaggtgtttgtttttgcaattattcatatagaattgatttggtgatataagtttacgagttattaaaggaaaaaaaacaacaacaaaaaaaacaaattcccaacattagttatccaagagtattgtttttttttttttagttatccaagagttaacaataccttctaatactgttctctacaagtctactatacctacgttgcaatgataatttcctgcgtgtttttttttccttttaaacgtcacatgtttaaacaattttcactaacccgttatttacacatgtaagagaaaaaaagatagccaaaaggacttatagtgttatctatttaaaaactaaacttgtggtgtctacctaattaacccatctttgtacgtaccaatatcgctttcttcaattattagtaatatataaatataaatgttggagtagctgcccgtcattttttctttctctctctcctccctaagcaaaactaaaacaagctatggctggtatgcttcccggagttgagtgtgcaaggaggcggcgcttccacggtggtgctcctccgattgaatcctcgaacacagcttctgtggcggctgcggcgggacacgtctggacacggcgaccatcgttctctctttacactaccaatcatgagagccaccaggcccatgtctccttctcggtaatgaaatgaataaattattatacagaaaagagaacaaaattaatatatagttgtgttttatgttttatgaagtttttttcttaaaataatatttcgtaaaagtatttcggtttgagagtttggaatcttataattttgtaaaattataggagagaagtgttaggaataaatcttatggagaagacaacgatgagaaacttgacggagcagccaaagaggcaaagcagaggcttaacaagcggctgagaatcccaccacgtacaaggttcgatttagtaaaaaacggcgtgtgatagtaaaaccaactcgtaaatttaccttaaaatgcaccgaagaagcttcaagcctttagggg

SEQ ID NO: 27515 - DNA, 1535 bp, Arabidopsis thaliana landsberg
  unsure (1)..(1535): unsure at all n locations
tatattatcacacacccttaataaaaaaaaacgaatttttgcggtacatttataatgtaaataccaataaaagagaaatcgatcttattatacttatatgtagaatagtcatttaatctgttagggtcgttacatagtccaaaatacaaaatatttctaatggtgatgtttttggtcacctggtgtgtccgcgttataatacataatttaaacgaatcgaaatgttgttaggaacatgggttgggccggagcgctatcgatcgagtcgtaccagtgggttgaagctaaggtggcgtttcagcctccgatgggtcggtggcaaacgcccagtgagactcggcttattggaggctaggattgtccctaataagggttcaccgatgagcatatcattgccaccaaattaggcggaactatttttgcccgcatcgtcattcgacacacgagctgccgatttgtcggttatgccgatcctagggtattaccgtcctaatgcatgccaccgtcatccggaattggtttcgtactcgaagcacctcaatgcacctttgcagagatctatacgctataatcttgaaccatagcagcttacagttcgggctacccaagagcatgggaaattcccctgtttctgctctggttcttgcggacaacaatctcggaggatgcataccgggaagtatcggtcaaatggggaaaacactcaacgagcttatcctctccaacgacaacttaaccggttgtttacctcctcagatcggaaacctcaagaaagtgacggttttcgacatcacttcaaaccgtctacaaggtccgttaccatctagcgttggtaacatgaagagcctagaagagcttcacgtggctaacaatgccttcacaggagttattcctccaagtatctgccagctttctaaccttgagaactttacttactcttccaactacttctccggtcgtcctcctatatgcgcagctagtttgttagccgacattgtggtgaacggtaccatgaactgcatcaccggtttggctcgtcaaagatcggataaacagtgctcatctttgcttgctcgccctgtggattgcagtaagtttggatgttacaacatcttctctccaccaccaccgacgtttaagatgtcacctgaagtccggacacttcctccaccgatttacgtgtactcatcgcctcctccaccaccgtcgtcaaagatgtcccctaccgtcagagcatactctcccccaccaccaccttcgtccaagatgtcaccctctgtcagagcatattcaccaccaccgcctccttattccaagatgtcacctagcgttcgagcttaccctcctccatcaccaccatcaccatctcccccaccgccttacgtatactcatctcctccaccgccctatgtgtactcatctcactcctccaccgccgtatgtgtattcatcccctcctccaccgccttacgtatactcatcttctccaccgccttacgtgtactcatctncacccccgccttacgtatactcat

SEQ ID NO: 27516 - DNA, 1311 bp, Arabidopsis thaliana landsberg
atggaccacatttgaatttgctctagtcatcttctcgtcgccgacactaatctcattttacctgtagaagcaaaggatagtggatttgttcagtagtatgtgtagttggttgagagcattagatgatccagctttatgagcattaagtggaggaaccacatagtagggtttcgttcattgattgatttcttcagtattgattcttgttagttgaatttgtttactcgcatctttgttgttctgttcttcacatttctttgaaggttttcttagtctataaagttgtacatcataataatctgtggtttgatgatattgttttaagacagtcttgttgttgctctttatcaggtgtgcaaaatgattggatcgtttctaacaagaggactagtgtaagactctaatctcttcattttgaggttctaaagtattagtttgatcaaagaatttacggattttgtttgtgtttcatttgttggcagaatggtatttggatatgcgtatcctgcttatgaatgttacaaagcggttgaaaagaataagcctgagatgcaacagcttcgattctggtgccaatactggtttgtgatgtttggctttttcatctgttcttatcttgagtttatgccttgagttttctcttgtaaagtttagctttcttcttgaaacttgttgcaggattttggtggctgctttgacaattttcgaaagagttggcgatgctcttgcttcatggttggtattattgatacaggaatgtacctttcaaatgaattgagatatattatgtagacttactttgtttgtgtcctgttgtcatgaagggttccactatactgtgaggcaaaactggcatttttcatatatctttggttccccaagaccagagtaagtaaactctagtagcagctaaaagagagttagttagtatctgtatatatgtgatccattggagttcgttctatctcactgcactttcctttctttccacagggaactacatacgtgtacgattcattctttcagccatatgttgcaaagcatgaaaatgaaatcgaccgcagcttgattgagctaaccaccaaacctggggatctggcagtgatatactgcagaaaagcagtgagctatggacaaacaagaatcgtagagatcctgcggtttgtagctctccagtctacaccaaaacctaagcctaaggtaatattatgcacctaacaaataccatgaaatgcttatcatggatctttcgcttttcaactttttacatgctcactagaggatcatttaacaagtttttccttgcacaat

SEQ ID NO: 27517 - DNA, 2196 bp, Arabidopsis thaliana landsberg
ggttttgctgaaaaatatgggtggttttgatttaataaagacggtaacaagcaaagagaaacggagatcttggcattgcctggattctcataaacatggccgctctaaaaggtactctcgcttcaatagtttaagctcaatcttttcactaatattgaatctttatcttaaatccattaatgggtttttgagattatctctcgatgtttcttgcacaccaatgtttgcttaaacgtctctatgatgaaaacgacgtagatagagactgttatgcaaagaagtctgttttagagctttttctgtttagaatgtttcttcctagaggctagaacgaattcttgtttatgatcttcccagtgcgtcgtcagagcgggatcttcacacttctggtaatggagcttcacaatctgcaaacaacttcactagaatgcaagtaagacactttaaagctgtatttcatatgattgtttttttcttttgaggttgatttgtatttttctggtccataggcatcctctgttcaaacaacagcaaacaagagaccaaaaccactgcataattgtcagatgttaactaaaaacaatgtgtcttctaacgacagagcatccttggaacgcgatgtaagcgcgtcatgtttcgtatctcctcgtctttaacatgcattatcatgtccaaaaagtgaattgatctcatctgaatgatctttgtgacttggctacacaggttgagcagcttcaccttcgtcttcaacaggagaaatctatgagaatggtgttagagagagcaatgggccgtgcttcgagcagtttgtctccagggcacagacattttgctggtcaggtaaaacacttcagtatttctgcattttacttaagagtaaatagaaattgtgagactttagattttacatgtgaatttggatgattcaggcaaatgaacttatcacggagattgagttgcttgaagcagaggtcacgaatcgcgagcatcatgtgctttctctatatcgaagtatatttgaacagacagtaagcagagcaccttccgaacaaagctcaagcatttcttctccagctcatcatataaagcagccaccaagaaaacaagacccaaatgttatttcaaatgcattttgttcctccaataatttccctctaaagccgtggcatgctatggttactcttaaagattcgagtagaaaaacttccaaaaaggaccaatcttctcagttccagttcagaaactgtattccttcaacaacaagttgctcaagtcaagcaaaagtaaatgaataaagactaacttccccctaatttagtcattgttgatacttcttctaacttttatatattctgttgatttttctgtcagtcccacttcttaaaggattcagtaacagtgaagtctccatctcagagaactcttaaggatcatttgtaccaatgcccaaacaagttgtctgaagatatggtcaagtgtatgtcttcagtgtacttctggctctgctgcagtgccatgtcagcagatcctgaaaagagaatcctatcaagatcatctactagcaatgtgatcatccccaagaacattatgaatgaagacagagcttggtcctgcagatccatggtggaagtatcttggatctcatcagacaagaaaagattttctcaagtaacgtatgctatcaacaactataggttagtccaacaatagcagtttttgaaaacaacatctgaatttagttccatcacaagaactcatgattttaacttgcaggctccttgttgaacaactagagagagttactataaatcaaatggaaggcaatgcaaagttagccttttggatcaacatatacaatgccatgatcatgcatgtaataaagtctttggaatttctctaaacttagatttgcagatacaacaaaacttacaatttcctgattgtctgattcaggcatacttggcttacggcgtaccaaaaactgacttaaagcttttctccttgatgcaaaaggtttgatgtccacacaaaaaaactacttaactcttcttggtttggttcggagagaggttagtataagtctctgatttggagattctatcaggctgcttagggggttggtggccattcatacaaagaactactgatggaatacatgactttaaagatgagccatcctctgcatcgtcctcatat

SEQ ID NO: 27518 - DNA, 1509 bp, Arabidopsis thaliana landsberg
aaggacagatcagttgtacattttacctgggagtacagtgaacttgcaagggtagcactgccttcaagatagtatacagctgggataccaaaattccagtccggatttaacatatgcgccaatttcccaacagcttcaaatatttccccaaaaatctttagccaactagaggaaagtaaagatacaaccttctcaaccttgacataaaacccctgcctgtgcaccgctaagtaatttacaacattgatgaggtcgagatttggcatctgcccattagatgcctctgcaaagatacttagtgtgtcctcaaacttttcacttctaccatcaaccttcaaaaccaaagcagcagccattgttccagctcgtctgaagttatcagctgtattttgctcgtcacacttcagaagatccgagaccttaaatgaaggtgagtggtattcagttaaccacgcagcaacaggcctatagtctccataacgagaatcagcgacaagccatattatgtctttggaaagccaggtaactctagagagcaaggaaaaaagagaactgacaattcctaaagacaaatcctcatagtctccaccatttataaaatcatagggagtaaccagcacaatagactcttttccatcaccacgaggggctcttataatccccgcaacattgaccccataagaagcacaactgacattctccagcaatgtatatgaatctggaccggagaaaaagtgcagggggtgaaattgattcccttcaggatggaacttttgataagaaaattctgcacccatatctgacatgtattttccaatgagcttttggacttcactagaaagaaaaatcacacaaatggagaaacattaagttacttgggctaggaccaaaacagaaggacaagtaaaattcttcataacgtaggagaaagctctatttcatgcgaaaactgagggaagaaaagacatacacaccctggccttcatgattcaacctaaagttctttatgtccttcaccagtttgcttccatcagaaacatctcgattagagagcatagaccgtgcagagcctgaggattagagtcaaaatagaaagtgtaaaacaccaaacaacaacgcattcaaagttggcaagccataaactcacatgactcaacagttttaaacccttctacagattccaatcgtatagaacactaattccaggttaacatgtacagtatccaaatgtggactttaattgaattctaaggtatgtaacaaaacctggcattagagcattctcggagatgtaagtgttctttgccagtagaggcaaaagcagcagcgccaaaaccccagcagcagagaaaaccacactacaaacacaatcagatcatcaatgaaccaaaagagaaagaatcaaaacatagaaactagtggagtagaagagaaaattatggttgaagatttacctgaaaacaggactgtgagcgatgaggaagattccgagccgaacgattggtctcg

SEQ ID NO: 27519 - DNA, 1358 bp, Arabidopsis thaliana landsberg
ctagagtgaacaatgttttaaaattttgacaagacgaaaaattaattgtttaccgatttaaagattctaaagatctatgttagtgtatatataattaatgcagctccagttttttttgttatttggtatttagacaacaatttttattttataatataatgttcattccacgatactcggaattgagcacatccgtcgttcaccaacataattcaaaggaaccagccaattaaacttataaaaatattgatgcccatgtcacaacaaccaagaccgttgaaacgacggtgttttacacagccaacaaacaagtccagcatggcggtttttgagaaccaataagaaattaaatctattgtttactctctagagtaaatttattaatttttaaagaattcataatattccataaatttaataagattactagcaacaaaaaggtctgaagtctgtctctgacgatcacgcggtctaattgcgcgtggaaatttcttcaacgcggattttttttttcctgccatttcttgcatcaacgcggattaaaaaaaaaaaaaaaagtgttttcggtaataacccgaaagagaaaatacgtatcggaaaaaatgcaaaattttcaaaaacatttaattttaattttaatttcaagccaaattcgggagcgactttccaaagacgaacaaagccattgaaacggaagagaaggctgctcctttggtcctctctgtttctaccgtcgattcagatctctgcctctcgcaatcgaatcaatttgtgtaacgaatcgacgcgaattatagtggtgaagaagtcgacaattcgattgttgtgtaggttgacgagaggattggatcggtgtgaattcctcctaaatggttcgatcgggtagttttagcgtcgattcttcggcgactcatcaacggactccgtctcgaacggttacgttgggtcatattcaaccacaggctccgacttatcgtaccgtttattgtaatgatcgagaatctaatcaacccgtccggttcaaggtacaccggagttaattgatgtcgagtattgtttctgaatcgattaggggatatgtgcattggaatttgtgctgtttggattcatcgatctgattttttctcaattttttgtttagtctgatgaatgtttgattaattgtttcagggtaattcgatttctacaacaaagtataatgttttcacatttctgcccaagggtctgttttgacaggtaaatacgcttggtttatctttgttgcttggatctagactagtaaagggtttgtagtttagctccagcgtgttatttaggagttcgtcttttcggaacccgagaagttaaaaatgtgaaaa

SEQ ID NO: 27520 - DNA, 4228 bp, Arabidopsis thaliana landsberg
  unsure (1)..(4228): unsure at all n locations
gcacactcgggaagtagttttgtatcattgtcaccatgaccaagctggcctttctcgccatccccccatgttaatacttgcccgcgtgaagagccaacttctgcctcagatgcttcacttgtcacttctaccactgcagctgtatgccaaacgccacaagcaaccttcgttactattagtccaattaggctttcaacttcacgtggaacacttgtgcttctccggtctccatgacccagagcaccaaaagttccatctnnnnnnnnnnnnnnnnnncctgatgatgcaactactgctgtatgccagggaccgcaagcaacatatgatacatacagtccctgtaagtcaccagtcactctctttggaatccagcagctggattcattcccatgcccaagcaaatcaacattatgagtgccatcaccccaactgtaaagatcaccagattgagtaatagcgcatgtatggaagtctccgcaggctaaagatttgaaacccaatcctctgacactactaataaactttggtttttgggcgtctgtttctaagccatgtcctagctttccaccttttccctcaccccagctgaagatctctccttgtttagtaactaaaaccgcatgacatttaccacatgcaatgttttgggcatcaagtactattgttgattctaatgcttttggtaaaagagcatcctctgtcgtggagttcaatgaatttccagtaccgcaaagtacaccatcactaatagattcaccccagacgaaaacatcacctaaggcatcaaagtcttcgtgatatgaaccatggctagaggtgctcacagcgctagatagactgagccgaattgggtcattggtcgagaatcgtaaatttgaattttctacgtttgctggagtcggagaaaaaggacagaagaggttgccactggcttctgtttgattattgttactggggggtgcagttattgcaacaatgtcagaaaacacttttcccaaccgagtttgtgtagaagtctcattagagggttgaataacttgatcctgtggtaagataatgcaaagtataaggttttcgttcaaattcctaaaaacatgaaacgtggtgttactcacaagaattgttacaaatggagacactcttcgtgcatgaggggttggacattccgctgaagtgatctcaggtttaatagtggttttccatttggagacttttacccgagtaatcaatgacttcaaaccaacaacccaaacttctgcttcatctttgtctttacatatctgcccaaaacaccatcaacaagggcaagatgaatattcaacaattggtgaatggtatttctcattaaggtggcacgagaactcaccaaatccaacgacctgtcaggacatatgagggagaatgactgatactctttctcggggcgtggatatctcttaaatgtaggctgaaacaaactttagctgttgagtctaagatgagagtaagattaagtcgaaacaaatagaacggaagaaagaagcatgaccatcttacaaagttgcttagttgaaaacttgaaatggtatagaaacatatgtcagacactaacttataactaaggaactgtacttgtttatgagcatacatgaatattgcagagagaaactcaccgtgcgttgtccaggaacaattctcaggacttgactcagcttaatctgcttctcttctttgccagagtaccatactaatgcagactcgtcctatgacaaattcacatgtaatataattgagcaaaccaaaagaatacagaaagttctctctctctaaagagaaacataggagtccaagaaaaccttacacttgtgagctggaatggacaaaacttaggcttccctctacgtccatatttcaacaagtaagaccctttcttaagtgacgtaatggcctgaataggaaagacacacttcttaataccatacccactaaaaaggaatcacatcaaaagataacatttttaatgacttaggtgtagaaactgagttatataaacacatcaaactcaatgtgattcttcagagcaattgcgtattctaagcatatatgaacaaaagtttccatcttccaatgattcaacagaagaaaggtgataaaagagtaaagtacctgttcaacgtctctctcagagagactagttctcaaggaatcagccattgaagctgctgcaaagagctaattccctttcgaatcataattctcaaccaaatcgtttaacatcactcgaatctcgttccaatcatattcctaattcttatctaacccattctactacttttagcttcctccttcaaaatctaagatttcaaaatcccccaaactctcaactccaaaatgtacattaaccaaacaacaacaaaatccactctgaataatcctcagaaacaaacaatctatactccaattcttcttcaccaaatcgttgttcaccaatatttttcaaatcctcctgattttgataatcgaagacgaagcaaatcctaatcaatctgaaaaacctcaatgaaaaatctctatggttaatcaattgcgaaagaacagaatccagaaaatttcctcgccggacgtagaagcagtaccaccgtcgatcgccggcgatgattcgagaggctattcgtgatttgagaacctacgcttctgcttcgctcccgtttattcaaatttttatttcatcattcttagctcctttcaaaattcgcatatcattaataattatctaagcccggcccattttgttataagcccaactcgttaaatcattgaatagtctaatcatttaagtgcaaaactggacagagctgggcccacgaattttgacttaaagtttgcttacacacgcataggagagaaaatgtttatttgatttttcacaaaaataagcagttcctaaataagggcttacacataatccacgcaaattataaaaaccatagagacagacaatatattgtcacatagcaaacttataaactgaaagtagctaattaaaccggtttaagaacttattagtacctatagtcatcatcaaagatcatgtgattattgaatcctctactactcctacctctttcataactatccttctgcattcacaaaacacaacattcattaccaaatgtacattacatatgaatatgattatgtaaatgtcaacgtgaattttacttaccctaacgatcattcgctcaaacgcctcagtaccgtgttgttccatgtatttttcagcagcagtgagaatgtcgtcgtcgtcgcgtttagggaagaaattgaatttcttgtgaggaacataccaaattttggtggtagctctttgaggatctctgtagaatggtctaatgaaatgtttgtagatatgttctgctccattaaattgtggtaacactaaccaacagatcccaaacaacttcatgtatggccatattggaaaccttatgataacaaaaacaaaaactaatgatgaatacatgttaagaagatattaaaagtgttaatgaattcactaaccactcgagaggtttggagaaagttagttcaaagaaaaaaataagtgcgtaaagaacccagtaagtaagccattgttcatcttctggtaatgatcttgtctctattgctttcactgatgcatatctgttcatttttttcacaaacataattagttttctcagatttttttgtaataaataattgaatacatacaaaagtgtaatgcctcgtgtcttggattctaagtgggtgtgtgtggatatacgtgcatctatctaagtcaagattcgtactcttttttaattattccttaatgacagaggatcaaatgtttcaaaaggttaagtttttgattctttttccacaaaaatttctaatgttcatatgaatctgaactaaagattggcctaaaaatgtgagttttgcttacaataaaatctctatcaactgatgcaacagatttaacacacaaatgtatatatgagagagattggttttacttacagaggatagacgagtgtaaccaatgggctgcaaaagcaaaaatgttgtaagtttcaactttcaagattccgttcaaaaacaaaaactccaaaaaattagtactaatctaaagagggtttcattttcaagaatctaagtagacaatgtagctaaacccagttagcaataaaactaaagaaactagataggtcgtaattaacactca

SEQ ID NO: 27521 - DNA, 1452 bp, Arabidopsis thaliana landsberg
attattttaagtccaaaataaaaaatacaagaactttaataaagttttggaaaacgtttaaaaatcatgaaattaaactaaaactaaatagttagttcatttgtattaatttaaccataagtacatgtctttgtaatccttttatttatcaactccaccaaaaacaaaacgagtagtagtacgtcgttcattagcactattagaagcctttgaatcatattagcaaaaactgctatacgtcattttgtccaaagaggacgtttaccaaaagaaaatagataacactaaaattaggcatgtgataaacactccaacccccaaaatgtacaccgccctattctcaccaacctcttctgactcttctctcattttctgttgttcacaaataagttaacgtggtaccgaactaccgatttcctccactattttattgaatttctggtcaaaaaacttaagtgttacataacgaatctataaaaagaaccctcactttcaaggtttttgtcagcaaaacatttgtcttcgtgtttgaaagctagataaaagattcactaaatggccaccgcaagcaccgctgctactttcagaccctcctccgtttcagcttcttccgaattaacccatctgagatcaccctccaaactccccaaatttacgcctctgccatcggctcgctcacggtcctcttcttcgttctccgtctcctgcaccatcgctaaggacccagctgttgtcatggcggactcggagaagattaaggccgctggatctgatccgactatgtggcaacgacctgattcattcggtcgtttcgggaagtttggcggcaagtacgtccccgaaactctaatgcacgccctctctgaactcgaaacggctttctattcgctcgccaccgacgaagatttccaggtatgcctgctgattttgtttccatcttgttcatagtttttgaatcgattcgaaatgatttggctttgtgagtttctgattcaagcgttgtcattgccatggctagtgataaagtttaaaaaacggatttttttgttccaattctaaaaaataatctgccaaacaatgttaagccgtatgggacaaatcgatttgtttgcgatgtaggatgtaattctgggaaagtgttgtatttttccagaaatctggaaacgacattcatttcatattcttagtttcttcagcattacatgcttctgtgtgatgtaagttagaagtctttttggttagttcgattgttgggcaatgtctaactaatgtttgatgaatctgtagagagaattagcagagatcttgaaagactacgttggtcgggaaagtcctctttactttgcagagaggctcacggagcataaccgccgcgaaaacggtgaagggccgctcatatacctcaaaagggaagacttgaaccacaccggtgctcacaagatcaacaacgct

SEQ ID NO: 27522 - DNA, 1747 bp, Arabidopsis thaliana landsberg
tgaaattggtttgttttttaatctctcttaaattttcctgtaaatctccatgaatttcctttcacacatcatcccattttttcttcttctttcctggttttatggttctctctagaagttggatcagatgattcaaaatgatcctcaggggttcttacatttactttttgttgattatttttccccttccttgtaaaggtagaagaaaatctaatcccattgattctgacagaaacatttgtgtttgcttattgattcttttttttataaattgtttttttttatctcttttcgactatatatgattcacattgatttttgtaattttcactaatgtctttttatttattccccttcccccattctattattacatattttgttaaataattttaccatggttataaatcaagttcgtaatgtcacattaaaatcatatataccacaagcttatctataatattacatacaaaaaaaaaagaacaaccatcgaaaagttggtttctaaaaagctataaactttacgttgctgatcatatgtacaactttcctcaaacatttcctttagccgcaagataagattcatcatcacacagcagcttgtgttattgctcttgttcttgacccaaaaatccactcaccagcaaactccatccttgattgttaaggtctcaaacctttcttgacatctaaacaccttaattacgttggttcacgttgcctagccgcccaactcgaactcaaagctcgaagcctttggaaatactcccctaatgctaacaaacctctagccgcttgtcgcgtggttaagatccgatgcatctgttgcaatgtctcatgtctcagatgatcagcctacaacaacaaaacagtttaagaacaacaacaaactcaagaaactagttgttatccttcgttagtttttgtaaaaacatttctttcttacttgatttacaaagctgaccaaagcctccaatctctccatagcacaagtcatttgaggaatataacttccttcaccaagtttcccggctgctacactctctgctaatgtatgttgcagtttctccataccttgggataacgcatcttctgcttgttgacatgattgcctcagattacatacatccaaaagttgttgatccgtcaaaggatcaaaatgcggtaacagaacctaacacaaaaaaaaaaaatccatatccaaaatcattgcaaaaaaacccattacaatttatggattaatgacaggtttttctattaccttgagaagctctgagggtctaaatccgcctatccacaagaaaaaccgctctgctgaagttttccacattccggacatgacatagaaaacatcgatttttgcagcggctgacttcattcggaagagttgaaagtaatgtttcatggcattctcgactagagaacgaagctctatatcactaacttgtccatgtaaaaccgttcttagttcacatatttttcttttatgttctcccacccactggccatagggcatggcaaatagcgacaacccctaaccagaaaaagaaaactgacgaatctgaaaatcaaacggaaactacctaaacgctaaaggcgaaagaagactcaaacctgagctcatgttatctgagaaactaagagcatagggatcaactccgttccccacatagaaaccctgcaacattatgaacatagattataacatcaacaagatacgtaaggaagaataataccttgagcaaac

SEQ ID NO: 27523 - DNA, 1203 bp, Arabidopsis thaliana landsberg
tgccactcttcttcatcttcatcatcttcctctatcaccggctgccgaaaaaccctagttcattatatgggtcgatctccttttggtggtagaaccgagtgggtaatgcatgagtatcgcatcttcgacaacaatacttcactaagatcactaaacgtccacgtaacaacatcataacaccatccagatgaaaaaataaaaaacttgattcatagtttaccatttaccaattgatcattttcatttggtattcttccgctctttagggagacttcgcgctgtgtcgtgtgataaagaggaatgagcatacgcttaagaaatgtgaaattatctcaccagaggtttcagatgagtcattaagcaataatgttaacaatttttgtcaagcaagtgacctagaaaagggttcttgtgatgcaagtaacacacgtttgtcttctcctgatttcatccttgaatcatcttttcaggtttagctacttaaatccaaactctgcgaaagtcccattcgtttatcaatatcactgtgtctcaaacttcattacattgttttttgtagggaaattcacattcaaaaacagaagaagattccggtttccaagtatttacattacccgaattcgaatatccgctagaggtttttgcagatttgaatttcgatttggaaatggaggatccattcatgttcgattatcatccagagcctcatatgaacaatgaagtcatgagccatcacattcgtgggtaaagaaaaatattatagttcactagactgaatctcaaaaccaaacactcgagatggatcaagatctaactacaatcacatttattgaatatagatttgtttgtgtgtatagttgcatattataaaatgtaaagctacaagattctcttcagcatcaactagtagactagtagttatagatacactttttaaagactttttaggtctcaaaagtatgtataatcaatgttgtatatctactaattacataaataaaagtgacctataaattatcaggagacactttgttgagattggcttagttatttaatacaaggaagcaatataaggactacaaaagaccaatacatcatcaagactaaccttattttcatctccaaatatagattcttttccatctttcctcttagcatatgacaatcccaatcttgatttagccatcctcaaatcaccaatcc

SEQ ID NO: 27524 - DNA, 1794 bp, Arabidopsis thaliana landsberg
ctacttgaagcagcttactcctcgcatcttccttgactccttctcccgcccctcgcgacaggggatttcccttatttgactcgcctacaccaactcggaaaaattacaagtcaaatagcagagagagagcgagagagagagagagagagagcatgaaagttacacagaggagactgaatcttggaggaaaacgaggtggtggaaagagatagcttgcgcttgagatgagttaagctaagagagggaaaaagacgaccatttgacggaagctgaaatgtctttgaagctatgacgctcaggctgcttttaccaaaactctccagtccctcgcctcccttctccaccgcagattccaggacgtcgagtaagatataatgaattggacgtcgagtatgactttgaaaccaaggtacccaaatgtaacagaacaatgacatgtcggtgaagaatggactcgtttaatatcaggcttcaaatttaggcccataattacatgaaaaatagataaacggtgcgtttttaaatccatataactcctataaataaatttctaaacattatgacatctaagaccaaaacaagatagtgggggattgaattgatctttgtaatttttttaggtaatattaatggatagcaattttacactataattaagaaactaacgtttgtatcaattttctttgcaaactaactctttttcatgtgggggtacatgtaagatagatatcaaattgtgtttttagatcatagtaagtacaaaacaatagatcatagaattgtagtgataactaaaattacaattcaaaaagtggtgatgatggtaaatatggagggagaggtcacagtgaaagataaaaaaaagaaacaagtaccaaagttacaaatttggatggaggtggtgttgtcaagatttatgaatgcaataccggaagttacatatgagatatataaagaagacacatgtgctagtaattttaataaataacatgtaccaaataaaatgacacgatatgtgaaagaaaaacattgaaatagtttaaaatttgtgaaaattacaatatttttgaaaaatatagcttgtcaaaaagaataaaagaaaataattattaggttgtttagacgcaagtatatatattggccatgttttttaactagccgctgtgactatgtctgcgactatgtaaaacgacagtgacgggagccaagcagaaagtaaaacggcggttgttgcggcgactcctttaacagcaacgacgtcacctttcaacaaaagttggcgactctttttaataatttaaactccgtcgacgtctattttggagtcgcagaaagtgaccgctgtgaccacgtgccgaacatggtaattgtattatgtataatgatgtgataaaataaaatggtcattgtaaaagcatattttaaaagatgttttcccatttaccgtcaacctattccttatgtagtcttgaaagtgattaattttttagcacatcttgagtcatctcaaagtgaacactgtaatttgagggaggtgattttgacggttcttgtaaacttaaattataccatccaacactcttaaaaatttgagtcttcttaaaaaatttaaccataaaataaaccaaagtttagaatagttcgtaaatgaactaaatacattagaatggtttaactaaacggttacaaaaacttatagcctggacgcttcattgcttcagttttcttcaaaaaccagacgaaagcaaacctatccaatccctaaaccgtcacattttggcgccaattttcatc

SEQ ID NO: 27525 - DNA, 1316 bp, Arabidopsis thaliana landsberg
aactcagcatagttcaaaagggaccacattggtcatgtaaatataacatccataaaaacaaatttaagtctcatctattctcactttcccattcccgtgcagtgtgaattccccaaattaattccgacaataatgaattaataggtcacgtgcatttacatgaacatgatcagtcgaaatttaatacacattggctctttgtttcttcatgattcattataaatttaatttgttagcaacgtagaaatttccatagaactaaaaacgaaaacattacaaatccctccccaaaaaactgtatatttacatattcttaacaaagttattacttagttctattctccaccacccccaattcgaccgagcccgaaaaaaaaaacatccgtcttatgtataaataacatagatacatacacttagcatatagtagaaaatacaaaaaaaatagacccaaggaaaatcggactgacccttagatgattttgatgttcaaagaatctgctttggctctgtttctaactctcataattttccttcaggaacttcttttatactcatatcaaccatctctattgtactgaaccctccatcctctattgatccgatcgttgactgtgaatctatccctgacccggcttgtatctccttaaacatggccatgacttgtaccattgtcggtcgtctccaagcccgatcatccaaacacgcaaccgcaacttttaaatgttgtaaaagttcgatctctaatgctggatcttccttcataagctcggggtcaaacacatcgctaatccgcagttttgcgtgctgattcacccatccaacaaggttgttatctccaaaatccggtgaatccgatggccgtttacccgtgagtagctcgagtaagaccacaccgtaactataaacgtctccttttgttgaacacctgaaactttggtaatactctggaggaacgtaacccggtgtaccagctaatgtactgacgcttaaatgcgtatccatcgcactcatcagcctcgccatgccaaaatctgaaacccgagcttccaaattctcatcaagcaacacattactggatttcatgtctctgtggatgatatgcggactgcagttgtggtgaaggaaagcaagccctctagctgatcctatcgcaatcttccgccgtgtggaccagtttagtttcaccccagctttcttggggtcgtgcaaaacatcttctaaacttccatacttcataaactcatacacaagaagccgctcgtcttccaactttgcaataaccaagaagaggcacatgatttcgatgtttgatc

SEQ ID NO: 27526 - DNA, 1224 bp, Arabidopsis thaliana landsberg
gattgactttgagttggaggagccataggttgaccatactgattttgagtcggtggagccataggttgaccgtactgatactgaggtgcaggagccataggttgaccatactgattttgagttgggggagccataggttgccctaactgattctgaggtgggctgggaggatctgagttcagactgtctggtctttttaccctggattcaatacggggaaagataatcaatcagaatatgcagacagtttttgaaaggttgcagagagcattgtaacaaattaaaatgagaaagggcatatcatatatacctgccagggcagaagataattgcatattcagaagccttgcaggtgaaagtactggttccatcatcgaaggcatagctataagctctgggacaagctctcttgaagatggaagagtataaagacggtcggcatgtggtcgggttagcaaactgaccgctgcaacagtactggtccaacccaaaggcctcacaagcgctcttgcatgcaacaacccctcctctttcagcctcttcctctcccatcacttgaagctcctttggacagctaatattgatatcagcaacacatcctgtagcattacaagcgccaaccagtccaccacccgtcgggagagcaactatgggaaggttatacccatcaacgagactgacatcatagaaatctttgtcatcagaaccgtgaccgagtgtgatctcgaaaagagatgtcggcggagcagcgccattaccagcacactccagctttccgccgcagtctccagtcatacattttcccgcgccgttagcatcaaagttgcagccagtcctagcccaaatacgacctgaccagcctagagccgtgggaattctaacagactgtcccacatcaagcctgaaccctgtggtgggtagtggctgggtgccagagcctgcaagagttccaggccatatagtaaagggacagttatttgtgatgacgaacgtggaggaataagaaacagagaacagtagagaaacataaacaagaacagccataggaaccattggtgatctcccattatcgtataaacgtttaagatttctgaaatatggatttgctgggaagtccatggaccagggtttatacaaataacatgtagagggagagaaggatgcaatgtttaagcggtgaagttgctttagagacttcaagccccaagacaatatgttagggtt

SEQ ID NO: 27527 - DNA, 2354 bp, Arabidopsis thaliana landsberg
ataacatactatttttagcgtggttcatgtccctcaacattctgcctaaattataggatctcaagacatagtactatagagtacaactacaagtagaggaaaattttataagagagataaattatgcggtattcacgcatgacatgcgtaagcatgaaactaaaatttggttgatacattactatgccgaatttaaagtagtgctccatgcagacatgaacatatcagatatcacacgtacacatgtattacgtgtatgtagagacacacgtacgcatatctatattcacacaatgagatttcactttctcaaacaaagatcactgtcttcaattagtttcaaatttgttctttacctattgcttttacatttctgagtgtatatatttacaataaggacaaggagattttaaatgataaaagtcaaccatatcccatcatttggtctttggtttcccgacgtcccacttttgtaaaaatcatctgttcattttccattctttttctttttcctacccaactgtatatcaccaatgatatcattatatactaacactatcatttcacacttatcttcctctatatatacatagcttaagtcttgtaacgagaaaggcatgcatagcatttgctagttttaacatatagcaatgaaggttcatgagttttcgaatgggttttcttcatcgtgggatcaacatgactcgacatcatcccttagcctaagctgcaaacgcctccgtcctctcgcccctaagctctccggcagccctccctcccctccttcttcttcctccggcgtcacttcagccacttttgaccttaaaaacttcattagagctgatcaagtcggtccgacaaaatttgtgcgcgagcgagaccctcctcatcgagtcagttccattattgtacttcgtacattttacatcgtttctttcgtttgatgaaagaagaagtattccctgtagaagaattttgataagtgcggcatacttaatactttggcatttataaattatatcgactggagtggttcctttatattattaatcttatttattgattttaatgtatgattcctatcaaatgtaatgaaataatgtgtgggttcagttggagacgcacccgggagggacaaggtggaacccgactcaagaacagatagggatacttgagatgttgtacaaaggtggaatgcgtactcctaatgctcaacagattgagcatatcacactgcaactcggtaagtacgggaaaatcgaagggaaaaatgtgttctattggttccagaaccacaaagcccgcgagagacagaagcagaagaggaacaacctcatcagcctaagttgccaaagcagcttcacgaccactggtgtctttaatccgagtgtaactatgaagacaagaacatcatcgtcactagacattatggtaggaatttaaggattttgtatagttttgtggttttgatcaactatatttaaggataatttttatgattgtgtagagagaaccaatggtggagaaggaggagttagtggaagagaatgagtacaagaggacatgtaggagctggggatttgagaacttggagatagagaacaggagaaacaaaaatagtagtactatggcaactacttttaataaaatcattgacaatgtaaccctcgagctttttcctctccatcctgaagggagatgaagtcatgaaggtgaggcagaaaattgtggaattcttatgtagatctggtttaggttcagaggaatcaattggtatctagaaattcaaaataaaaataaaaataggaataagtctctaaaactacaaaatctacttaagaattcccttattaatctgcgagtttgatgtatcctatgtagattatttttgcgatgtaatcttaattatgaatgctcagtttagctcatccttttttcgcctttattcttgacaaattcactagtgatcagttgtactctcttctgatttggccatctaagtatttctctagatcgttggtatgtaggaatgtttcatttagagaaatttctgaataaagacacatttgatgttgttaaaataatatctctgtcttaattcctacgtacgtacaagagcaagaagttaaaaggaaataataatagcatttcccgttgaaaagggggtagacctagtatatttctataaacaaacattgaaatctaaaactttttgtactgttatatacttatattaaaactcttagtaaaacaggtgactcaataatatttatattaaatttttatttctgataaatatatactaaataagtttatgagatgattacaagaagaatcttttcaagaatttgata

SEQ ID NO: 27528 - DNA, 1141 bp, Arabidopsis thaliana landsberg
tgtttcaattttctgcaatgaacaagttcaagaaaatggctcttagagtaagttatctttttaactctaaacaagatccaaacgaaagaaactcagaagatagaaataagtttgtcctctttttctcaacttgttgtaggtcatagctgagagcttatctgaagaagaaatagccggtttaaaacaaatgttcaagatgatagacgcagacaatagtggtcagatcacttttgaagaactgaaagcaggactaaaacgagttggtgccaatctcaaagagtcagagattcttgatctaatgcaagctgtatgtcttttgctcttttcctttactatgaattccaaacttcaatcattcaaatcgagtttatagttccatgttttgcaataatcttttatgttttggtttgtctaattcaggctgatgtggacaatagcggaacgatagactacaaagagttcatagccgccacattgcatctaaacaaaatagagagagaggaccatttgttcgccgccttctcttactttgacaaggacgagagtggctttatcaccccggacgagcttcaacaagcttgcgaagagtttggtgttgaagatgcccgcatagaagaaatgatgcgcgatgttgatcaagacaaggtaaaaaagctcctttttacaccttctcatatcattctgaaactgcatcatattctcaacaatgaagagccactaataaacgcattatatcactcctaacaatggaatcacattgataagatatcttgagtattcatgcattgtagaaattttcaattccagttgattgatttaacgagctatcacatttttaaaactcgaaacattgttgttgcaggatggacgaatagactacaacgagtttgtggcaatgatgcagaaagggagcataatgggaggacctgtgaagatgggtttagagaacagcattagcatttctctgaaacattagttacaaacccaaatcaagaagtacttcgtctatttattttgttatgaatgatgatgatcatgattgtgtttatctcaacattttgatgagatttttgttcgttagactggtttaggtaaatctgtttctgtactatgtacttttatgcatatacacatagctttt

SEQ ID NO: 27529 - DNA, 713 bp, Arabidopsis thaliana landsberg
caaaaaccagacataatttttttctgtgatcaaataaaggtgaactactttgattagacatgtgaataaaagaagacatgccttggtcgtgataagcgggaaagtcttgcgcagaattgaccagcttctgtgaatgatcctaatcaagaacaaaggacaggcctgcctcgcttgatagaaaatatacgattggtttgtcatggtagctctcacaggtcagccaaatttagaaagagtactactgtcattcatgtctccactagatataatgtttcgtacatgattcaagtaaccagactcctcatgcctctcaaaaaccatcttaggcaaaaacgagtactccttcaaatctgactcagcaacacttttcttttcaccggagccaacaatggcatcttttcttcggacataagtgttgaaactataccgaattccattttccacaactggaaatgatgagtaccacggacggtacagagaagtatccactctcggtgcaaatgcgtcacatggcacgcttatatcgatttcggttaggtggagagcatcacagatggatgcattcatataattcctgtagagaaaccacaacaattaatcattctctcattcacagtactgaacttcaaacatctaacttaaggccttaaaagaacttcaatcattgtaccatcaatcaaatcaagacatcaaacctcaaggtctgaagtctc

SEQ ID NO: 27530 - DNA, 1573 bp, Arabidopsis thaliana landsberg
ccatctcttcctttcctgaatttcaaaccataaggctgctccacttcaatttcatatgtttcatacttctcttcttcttctccgtctcctcctgcttcagctttagctgaagactctgtctccgacgccttcaaagctaaattccggcgtttggcaacatgggtattgcataaagaagccgaattgctcgaaaggaagagacttttggcggaaatgaaactggattgagtgatcaaactagggttttgcttggtttgctgggttcttggcagtgaaggcgaagaatacagagatggataactgctcggagctaaagacatggtgagattctttttctttaagttcgagctcagacacaagccagagccagagagacagatgatgattagttgggatttgttagttgaagaagacgattatgtgactttggttggtttttcgcaaaagcttcaaagtttcggattacacaagtttgcatgattttagtggctatgcttcagtcttggtgtttcgccacgtgtcatattgtaatggtacctttagtttgatcctttttttcttcttcataaattcgcatctcccttcagttggattcgtttattacacaaacaattgagttttgactcaatatgaccagttctacaagaagacaaggcaacatgacagaagtggtaacgttcagagcaagtgtcattggctctctaaagaaacagaggagattctagtttcatgattcttatgtcgcccgcaaacaataactcaggaaagatactgagatccaaatcaagaatgaatcacctcttgctcctaacagattgagcggtgagttttggaacagatgagtcttaaaccagttcttgggtgctacaaacttctttcaattacatacttgtggaccacagatctattcacattcttgatggaattcactgagcctctggtaaagtggaagaaattgaaaacagaagtgctccaaagcctaagccttgagatatagtctgcactatcaaacttgctgtttttgcacccaaatatgatagtgataacatttgattcgagtttgacagaattatgctaacacaccaagagcaatatctatacagaaattcttactataaatgtaaacaatggctgcgtgaaagacaacaagcaatagttttctctcaaattgaagtaagctgtcacttagacattgatcaaacacactgatatcaaagtcatttgaactaaatcgcagaactagatatcgatgcatagcaattgttatatttgaaacttgctccacaatctgaatgagaaagaacttcattaaatgattgaagcaacgaatgaagttaaagacctatactttaaacacttctaaagaagaagaaaaagaatgcttccgtgttaaatcaggaatcatcatcatatggcttcaagcgtgcaaacttaagaatggctatagaacacaaatgcagattctatatgtacctccatgtatatggaatttaatgctgaagccatcaactttgtctttttgccttaaatctcccagttaaacttaagtggacggatcacaggataatacaaa

SEQ ID NO: 27531 - DNA, 2028 bp, Arabidopsis thaliana landsberg
ccatcactaacaaaagtaagtgcaaattccctatctatcaaattactagagaacttgaaacacctgcagtatttgaccaaaaaagggtattcgggacaccaagtcacaatatagtcatgaacgttgccatatgcaaataagatcttttatcaaaacatttatagcagggtagacgaagatatgactcacctagagaagtaatgtatgtcagtcccatttttgtgtatttgtatgcgatccccatcaaatttgcattcagcaactacatctttcccatgcagctgtgtcgaggaagagactcatgcattggttaatgaaataaaacaccaatacaacaacattaacaaacaaacaaaatactgcacatggaaatggagtaagctgacaatagagttgatggaatttaccttcttccaagcagcatttacgtcaccaatacgcatagctaactggggtcgtacggcttttacaacaactatatcctacaagagaagcacagtttttatgcttatcagtttaagatgatttcaataaatcgattgtatctcgaggaaatgaaacagtagtttgtaagttgtcattcaagaatttctaaatacaaaacctggcgcttgtgccgttggtgtcgatccctcaacttttcacagactagtttcaaatcacatgtgacattaaacaagtcctcagcatctggatggaactcctgaaaaatgctcttctcactcattcccagtttcaaatctgtaaaccatttcccaacaaaatcagattgatctcaataactttaaagaaaaaagatggaaactttatgtgaagaaactgcaaagttcctaccttttagaataatcctaatgacccacttcatctcctgagcatttgtcttctgaatcaatgtagaaagaaccaaagttttctccgctctagatcccaaaagaaaacaagataagagagtaaacagaaacaaaattgattctttatgattagagaagcacctgttctcacttgaagccaaacgatcaagcaaatcattcaattccttaatagtcaaaccgccagaagccattccttgtctacgttgcaatacctatgagcacaaaactgttcaaaaaccctaaatcccccaaaaaccaaaacccagaaagaaagtcaaacaaatcctaaaacctcagcagcaattaaggagaagtttccagcattggctccagctttagcagttcctcctttacgccaattgagaagacgaacagcatcaggagcatcacgcgagataccaagtgcgtcgatcagacacgtggcgagcactgactctttaaggccgtagctacctcgttctcgatcaagcgacggaatgattaaacggacggcgacgaagtagtcggagggtttgcagtaagtgtcgagaaacttgcggaatttggatcgtttctgagatgaggttttgcttttttgaatccagttaaagagagataccagtacgctgaatttgatctcctccgtcatcttactttgccggaattatagattcttccggagaagatggttaatcagggaaatagtgacggagaatcactgagcagcggcgtgaattgcttgccggagaaggaagtcgcgtttgaaaagttgcacggccggttttggtaagacctgccaagttacagtgactcggtcttctctcccagtaactatttattctatattacacatttgtcctgtaacttaattaatcaatcaattcagtccaatgtgtactatattaatttagaaaatcgtcaaagtggatttatgggctacaatttttttttgggctgcagtttacatttttagtagtattgacaaaattatgagatcatatcacacaagtgacaaactaggcccaaaagcagtttaaatacgaaatatattggctttgagggaggtaaattataaatatggttcagaattcagctttgaaatgaatagcaacaggtctacctaaatacgatacaaggttgaatcgcctctttctagaagtgatcattgtaccgagaa

SEQ ID NO: 27532 - DNA, 1323 bp, Arabidopsis thaliana landsberg
  unsure (1)..(1323): unsure at all n locations
acaaatgttagttataccctctggccaaaaagttagatagatgagttataagtgacatagtaaataaacaaaaatatataagtaaactaaatatctcaataagtatatcacggaaaaaagtaggattaaggatttgtaatagtaaattagtgatataaagcgttgaaatgaaaacaaaacagatggaagtatccaataaaaacgtggactggtaggaatgaattgtcaaaattaaatcatataacgtgtagctagtatgggtccccgtcgtgtcctcctatccagtcgtcgaaggtgtctgtctttaaaacatcgccgatcgatagttatgagtctgagtttcttctgaggaaacgggacgtcgtttgcgtagtttgtaactatgaaattgaaaatagtaaaacacgaatacataaaagaagctaaaacattttttttatcatatctataatctatagtagtagtatttctattactcggttaaacgacacttgaaagtcgaaactttgatttgtttgaggttgtgtcagagagagaaaggaagagagacgtccgtctcttattagatgctcatttactccaaagtctgaagtttgatttatttgaggatggatgcatagcatttgcatggattaaatgattgtttttggcacgtggagtcgtggacaacaacacctncacaattcaccctccacaactgtatatacgtatgtttttttactacagatttgtatttttctttgtaatttacagcaacgaaattctttgggcgtaactatttttccactaggtgaaataaaactagagattttttaacagaaagtagtgatgtttttctaaaatatatcgttttccgtgtctaacttacatgattacatcatttttgcatgatgtttacatacatcatttttgcatatgagtgatattcataagcaacgaaacgcataattcattaaaagatgatcaatatcataacatacatttatctcgaaatatagtatagatgtatcatgtactgtacaaaatagaagtttcaatttgtatactttccaagtataaattaaaaaagggttaatcattcgcaataataaattcgtaacttgttaatctctaattgacgtgaaacttcacttaaaattaatcagaagtaacacttagtatttaaaaattgcacgttgttaattcccttaaacaaacaaaacgacgcttttactttctaaaatgtttccacaaatgagtgtatatatacacttttctattacgttgtcccaatatacacgtctagacctacttaaccctttcttttctctcttctctctttct

SEQ ID NO: 27533 - DNA, 2545 bp, Arabidopsis thaliana landsberg
accgctgagaaacaacaaaaggaggtaatatctctctcataaccaaaccaaacatggaggtttactctaacaatctctgcgtactctaatgctttctttatggttttcagatttccaagtctggtgcaagacctttagagaagacacgcttgcagaagaacccaaaggtttactaagtttttcactttttgaatcccggaagatatattctggtctcattgctttcttttgtttaacaggcaggagtgattgatgccaaaacgcggagggactctcttaatccgaaagcaaaacctgtgcagggttctcttccaatgcggaccgtatcgaaaagctctttagacaaagtgttatgatagttatatccatccggtattaatctgatcttctggcaaagatcgccaccaatgttgttccatcagtcttggggtatagagccaatgatcttgtattcttgttgttatatagaaaagtctctagttaccagtatttagtcgtggaaggagtaataagagtaataagagatagttatattttacagtttcctatgtatgtgtatagaacccaatgataatgttgttctgataatagaagtggattgattcaatcttgttaatgttcagcagataatttagtcagttattctacaacccccctagatccaattgtagattcagtttcttctgatgatgttatagtgttaccatcatgggtttgatcttctcccatgattatgtggtttgagttggctccatttatttttggagatttcaccatgccaagcaaattgtgagaaaactgagccacattgtctaagaattgaatgatgctcgacacgtttgatctgaaagctgcaaccaaatgcaaacaaaggaagccacgcaaaactactgccagctgctcctctgggtacctaggcttgagcctctcatcaagcaacctgcagtatgtatcctttcacttaacagtctagcacccaatcaataagaactgttccattggcaatgatgtcttggctatatcagtcttcgacctagtctccagaatgaaaacaccaaatgtgatttcatcagagcttgtgctttcttgctgtttttgagagctttagtgatatatatccaaatgtacctgtacagaaaagtaagtagaggtggtttagacacacgagtagcatgtagtagcattaagctgttcttggagctacgtagagtttcagctgtcaagagagatgcttttgaaagtagcatcatctttgaagtaaccaaagcccatatctctgatattaagctatttatgttaataccaacatggtttgtgtcatcaactaatttggttttggaatatgtgaagaccaagaagtgtggtcgtagggaaaagtaaaggagaaagataagtccattccatctggtgagtccttgaaccagaaggtgaagttgtaaaacacttgaccagctagctgtgaatatggtggactcgtcaagcagaataagccatcgtggttaagatctgcaccaccctctgagtactaatgttgttgaaccatagaaaatcagcagaatattttttgcttttcttgttttgttctttcctgatgtaaatattggttgcgacttgttagaatgacttcttctttttttactgtaccaaacaatattcaaatcaacaacctttctttgtctattcaaagtcttgacttcgtggtctgtctttatcaagtctaaaactaaaaattcaggaatttacgacatggcaagaaatgaaaaacaatagaataatcattagcaatcttgacctagactgcttctgagaaatttgtaaaagggctgaatttgtttcatccatcagattttaggttggtgaaaatgtaaccaaagatcctaaaactgattcataatatgaattagtgcaaattgcaatactctgttcttatgaacactatgcagaaaaatacctcggagtctcggactatcaaatcttattaacacttcaaaaagttttttttgtaggaaaaaaatataatcaaataccccaaacgattctattatttacaaccaagcaaatcatttctcctctaaacaatatgatcatcaagattaaaaatggtctttgcaaactcacatatcggaatccgacccaccagaatcactccaagttctgtccgacatgaaattcggaggaaaaccgggatttcaccgcattccgctgcgaagaaggcgatatcggactaccaaccttcctcctctgcatattcctcattatatctaagcaaactttatcaaccatggcaagaaaatctttaacgataacaaataaatgaagtggattcttcccctttgtaacagctcctgcttgataataatccgttgtacgtttcacaagctccatcactttcctctcttcacctttcgctattttcacctcttcctctaccgaatcaagaaacgtcatcatcttcttcacaaacctccctccttcttcatcttcacattctccaatcaccgttttcgcgtctttcgccctaaccgcaagagcagagcaagttgca

SEQ ID NO: 27534 - DNA, 1741 bp, Arabidopsis thaliana landsberg
cacaaattcgggataaatttaattgatagctacgttaacgatatgagatcaaatctgtgattattggaaatcggaagacaaaatcttattcttgactgtaagtaatttagatgctaaccataaatagtctatgtctcttattatccaatgtacgaatgtttcggttgattcagttaattaatcagggtaaaaactgctttgttacccttttgatcatcgtaaaaaacttgttaatctatttttgtggtatgtacactgattattcttaattgggcctttgattaatgtgaaaagacaatacaacgagtcaatgacaatggatctaaaaaaaaaaaaaaaaaaaaaaggatttaaaagagattgactgatatcaattaaagagtatttaatacaccatgtggttgctattatttagacttggcaatttttgatacatctaaatcttcaaaagaaggacttatttactctacttgtgatgcattaattatttttagatggaacattgaagtgagaaggcaaaactatggtttgtatttaaagatgacatttactttatatttttacttattttattttaataaatattataaaaaaatattttaaaatttttggagcgttacactgatatgataacatgtttcatctaaattgtggtggtgcgtactaaaatttcaggctctacaagatcatatccggatataaaatttcatttaaatatattttagaaattaaaaattaaaataataatttatgtagagctgcaattgttaattatttataaataaacctaaagttgtaattattcgtgaaaaaaactaaaatattgcaatgagtcaactaaattgttattaccgtttatgaaaaattacaataaaaagataaaactgtagaagatattaatttggattgcaactttctatttaaaaaaaaaacgtaatttttttttgccaaaaaaagacacaattgttcacaattgcaaaaagcatttattcgaccttttattatcatatagatttattttttgttttagaaaaatgatatggtaaacaatatttttttttaaatgaataagcagaataatatggtaccattaaaattataaaatctcgaagttaaaagttttttttttttttagagattgattatgattgaagtcttagtatataaacaagcatacatacaaagttgaaatgttcatctttataactgatggaaaccaatggaaagggatatgtatggactaagaaaagagtgatcttccaagattcgacgaaaatgctggactgatcgatctacgccttggatggattggtcccttggttgatgcttctcctctcgaacattcttgatccggacaagcctaataacgctagaaaacattaaaaccccgcataagtgccttgaacatgtacaaaactcaagaaatgaccaaaaaaaacataaaaggcggactacggtacgattggtgaagtttgtccaagtgtgtgaagtctaagtctggtaacggctctatctagtctgcaagaatttattggagtgttatctctcctccatgcctgatggacgccttctctctccttcatgcaactcatctccttttgtaacagctagattttagtcctctatttattttacatcttctcgtacatttcagatctaagagaacatacagattcttttctgtgtttcattactgctctctattatatactctctcccggtaatactattataatctttc

SEQ ID NO: 27535 - DNA, 2313 bp, Arabidopsis thaliana landsberg
agttttattttgtaagtgtgttatgttttatgtgttgcacatgagcacatccttgatcgaagtatttaaaatttgttattaaagaaatgtgtaaatttatagggatgataagtgattgtgattgagattggtcatgacgaggaacatacgtaattgacgtcgtatttgtgttaagcttgcatcatgaagtgaagtacgtcgacgttattaataattatgatcatttagtactacttacgtactatggtaccctaactgccatttcatttgtcttttaacatttttacctaagtgacggtcatgtgaattgtctagtagactagtactgactcctcttttggctttctctatagacaaccttgaatttaattttaatttatgttaattacgtcttcattatcaaaccaaaaacttagaagatttctaagttttgtggagacttgcaattagggctcagctggtcatgttgttagagcgacataaaatgagatgaattttattagtttgttggattctacaaagatattgtactacctaccatttgcattgaaaagaatatcccaaaagagacttttggttttactttagggatctctttttattttattttatttttttataaagaagagagtattgggaaatctttaaaggcccaaaccaaagctcagccatatttctacagttaagcccagccatttttttaccaaagaatgctaatatcatttttcagcaagattttattgaatcattcaactctctaattattgattagtcgcggtattaaaattgtgcttccccttttggaaaaaaatagagtaactgttcaaatccttatcatcctgattcaggatattaaaccttaaatattgtttgtcaaactcaacttctatcaatcattttttatattgttttaatgttaaacaactgtccatctatcttatcaacaagaagaagaatttctagccagacttataaacttgcacgacaagacattgatccttttttaattaatgaacaagagtaacgacttttacacttctcttgtcacaaattattgaacagtatttacaagtattttataaattttctattggttgatatttttattggtgcatgtcaagatatttctggcaacaatcattagaacgcgaccataacatgtgctgcaatttgacaattctttatatctaaaaaatgacaatttgacctcgttggaatcttggatttgtttctcccaagcacaatatgttcgagctatcgtaccatttctgaaagtgtaattataaagactgcaatcatatatgggctcgtggagctaaatcatggcctaaaggttttttttaatcaaatggattttgaacttgtggtaaagttttcggatctacgaaaaattatgcattcttaattaaacctctaattcgataagacaattgttttccaacaaagaatgtgtcaaaactcaaaaactcttaacaattgttttgaatgttttccaataataccacatcggtttatgtatcaattaatattccaaaagttgatactcccaacgatattcctatgacctagaatttgatccatatctcaaaattttacgaccgacaaatatattaatgttcttttattttattttatatagattaatggtttagtcatctacatgtattcattaatacacctatatactgtaatattttcacgaaacttttaaacatttacaaaaaatgaagagattaactttgaaacggaagagtgttaattacttaattatgtatgttttgtttgtttgtcaacgaagagtattatttttttatatacggatatgaagacaaaacatataattccatgtcacctcgtaatctcgtatgttgtaaaaaaaatatctctatccaatagtatttcactacctagtttaaatcgcattctctataatacgttaccatattccccaaattacccttagctatgaccatagtcgctggctcgctgcaaaaagtgaaaggggtatttaggtaaaaaaggataaattaacagagagaggaagggctttggcgtggaagctcagcttttctccgagtcgggaaaatgtctttttctcgaaagaataaatctttttctcttctctctgtgttaccctcttgaaattttccgcgaaaaatctcaacttttccatctgaaaaccccccaaaatcaaacaattggatcttcatttttagctgtgatttagtgattaagaggaataaggtttgtggcgaaatgttggtacagagaagagtaatgagttgcagaagagtctgaaatgattcaacggcg

SEQ ID NO: 27536 - DNA, 904 bp, Arabidopsis thaliana landsberg
taatatcattcaggtacattaaaatgagaagctagatatgaatagatgaaaaaagtcgagtcgaccaaagcaagacgtttgtacatggaaagatatttctctagatatcatcctttaaatcatattatcaaaagataggtacgtagagttgtacggtccgataacactaccttttgtttaattttaaagtcgataacaatctcaacatttaaatgatattttggaagttctaaagttcacaattgaaacatatttttttgcatatttttaactttttttcgattcctcatatatttttttcattggtgagaaatgggaactgagatcttcaataaattaaaatttaaactttaaagagaaaattaattaattaaagttggacagagaaatatttaaccgggtgtgcgtgtcttcgatttagcagaccggtttagggatactggtttaaagcgttgcaaacaaatccagtcaatttcaaagttatcttcttcttcgcgatcacaatctctgcatagatttcttcttcttcttcagaattcagatcagatctccggcgataatctttgagatctgaaatttcttacaatcaggagagaaagatgtacggattcgaggcgcttacgttcaatatccatggcggatacttggaggcgatcgtcagaggccaccgtgctgggcttctcaccaccgccgattacaacaatctatgtcagtgtgagaacctagacgatatcaagatgcatctctctgccaccaaatacggtccttacctccaaaacggtgcgttatgatgatgattcctgattgtctctcacaattttgactcagttttgataatttgacttcgattctgggttttaggcatttgaaactctcccaaatcaccaatttaatctgcgaattg

SEQ ID NO: 27537 - DNA, 1350 bp, Arabidopsis thaliana landsberg
acctccccctgttaacacccaatcattttacagcacctttaaaaaataaacattcgctttctttttgtttcttgtagcattataaataaattcaataacattatcaacaaattattgtggaattttgcagacaaagcatatgctattgtgtctactccatttccacttttcacttatcctcagtcacataattaaattcgtgaaaacgaaggattatctactgttcgtatattgatctagaaaatttggagttcatttgtggatgtggtggagacgtggagtgatgttactaattcactcaaacataaccattatttatttttctctatccaattacgaccacatatttttaaagtacgtaatacgtataatatcataattcatgagaagcctatacatataaataaataattatgatggaatatatatatgtatgtatgtgactaacacatatatagacgtaaactatatagaggtgtttgagtaataatcattttggattcgaaggaggaggaagttgttgttgcatttgctgatataatgtagccatcctgctatacgcttccatcgtcgttggctgcaattccaaatatataaaaatataaatggtactgaagcattgtttagacccaagttgtatatctatatatagaaaaagggtcaacctgagtagagcatgcaagaaaggcagacataggatcggggatgagaggagactgaaatcgagagtcattggaagaagcatcccacgatggacaattcatgggcaaaaatgggaatggcatcatgttggcatggatattaggagcgcttgcagcagctcggttcatacgaattaaggtcgaggagaccgagaccgggcatccccatgcccatccctaaacccatgggattggacatgagagacatttgtagttgttgttgttgctgcatggccataggaagcatcatagaaggcatattcattctgctcatcatgctcacttgtgcttgaagttgcttcaaatactctatcacttcatccaacatagatgctttatccgtctatagttccaaaattaacgatttatatatcaagcctctttggtatctactataattaaccaaaccaatgttacggagcatgtgtgtaatgtagattgtgttgatttttgagtcgacagccacaaggcatataataattaaaggtgtatatgaatggaccaaccggaccaagtaataaagtgatgtaaaataagtttttaggggacaagcaaataagagattgatgaacataagtgtgtggagtagaatcatcgtatgaggtccatttctttagatgcattcacttcactttggtccacacccttt

SEQ ID NO: 27538 - DNA, 3216 bp, Arabidopsis thaliana landsberg
atatgcaccactcatgcaataaacaacctcgagcaacatttcaacttcttcaacatcattttggtcgttcccactaatcgtggctaccaaatgactctttgctctggaaatcttagcacctattgttggggacgtaggatacgaattaatttgttcatcagaatcgctaactggtgaagatgtagtcgcaatcttccttgaaaggcagagatcacccagatcatcgtcatcctctaaccacagttgaagctcatcctttacctgaaatgcttattattttcatgcatttggtttatcaccaaaaaaagtgcatcaagtaatgtgagaaactaaacaatacgtgtttgaattcgtagatcttccgaattgacaatattcttacaagacttaaatcttgcatttttcagtttggattgacgctataattttgatgaagataagagatatttgttttgagaattaactttaacacatatagggtttgataacacttttttgttgttgttgtttatgtgaggattttacaagcgaattctatgatggattttaaacgctagcaaccgcgaccacccggaaacatagcttctacggatgatagcgggaaaccaaatgaagctactcactttgagcgataattaattgtcacgaggcttttgcttatttcatagataaatatcctctcaaggcaaatatcttgagtgtctaccatgctatcgaaattagaaaacgaatatcacatgcttactttttggacccgaactgtcaacttggtcatggaaatcttccatttatgcaccttgccgaagttacggttacttatctacaaaaatgatattgttctcatcatcatatgaaaattgaaacgcaattggaaatgtatgagtgacgggctgagatagctaccttggaagcaagttcattcaaagcaggataaccagacttctctagttctgttgttcttgcagctaagaaactacatatggcttccaaagccacttctagtgcccgaaattcaaacggagattctatatagtatcaagcaatcatattaataccaaaagtaaaaagagtgacaagtttttcttacgatatttatagaacataggtatcaaaaagatcaagaattattcaagaattgagttctaaaaatgactaagggcaagggctaccatcttcttcaaccacatcaccatgtaattgaccaccgtgtgccttgtttccaacagataagcgtgtctgaaactcctccagggttggaataagattttcatctgacgaatcctgaattaaaacctgtaaacatttgaaataactaacccaatccatcatcacttctgaaggagagaaaaagcttcaactattacataagatcagctagcatgatgaaacctgtttaaagttaagcacactgacacctaatgctctaagcagtctataatgcaaacaagatcaaaaccccaccgagattatgaccaatttaacacagtagctatgagccaaatctaacaagtttaatgtttgcccaagtcaatcaaagtacactgagactgacctctttggcagtgatgatcgccttgatatgctacaaaggaccgaaacacacaggaactaatcaaacatgattaaccaacaaagctgtgaaaactatgaaaaacagaggagaaacacaaaagtctcaagtcccaacctctaagttaagaacaatggctctttctcgacccagaatagcagaagggtaaaagagatttgggtcaagtatccggagatcgcgagcgtggatctgaacacggtgcataatcacatatttgtcaacgtcaagcaccgttttttttcccgtcgcgtctatggaaatccaactccacgatgactggggtgtaatcctcttcaccggaacaagttcttcgttaggcaacatcttcgactcttcactgcttaaacccgatatctaaaagcaccttttgtcccagttgaattaagaaaagcggaatttccgttatctgctccttttgttcttcatataactcctctaaagtcgtcggtcttattttaatgggttattcaaaatctgacgagggagacaagaaccattttcatattaggatttcgaggttcacactatagtatatgttcgttttttaatcaatacatttgaatgctttgctttttgttaattttcatccttaactatctttgacttacaaagatttttgtactgaggtttgatggagtcgaagcatccttcacaattactaacaactgatattaagcatcctttaaaacattttttaaaaaaacatatatatgctattatatgctattatcttcatataagtttggtcgataatttgtaatcgtgggacaatgaaacttctccaatatcccacatcggtttctctactcataatttgtcttgtttatatatctcattaaatcaacttcttaacgtcgagctatgtaacgagagcttgtaacccaagtggggactataagatggtggaacactggatcggcccacgggtcggatttgttgttggcataggtctggactgcccaatccaagctgtgagtgaaccgtatgaaccaagcgaaggtttggtccgtacggttgctaaaggttgagggtattgcgttaggctggcttcacagagcagcgactacctcccgctctcagcagtggacggacaacggttcgacgccacacaaatccactatggcgtgatggtccgatctcatatgaaccaccatttttttccttcttttgattttgttttccaaaactttctacgctttttgtttatactttaagagggaacaaaagcaaactttgaacaaagcaagagactgaagagttttatttatagcttttgttctatgtatggaaatatgcaagttttatgctactcaaagaactgtgacttaagagccacgagtaagatgtgtaggaatgatcgtaattgtatcgttgtgatcaacaccaaccacccagaatgactgattctctttcaatactctgtttttgtgtataagaatatacccttcttgaggcagcttttactcaccttcctcttcaatcttcatcaactcgtttctcagttctttcacgttatcgttcattagttgcagagtgttttgacgcaattagtgttttgattgtttttttggttaagttcttgagtaaagcaagagactttgctgtctttctgacacctgttttat

SEQ ID NO: 27539 - DNA, 1884 bp, Arabidopsis thaliana landsberg
  unsure (1)..(1884): unsure at all n locations
cggattgatgagattttgactcgaaagtttcttagattttctggtggtggcttgatttgttttatcccagtttatcaggttgcttaagaataagattccaaagtatgatcaactctccaacaaccggctctgcattattagatcccattttaaaaaacctgataaactgggatctaacaatgcagagccggttgttggagagttggtcataccttgaagagtgtggtgggtctggtgcatcggcggcgtgatcgaccgaggaaatttgaatctcctatcgtagatcgcatacctgagatgcacaaagctgttctctttgaatccgctaaaaactatgtctgactcttttgccttcagtcatcaccaaattccgattctcgagccgtcgtcgtcatgaattttttcttttaccttatttggtaactgttgtcttgaatattgacccaaaaatccaaatctgattagattttaataaaaattaaaaatatatattattctaaagtttttactaaattgatattaataagtcagagataataatggtagaatctgattgtgaagttttaaagtcatcatggtcgaataaaaaacactttcgtgtagttgtaatcattcattaactaaactcgtaagaaatataacacttataaacttacaaatccacgataagaattttcagttttggggcctaaaaaatccacgagaagacaaaaaagggtaatttgaaaattttcagatagaaacagtcccgtcaccggcgacgatgaaatggttactcgtcgccgtattgaccgcttttacgatcttctccgccttaacacagtcccatctcctccatggatctccggtcaattctctctgcgctgatctcattcatcccgctaattactcctgcactgaacacactgtaaaaaatctcatcttttattaccactctttcttaaaattaagatttcattgaatcattcgtagaaaaatctcaactttatttggttttgtagattcaaacaaaggatggttacatattagctcttcaacgtgtagcttctcttggtccaagacttcaatctggtccacctgttttgcttcagcacggtctctttatggtatatcttgtttaaaggctttaacttttcttggtgaaattggtttaaaattgctaaaaatcgtatcttttttggtgggtttgttttgattattaggctggagatgtgtggttcttgaattcaccaaaagagtcactaggtttcattcttgctgatcatgggtttgatgtttgggttggaaatgttcgtggtacacgttacagttatggacatgtaactttgtttgaaactgataaggtatgcagagacttctcttgtctttgttcctcttttatgtatgagcttcacctggaaatgtacatcttaggtttggtacaccatcaaattatgtatttctctgctttcacttttttgatgttgaggaatagtttaagaatatggccattgtttatgaggcttaatggtgattccttatacctgatttgatgttaatgaaagtgannnnnnnnnnnnnnnnnnngagatgtggatattgtagttgacattataagaatgtggccatagttaagaaaagtaatgcttaattgcttatatatatgcaggagttttgggactggagttgggaacgatttggcaatgtatgacttggcannnnnnnnnnnnnnnnnntattcaatttcaaactccaaaattttccttgttggacattctcaggttaatattctcttttaatcatatcaagtacccttttattgagatttaatatgctaactccttttaatctgtttggtaggggactatcaaggattttgctgctctcactcaaccacatgttgcg

SEQ ID NO: 27540 - DNA, 975 bp, Arabidopsis thaliana landsberg
agcaacgagatgtaccttaagcattgatgaacagaaaggtattcaaatacttatcaaactgtttctttttctgtttttaacaatttggataaccactgatttaaccgttctttggtttcttttcagtcgatatctcttgatatgggtgctctcattgctggagcaaagtatcggggagaattcgaagacagactaaaagctgtgcttaaggaagtcacagactcagaaggccaaatcattttgttcatcgatgagatccatacagttgttggttcaggtatgcaaatttcctttgattgtttggaaacggtttatacattttcttgcaatgatttgtaattgattcttttgctttcaggtgcgactaatggggccatggatgctggtaatctgctgaaaccgatgctgggccgaggcgagttacgttgtatcggtgcaaccacgcttgatgaatataggaaatacatagagaaagatccagccttggagcgtaggtttcaacaggtttatgttgatcaacctacggttgaagacacgatttctattctccgtggtttgcgggaaaggtatgaactacatcatggagttcgcatctcagatagtgctctagtggaagctgctatcctctcagaccgttacatcagtggccggtttctacccgataaaggtttatactttgctattcccattttattatattatcttcattaatagacagtgttactaactgatttggtaattggtgttctagcaattgacttggtcgatgaagcggcagccaaattgaaaatggaaatcacttcgaaacctacagctcttgacgagcttgaccgttcagtaataaagcttgaaatggagaggctttcacttaccaatgatacagacaaagcttctagagagagattgaatcgaattgaaactgagttagtgctattaaaggagaaacaagctgagttaactgacagtgggagcacg

SEQ ID NO: 27541 - DNA, 1934 bp, Arabidopsis thaliana landsberg
aagagccccaaactccaaaaatatacaaaaatcccacttgtttgaattacgaaacaaaccctttattttaatataaaaaatgctccaaattcggaagcatagatacgtaatgacttcatcacacacacaccaccaactatgcatataaatggtcatctttctattcaaaccaaaaaataaaattaatcatcttactatataattataacaatatagcaaaattagtataaaatattgtcgaaatttttaacaatagtctttagaattgatcatgatgattcatacaatgtaatcctgactatagaaacaaatttggggttattcaaagacattaagtagggcatgtacgatttaggaaaattactaagtatgggacttgaatggtaaatgtcgcaaaaaaaagagttatcagaatgagctctttcgtctgcatccaaaggctttgcctttaatcagagcttcggtcacggtttcctgaaataattacgatcacataaacacacacaaaagccccaaaaagctcgagaaaagagagaactctgaagaactaactatagagagagaaagagaaaaagttagcagctttgttgcggtgcaaagaagcaaatctgacagttcgcagaaacaagagaagggggcaaggaatcgaagatttggtgcttctttctgaggaagcaaagtaaatgctgctattcaaagttttacattttcttcactgaggagagaggagaaattggaaatggaatcgatctcacttgggtctctgctcttttgatctgtagtacggaattaagcttcttccttttgttctcaattttcggcctttgaggacctgggtttgatccttgaggctgagatctttcttttttctgaagaagcttctggttaattttggtaaagtttcaagcttttgcaaatgggttgaatttggttagctccaattgcagtttgagcaagtaattgaaggattggagttagggtttctataaattttactctgttactggatttgttattcaattgtgaagaaaattagggtctttaggtcatgtttctgggttttttctctgtgttgagatttgactttctgtcttcaattatcccttagcaaaatgactattgcttcttttcaggtggttcagtttaagaccgttgagctttagagatatatgtttggattcatatgtgattgcataagacgttcctattggccagaattgaattgtggtctaccgggatagtgttttgttgagtcttcagtagttaggacagtagagatgcctccttccccggcattgagatgctctcctgggagggaacttcctgggaagaaacacagacgaggacacagcattgaatatgggattctattcagagataaagacgatgatcttgccttgtttagtgagatgcaagacaaagaaagagatagtttcttgcttcagtcatctgatgatcttgaagatgtattttgtaagtgtttgtttttactggctgtgttgtttagtggaatgactggacttaaagagatagtttattgcttcattcatctgactgtcaccatgatccttaacctttttccttttattttggacatttatcttcagctacaaaattgaagcacttttcggagttcaccattcctgttcaaggagagagtagcagattgctgactgcagagggagataagaatgactatgattggtacctttcatatttaacttggattgtttcttattttctttctgggtcattggtacaactaatccgtaagcccaatcgagattgaatttaaattggatatcttccttactttttagtaattctcaaagacgtttgcttctccagcttctgattccataaactttttgttggcattactgtaacttttttctgtcacaaatgagtatgctcttttggatgcctaaattttt

SEQ ID NO: 27542 - DNA, 1728 bp, Arabidopsis thaliana landsberg
gcaccaaacccaactagtagtcatcatatccagaaaacccaacgtgtattttcgctcattaaatccccaacttttaatatactcccttcgataaatactgaatttatatttatcgtattgatttgttcagtttcataggcaatgagccaatgactcgaaagtcagataatttatgaattgtagaaattgttgataataggactaaatttttaaaaatctacagcggcagtttataattgacaatcatgtttttcatttgaaatatggacagtcatctgagaatgtttttgtgttcaatcagcacaaatatacaaattttaatctataatttcgaaaattaaattaggacgctttgatttggtattttttcctagttaatctttgcaggcggtggtttccttgacctttttattatacacatgattatgccgacattaataaaaaaagagagaatatgttcttattacggtgaatttactcattgaaactatgacttcaaaaatataatattataataagttatagtatatatgttcttattacttatggtatatataaaagttaacattgatatttaactctgtttaaatataagtataatttgatcattgtgttttgacataatatttttctccattgatatgaattctaaaataataaacatatatttatttatataccaataataaaattgaagattacgtcacactaccaccaattggttgataatttacactattttattccttcagcttaactggtaaggttaagaaacacaccacaaatggttgctaaactcttagggtcgtttgataaatgtctaatcaagctacaaagtacgatcacatatataatttagattatatattatccattaaaccacacccaaataaatatcggaacagagaactcattgaaccacacccataggcatagctatgtactgcatatcaatttatgtgatcgaatttatcatttactctcgtatataaaccttcatagaaacttaaaatttcaagtttaacaaaatgaacattaacatacaaattcttttgaggttttcattagggattcctttcagtaggataataaaattaaatagtaataaaattttaaaagggacatattttcaacaatatgggtccacataacacgaagaggagccaaaccttttaacacttttgagtggtatattttccttcaaacgttttttctgccacacgactctttattttctttccaaaagaggttattttcaaaaggtagatgaaggtcatgtggctatcgaacccatttttttctggtggttggctaaggaaccctttatgttgactatactgacatagtcctatggaatggacaaggaaaaaataaactaaccctcatatggaacataaaattattcgacagacgcgtcaccctatggatctaaaatttaaggttaggatctaaaatctaaaatatgaaaatttgtggaaaattccataaccattccaataaagtaattgttacatatagcaatattttattaattaaaatacaggctttatttgacactaagaagaaaaatactatttagctcatcttgaattatatatataaattgcttattaccctgaatctcatacagatatgagatatgatttaagatattttctgagcgatttctaattgtggggccttttcaccatgtaaggaatttgcttagagcttacaagcctgttctac

SEQ ID NO: 27543 - DNA, 1293 bp, Arabidopsis thaliana landsberg
ctgatcgggcacatgtgtctcgtgcattgcactaatggtggtaaaaccgttcctttctttgttggtggtgacacaaccgaggctaagtgtggtgtgtccgggctgcaaatacataaaaagtgtgggactttatgattgaaaactgaacagagaacaagaggaggaaactgaatattgatttgaactacttactcgaggcaggcaccggattctgttctgttgttttgacatccgcaagcacaagttggacatccaacaatggtttcattgtagaaagaagataaagaaacacagcaagttggagttctttgagcaaggaactgcgagtatgtgcacgtaatgttccatgtcactgcagtaattcaaagagaaacatttaaccggtctgttagatgagaaacaatgttaactaacattatggtttaaaaaatgtcgaattgcagtcatgggttcttactcatagcttgagtggttctgcgtgtgtcagtcgtgacaaattttgttggtctgacaatctttgctggaccacaagtgtaacctggaccaggtcccatgagagtgaagtttcttgggaccctaacggttttgtttgtggttccagcagcaccaacactaatctggaaggagctagccgcagtggcagggtcttgaacccatgagttcataacaccacccttgcagcaattagcaatctgctgattataaggagtccctggaagcaagtctacaactgttggatccttcttacaacaatgtggtatgtttcctttgtactttgaacaatcacctgtaaaaccattttgtctataattcatatccagataattcgcaattaaaacataaagtaatggaacctgaaacaattagttaccttgttcagttgtttgtgctccaaccatactccatataacttccttctttgcccatttccaacctaatgtccatcctggagattgaatgtgtctgtatttctggaagttgaacatcgtaaccacggcctagatcgaacaaacaaacagtttagatgaatcaaaaaccggtaaacaaggcctaatattttctacttcaggttcttgaacttacaacatagccatcaggagtccagctcataacatcccatttcattgaaatgttgccttctggatcaagcgcatcatatgcttttgcaaaaggatttaccaaaagtcagaactttgtttatcctgatccacacccgacattgtgattgcttcaatcttaaaactactaattatttgttttgtagaaatagacaaagtgttactgcttatactc

SEQ ID NO: 27544 - DNA, 1827 bp, Arabidopsis thaliana landsberg
gcaaatttatgagtgtttgtggctgtgggaatactatcggctaagaggttaagatatgaaagcaaggctacatgatatcatgaaaaatctactacttgtgtgttggttgtatagacattataaatttatgatcatggatatgtaatcatttttgtagaagctacatgatattggtatattggctagattatgggatggcacatagttgaagcttagattcaattaaacttgaacctcaatatactgatttcaagtaatttggtctcacgaacatagagatatcccctccattaccccccaaattggctgcccaagcggcagtatatcacatatggagacagcggaatcatctccttcacaatggcatctcaattccgcctccaattgttttcaagaacatcaatagcgaagtgagaaacaccattactgctagaacgcccccgtaaagtctttcgtgccttaattgctctttggatccgttaatgggttgattgatactcaactcttctttgtattattatttttcttgacaaagtttacatttgtaggttcagctttttgtaaaacttcaacacttcattctaatgatgtttacattcttataataataaaaacatagagatgtcatatttatttctatttatttatgtactatattacgacgaagtttgaacttgtgagaagttagaaaagaagttattactttctgaatcaacatttaaaaaataatagatgaacttaaatagtaaattgtacgtaaaagtcgaactccatcagctaatttctttaagtcttaccacaaaagactaatatgagtcaaacttgagacttgttcgttggaacgctgaagttaccaaaaaggtcagagtgaacaaaatcttttcaggcatttagtcagactgagatccaaactaagtggtgaaatggtaaattacactaatgtcattgccctccattggccattaaagccccataagccttctattttctgacattggtcagtgggaatagaaactgtgaagaagaatggaatagaagaaactcggattctgagaatccatttaaatttttttagtttaatcctaattagaaacctgaaagcaattgattagtgaatttaatttcgaatcttttgtagttgcagctggcctcgatcggcccttgtatccttttattaattaaagacttcaaaccaaagcgacaaaatttaagcgggtcttaattggtcttttataatttttcatctcgtcctcatatatacgattatacacatacactgttcacacaaaaatacatacgtagatttcatgcacgtcaatgtgtatctatgttcgttgttcaccatatgtcacgatacacacatgtgcacgtgtgtatatatgcgtacacgatatgatgatagtgcatttttgtatcatatgcgctgattctagaagtaatggcaatgcttcattagtaattaagtatcgataacatactaaagtatcgatatgtacatatattttttttcatgataagaagaaatacgaaaggcctcaggcctgagatatagtatatagtacgttattgtcttattgattatattttttcttgatcttgtcctcgtgtttataaccttttcttcagctccagttttgaatattgtttaataagtaaaaccaaagatagcttttaaacaaactttcttgggaaattaattcaaaaattaaatgaaattttaaaaacttagctgaaatggcgggtgatcctttgggttcagacccctggaaggaagcatatattgatttaaacttaagctaaaccactttacttacttaattttctttt

SEQ ID NO: 27545 - DNA, 1714 bp, Arabidopsis thaliana landsberg
gtctctcgataagcaaaaaacatcgtacgaagaagaagaagatgaccttaattttgtctgaatgaaatcttaaaattcccagaaagaagaatgacgaacagctcgtcatcgaagaaacaagctcaagatcagccagaaactagcgaacccactctcaaatctctcaaaaccaagatgattaaattcgacgaaaaggtccgtctttttctttcttcaatcgaactcaaaagagcaagtccacttaattttgttctgtaacctcttcaataaattggtcatcatcaccaacttaaaaaaaatctctcctttttttgggttaaacagcagaagaagcttaaagacattgaaataagcgttccaattgtgtatggtaatgtagcattctggcttggcaagaaggctagtgagtaagtatacttttttggaaattgaacttcttttgtgaagcaaagttcttattttcatcacaaaagtttaaaattttccatttttacaataccgttaaaataatggagagacagtttaggttattggttgttgttagtgttttagttcttttggataatgacgagaagttcttataggaatgctggaaaaggttatattttgacaatacccttaataagagagacagtttacataaatatccattaaggtttattggtttgttgctagcgacttagagttttagttcttatagaaacttaggaaggttatattttgacaatacccttattgaagaaaagtgttttgtgttcataagatttgagttgaatttgcaggtatcaatctcacaagtgggcagtatatgttcgaggggcaacaaatgaagatatcagtgttgtagtaaagaaagttgtatttcagcttcattctagtttcaatagcccgactagagttatcgaggagcctccattcgaggtatcggaatctggttggggagaattcgagattgcaatgacattgcatttccacagtgatgtctgtgataagccattgagtttgtaagtccctttcaatagcattgttgttaagtaggaaaatgccagcaattggaagagttacttatgagttatttgttgttttgggtggatacaacagatatcatcatttaaagctataccctgaagatgaatcaggtcctttgacaatgaagaagcctgtggttgtggaatcttatgacgagattgtctttcctgatccttcagaaagttttttagctagggttcagaatcatccggctttgacctttccaagattaccctctggttacaatttgcctgctcctagtatgatctccttatctaaagcttctttcattccttagtttaagttgatcattgccttaaaatgtcgtctcacacaacaaatcttatgattagtgcaagtcgaagataccgggaaaaagaagagaggtgatacgaaagatcatagtttgggacaatggttcatgagtttctctgaagcagatgagttattacagctcgcagctgctcgtcaacaggtaacttcaaaacatttacacaatttttctagatttttgatactcagttttgactatttttgttggtctatgttttgatgaatttggattggttctttgctggataggttcaagctcatattgcgaaactgaggcaacaaataagtttgctagagggacagaatcagaccgttaaaacaggatcagacctgtgaatctgattctgtaacc

SEQ ID NO: 27546 - DNA, 2132 bp, Arabidopsis thaliana landsberg
  unsure (1)..(2132): unsure at all n locations
ttttgggttttgatagggcttcttatttaatttcagttgttctttcttgcccgatgggtaaaaaaaaggcttgaacaaatactatccaccaaactttgatccgaagcagattcctcggatccgaaaacttaagaatcagcaaaggaagattcgttcgatggttccattacgtattcgatgcaacacctgtggaaattacatgtcggaaggtaccaaaatcaattgccgtgaagaaaacgtaatcggagaaacctacttagggatcaaaatccataggttttacttcaagtgcagtaagtgttgcaccgagctgatattgaagactgatccaaagaattcgagttatgtagccgaatcaggtgcaacttgtgtttatgatcaacacgaggaggaggagcaagccgaggacggtggggataggatgagttctttagagaagagaactttggtttcgaaaagagaggttgatgtaatggctgcacttgatgagatgaaatctatgaaatctagacgcgtatcggtgagtgtagactctatgcttgaggatttgagtaaaagacacaaagaagaagaagaagttgcaaaggaggaagatgcagcgttgataaagtctaccaaatttggtaagcagaggaggattgtcgacgaagaaactgatgagatggagaagacgaagaaagtaagaatggaggcagtagatgagaagaaacctaagactaagaaacttgcttgcattgtaaccttgaagaagaagaagacaacaagtttgggactcgcatcactatgccacaactatggtgctgatgaagaagagtaaatcaggtctgttgaatcaaatcaagattcatgttagaaactatcttgtagagattactatcatgactatttttgcatattgaagtatttttctgcaatctaataacaaaagagtttattgttttaagaattacaacattttggttacatgatattttgggtaaaagtagtttccatgtaaaagcctgcttcattcttttcaagtaataacagggttggaactgaatacacagaacacctctaaaggtatataacattttaacttttgataattatcatcatcttccttaattggacttcatctcaacgtctgcgtcatctttagtaagagtatctggagaatctcgcggtaaaagaccgagaagaggcagagggagcaatgagctaagattgcagaggataataagtgttgataagttaccaaaactgtctcttgtaatgccgaatgcttgagtcagtcctgcacccataagcccacctagaacactgcctccgttagagattgacatgagtgtagcgaacagagttgcttccattccttctggacataatctcgctgctaacacaagaaccggcatgaatgaagcctgttacagtttgattttaagctgtcagtgcatagatattgacaaattccaataatgctccattaactatggaatcacaaattccaatcatgcagcctttgaaaaactcaatgctgacaaatatgtaaacctgagcaaggactgttaggattagagagtctcctatagcaaaccattcgtcgctaatccccaactgtctgttaaaacctgacacgaggataacctgcaaaacataagaacggtcccaagagttattggttgtgtaacaggtaatagatggcaaagttttttttgtaaagagcggaccggaacccaccttgagtcatcccaagacccgtgccaaaaattgtcgnnnnnnnnnnnnnnnnnnnnnnnnnnnnnnnnnnnnngaatccattgtacagtcctactccaagcaatgaggcaattgaggtcacaagtttaactcgtcccagaaactccggggtaaaaccgagtttgttcgttctgaggtgaaatttgtaccaaataaaactagttagagactagttaatacattccagagaatatgaaataagccaattaccatgaaggcatgaaccaagtggaagaggacatacttgaagtaaaacattgcagaatctgggtgtggtgtgggttgccataagaatataaataacgtggggagaaaaacattcggttgcttaatgcaccccattactgaatatgttctgtttgaggtctgaaaaa

SEQ ID NO: 27547 - DNA, 1305 bp, Arabidopsis thaliana landsberg
ctttagagcgagttatgaatatcaacaaatagcgagttgattttatagaaaagtatacaacccttgagaaccttatagtgatatattaagattagtgtgtcattaaatattgtacttgcattcgttttttgtttgaagtaagattcacatcttgtgtaaagtttgagactttgagaaacagatcttcttctgttttctagatatctcatggttttgatcatactttatcatattttggtggacaaaatgaagaaataaaagaaacatatgaaagtgagagttaccaaccacaagagttttgttggatgctttgtcatttaatttatgcaccaaagaaagtctaaaatctcacaatcaccaatcttagattgtctttggtttggagttataaccctttctttgattggttgaagtcagaaccaatgttaaccggtaaactgataagattacaacttacaagtagctatcagaccaaacttcttctagttttatcttagcataatctttttctcatgcttattcgtcatcatagctttccacattctaaagcctaatccaaacactatttctttcaccatcccaattccgaaaactttttttattaaatcctgttgtgtcactatcgatggaggtaacattttcagttcaccacaactttgtgattagtcatattctctgttggatgtcacactcaagaagcaaatctcatctcttttacgcactgataccgtcctctcttcgtgtttggatccggattttctaagcactaaggattattgtttggtcattttgtcttctgcacctacctcatcatcacttctagcttgtcctataccatcttcttttgcccattaatatcgttaagacaaatctatgtttctacagtaactactttagtgacgataaggcaagtaaaaaatttctgaagatgtgtcacaaagattatatcttggctcatcacttctttctaagatggcagaaagagacaaatctgatggcatgttgacctttgtttgatgttgatgtcacccattatttcttacttaatttagaaatattgaactaataaaggactaatcatcaagacattggatagattattatttattaagcagacatcatcagcttccacttacaatataaatctctgctacaaatttttgtttgtttaatccaatgttaggcaaaaaggattgtgataagattataaggcaactgaagattaggagaagcttcattgctagattcatagcacatacataagatatgatctcatgattacagaaatacccaccaaaatccttc

SEQ ID NO: 27548 - DNA, 2473 bp, Arabidopsis thaliana landsberg
cgctcataattatcatagtcgtcctgtgattcagatccccatgggaccttcacttgggttgacctcacctatctcttgaagaacttagatactctctcgagtacttcagattgaggcgtatcagaaggtggtatgaccgttgggatatcaagagggctcaatggagagtaaggcacaccactaccaatctgcatctttctgaccatcccagggatcaaaccaggaggaaagagaggataaggaggcggcttctcaccagcaggtggttgggttggtggtggaacagaagcgttaagcggtatggaaccgggaaaggcaccaggaggcatcacatttgggataaattgttgggttgcgaccggattagtcagatgctctaaattcattgtgctagagacattactgtttggtggctgttgcagcattcctgtaagttcataaagataaaaagttgttggtatattgtcaagtctaaaccgaattcttcttatacataggtggagttatagtttctgtctttctcacggaagagcaggagtacctggacgttgtaaggcatgtgctgctataatgggagaatgagaaaaggtatttgcaggtggtccacttttcatctctttctcaagagaggagatggtgtcttgatcaaaaacctccttagaagcccaaaactgcaaaatcttctccaaacgtgactggttttcttccttgttttgtggaaagtggtaaatcctccccagcatggaacccaaaataggtctgaaagcaagagcttcattgtcaaactcgtgcaagtttgtccttcgttgtaaactgtatttaaggaagcaataaacatgagaaaatattagggcagaagaatctaatgttgcaacccaaaattttgaaagcacagactgagactcctaataatatagaatgaacgaaaaactagtctatgcagaagtcctctagaatgatgtaaagagcgatcagggatgaagtttagatacctgtcgaagagaatgtcattagctagataaactatgtgcatctgcctatcagaatcatccattgcaaagaccctgtctctaagtgcctctgctaaagctggtgcaaagggagatctctgcatgaaccaaatcttagcacttttaatagactctttcgtgccattaaggttgcccaagacaccatttagttccattgcaacatcagcagggagtggaccagaaagacctcggaacgcatgagttgactgatcaaaatcaggacgagcatggggcgcaaaaggatgaggctgcggaagatgctgttggagctggtggtggtcatggaatggtgggaaaggaggttggcggattggtggcacagccaatgcaccaggtacattgttcattgaaggactcatcatgggatttggcggatgatgtatcataggcattgaagatgacgggaatggaggatcaaagggtcctccaggggatgcatagagagaaagtgcttatagcggtaataaccatgaccttcacccccaaacagaaacgcataatcaggattatccttctgtctatctcgcatcatagcctcaaactcaggaccgttcttaaccgaatactcaacaagcttatcaatccgtttctgcagctctggatcagctggaggaggaggaggaggagcagaatcatacggtccagggaatggcggaggaaggtgatgtggaggtaagtgaggaaggaaagcctgaggttgctgttgaccaaacatctgtgggtgaggaggatgaggaagatgctgcggttgctgctgctgatgcataggatgctggtaagggaactgctgcatagaaggatgaggaggaatgaaaccagaagcattcattggtgatggatactgaggatgttgcggatgaaatccgaattgtggttgttgttgctgttgaaagttaggaccttgttgctgctgttgctgagcataaggtaacccagaagaagcagcataatcgtgctgtcttcgatccatgtatataaactctgtaacacttgtgttgtatagattcagctaagtgttcctgagaagattgtaaaaacaaaagctttcgaaattgggccatataattcaatacgagagaagtaattcccagaaggtaatcaatatctacgcaaagagaaacaccgaaactatacacagtgtaaattgaagagtttaacaaaaaagcgacatcgcttaagaatctgactacacgaccctaacagcaagaaaatcgagagagcgagacacaatacctagttcaatcacttactaacaaagaagaacgcaactttctgagaagaaaatagttgaatcggatggagcagaagctaaacgcacctgaagaagaaggactgaaggagagacctttactctgctgctaggatccggaagttttaattgggccacgaaaaaccgacccaaaagttttaattgggccacgaaaacccgacccgaaatctat

SEQ ID NO: 27549 - DNA, 1374 bp, Arabidopsis thaliana landsberg
taaccgcttttttaccggcccttcttgtgttcatccaacttttcaatacatcaactctgtctctagcaataatgcttacgattttatccaaaacatcttggtttatatctacaatattccccatccgtttctgcagtgcaaatatgtaagagtttaaacctagcatgaagcaattatcgcattattaataaatcaaggtttgagttatgttttgaaccaaccttctttcccattgtaacaactcttggccgtacactcgtttcctgttagaacgtatagaacgtctatcactatattttctttcttccctgtactctcccttttgcacaatgatgggtttctcacttatatttatatatgtaacttattgatacctgtaattaatattactgttttatggataataaccatgactccttgtttttgtaattattctgtttcattttagttatattaggtggttactatggatgttatttttataaaacccagcttactatatggtcaagattaatatatgtcaacagtatggtttactttgttgtcaatgaaacatttgtaaaaacagccgtcaatgactttgccttttagattgtaacagattcaaacattcgatgatgtcttagccattgtacaacgtttttaataaaaccaacttaaattgaataatctagttttagacgatgtctaacacaaacacctaaccaaacctcactggacacatatgtccgtttttcttgcaaataggacattttggcctgccagctctcttcaatggtgggtttgtaactagctcgccaataagtggatcttctatacaaagtcgaccatctatgaactccatatacgctgataagcctctcttgaaggaaacccatctccctagtcggaagcattgtgtcatcaattcctcgtaagcccatcccttactcatttcggtaaagacggcggcagggttaccttcggttaggcattttttgtaaaatttgtggtacgttgagtgaggcatgaaccaccaaataaaatgttacgatttgtcaagtcccacacgcttcagtgtctctttcgacaagacagcatccttgcctgcatgaccacttcgaatccaacttttcaagtcttctacaccgttttccgaaactaaactaacgattttagccaataattccgctggcatgtggaactcctgctttctttgtaactacacagtaatattcaatcgtcaacataaggataataaacttgcttattaaataattcacgatgtcagcttaccattcacccacttctgattcgttccatcttcatgttctccattttccgccgatgaagaaaatcttgaaacttctgcttactaatggcagaaagttagga

SEQ ID NO: 27550 - DNA, 3349 bp, Arabidopsis thaliana landsberg
gatgcgggtggatgtaaatctttcgttatcatatccggacttataaatgttatttagaaaagtctagacagaagggaaagaggttttgatctattcacacgttgaattatttctgtctttttcagtctattcacaaaactcagacttagtacgtagtaacgtagcatcgtggcagccacgaaattccgacacataaaacaaatggacatagaaaaggcaacgaagaaaattcaagaaggagcttttacttaattacttgaagtggttttggtcgatccatggttcttctcttccacaaattaacttcactctttggcttcggacacaaactcaaatcctctagctgagttagaggtatacccacagagcatggaatcattacatcttctttctcacgtttcatctggaccgtccaatcaaatccaccgagagcttctctactgctcgcgaatttcttcattgcacccaatgaaggcgctgccgtaaccgcatcaacctccgcgattggatgttctctcgctgcggcggctgcgaaggcagtggagttggattttctcgacggataacttctcattgagaagatacgctttagtttcgaaaagcttccattgtcttcttctttaataacacaagacgataaagacgatgccgttttgagattcttaggtgctttgttcttcttctccggacatttaggtctagcgagtttgacctgaccgatgcaggagactttaggcgaagtgggttcggcaaaaacggcttcgtattttgtatttctcctaactctagcagccgtaggaaccaacggactggagaagaagattcctctgttcgccgtcgaagtcgtacggtgctgatgaaaatctctccgtggactaaacggcgccgcactgtgaccaattgacatcgctctttgaagcattttcgagaatttcgtggacttgttgctgtttgaagctttttccatttattcttcaagatttatgaaaagcgaaacagagagactctaggtcttatatgttctgttgtgtctgaagcttctcagaaagtgaggataaaagaggaacaaagattgaaattgtcaacggtgatgagctaaaccggagaaggcttatgtcattatcacacagttttgacttaaaccggagaagacatttatgtcttatgtagacttatacggccgactttgtcccggtttagaaaatttgatggtgaagtgtacttatgttaggtttacaattttccttattttttaggtttgtcttcgtcttttacgcggattagtttaattgtttatttgacttttagtcccacatgtgttgtgcttggacaatagattatactatttattaagccacctgatttttatgcttaattgtgtgggattaatctatcatactaataattagtccatgaacagctagtaaaccgataattaattggattgaaagagacgtataaagtgaacacttgtcgttttggtcaataaacgacaaaagtgtgtaatgataggttacataacataaatctaaatatttgtcaatggtacatttttgtcattgaaggttgagaaattgagaactactccttctctttggtcttcccttgttaaatgctgttttactaaaaaaagacttccttatttcatgacataccatggtatatgtacacacacattaaagcgaaatcttcaacttcaattttgtttaatattcaaacatttttttttccctaactttagccaaatttaatcctcctctttttaaatatttatgaaataatacacatgatgcaagtaaaacatagtagaaaatgagagttaaaaaaagagtacatggtacaataatacttcttgataaccaaatgttgtaccatatcaaagctacaagaaaactgcttgaaaatatccttaaaaactcctgagaaaataaagcttcttctttgaaacttgaaagggttcctacaatggccgaacaacgagtcccttctgaatcatcttctccaccagctcttcatgcttcttcaattgcccagctcttcttaactgagcaagaaccatctcatataaagacaagctcggtgtcaaacacttctcttcaaccatttctttaaacaacttataagcattattccaatgtcccatcccacaaaacatcgtaaccaaaagcctataagtattcacattcggctcaacttctttatcatccatctctttcttcatcttcagaaccatatcagtagattttgacccgacaaacatcctcatcagtatattataagtcaccgtattcggctcacatttcgcttccatcatcttcgaatacatcctatgagcgccattcacgtctctattcttctcaatgtacctaaatatcgtattgaaagtcgaagcattcacttcacacttcttcttgatcatcgtgttcaaaaccttgaccgcgttttccagattctcgtctctgcaatgagcctcaataaggaagttataagtaatagtatcaggctcacatcctagcttcttcatctggttataaacctgcaaaaccttctctgttcttcctgctttcacatgaaccctcatcaagttgttaaaagtaatcgcattcggcgcacaacctgaatctaacatatccgcaaacacatcatgcgcacggctgatttgcccgcatctacacaacgcatcgatcacaatactgtaagtatacacattaggttcaatcccagccaactgcatgtccttgaacactttctctgcctgagagatttcaccagctctacaccaaccacgaaccaaattggtgtaaactataacatcaggctcgaatctatctttcaaactatcgaaaaacgactgagcttcactagctctcctcttcctagaaaggttactaataactatggaaaacgcgattttatcaggtacgcaaccgtaatcttccatacgattaaagcaatgtacagcctctgaagctaatccagctctaacataacgtctaatcaaaatcgtgaaggtttcaatcgaaatctctacgtttctggatttcattagatcaatcaaatgccaagctaagtcgaattgtctaacctttcctgaaagatcgatcatttcgttgtaaggatgaggtgatttgtggtcgtaatcgtctcgtgaagttgcccaattgaagaaagctagagattggtgaagagggattccgtggcggacactgccgcacttctctatcacgcatcggacgacggagggagagacttgggaagtttcaatttgggagaaatcgagggagagagcatgaagagttaagctagggtttaagatggcgtcgttggggcttggagggtttttgcgata

SEQ ID NO: 27551 - DNA, 549 bp, Arabidopsis thaliana landsberg
gatggtttttattagagaatgaaattgaaaagaaatatactaacttggaggtgactagcaacgttgtgtctagtgagacaatggactcccataagctccagaattcgagaaggaacagctttgtccactcctaactgttccactgcctccacgaatctcctgtgtagctctggtgtccaatccaccttcacacacatcccaacatatatataaccaccatcttcattattttttcaatactttttcacatactatataaaattcacaattagcagctgactattttacataatttgaaagaaaaaaaatcttatagagatgcacgtgatgtctttacacgagtcttgtaaacatgactgaaatatgaaaaatttagaagatttagcaagaaaatgaattctaaacgaataatccactttaaaaaaaaatacgaatccattatagacctgttcatttaatcgagtctagctagggtttttattcatataagactaatgttttatatatagatgatatgattaaaatcattacctttcacctttctcttcc

SEQ ID NO: 27552 - DNA, 637 bp, Arabidopsis thaliana landsberg
aatgaaacaatctgataggaagttatacttaccaccaatataaagttttgtggacatgtagcgaagagaaccgagcattgatgacactggaacatttaccccttgtttccagtgaccgccaagtttagtgcagaaagccatactagatgcctggaaacgataaacccagtacaatatatcaacgaaacccttagaagctaagaacactaaagcagtggcaaaatgtctagactccatataacaacaaatccatgacctatcaactagacctaaaagaatagcatcttaacttgtaagttaaaatccacagagtgatcaaaccaatttgataaacattaaccaaaatgtacaaaaatactgataagtcgaatgtccatggcaagcagaaaattcaaagcttccttaaaccagatatactcagttccctgatcttcaaaagctaaactacgcatcaaatctaaattagtgacattgataagtcaggcaaagaaacagagatcttataaccctaacggaagttcatgattcactggtaacctacactgattacaaaactaagcagatcaatctaattgaaaacctgtgatatattcctcttaacagcttaaaagagcaattagattaagaaaaacgtcga

SEQ ID NO: 27553 - DNA, 1265 bp, Arabidopsis thaliana landsberg
caaagatggttttttcttcatttcctacttatcctgatcattcatcaaactggcaacaacaagtaagttcatgatccgattatctcttcttttactctaaatggcttttgttggctttctttggttttataatttatgagtactcaagaaccaatttaaagaagaagaaaaaaaaacataaagagagattaaacaaacaagaaaaaaggataataatattcttgttccttttgtcacttttaatctttgtatatctgtggttgaatttgaatatactcataaaattaattctttctttccttctttatcaaaattttcacatattctaaaaactttttgtgttgtttttgaatcatttcttcctctctttagcatcaaccaatcacaaccaccgttggattcacgggaaataacatcaaccaacagtttcttcctcaccatcccctcccaccgcaacagcaacaaacgcctccgcagcttcaccacaacaacggtaacggtggagtcgctgttcccggtggacctggcgggttaatccgaccaggttcgatggcggaaagagcaaggctagccaacataccattacctgaaacagccttgaagtgtccaagatgtgactcaactaacaccaaattctgttacttcaacaactacagtctcactcaacctcgccacttctgcaaagcatgccgtcgttactggacacgtggcggtgctctaaggagcgttcccgtcggtggcggttgccgtagaaacaaaagaaccaaaaacagcagcggtggaggtggcggtagcaccagtagcggtaacagcaagtcacaagacagcgccacgagcaacgaccaataccaccaccgagccatggctaacaatcagatgggaccaccttcttcgtcatcgtctctaagctcgttgctgtcttcttacaacgcagggttaatccccggacatgatcataacagcaataacaacaacaacatacttggacttggatcatctttgcctcctcttaagctcatgcctcctttagacttcacagacaacttcaccttacaatacggtgccgtttcagctccttcttatcatataggcggtggaagcagtggaggagcggcggctcttttaaacggttttgaccagtggagattcccggcaacaaaccaacttcctttaggtggtttagacccgtttgatcaacaacatcaaatggagcagcagaatccaggttacggattggttaccgggtcgggtcagtaccgacctaa

SEQ ID NO: 27554 - DNA, 3272 bp, Arabidopsis thaliana landsberg
gactatgtttcaacatctgtatcttagtgggaatgcctcgcatcaaaacaaagaagaatgaattcgcagttcaagaagagtattgtaccaagagtcatgctaagtaattaaagaccaaaacaagtaaagtttcttaccggtatgcaggaatgtaattctttccaagagctagtatgatgaggtgggctaattctgcttgtaatatgaatatcctctgtccttctttgtaactgctaccaaaagcggttcgagagatcacctctccggtcatattcacaatccatggccaaacatcaagctcgcacgacgaccctttatctgaaactaacttctcccattcacacatgacctcgatgcaacttttataaaacgtagggaccatattctatacacaaaatcataatcaggtcacaaaaaaaaggccattcactcgtcagccagaagcaatattaacatgcatggttttgtgacaatattagagaagaggatttgaaaccttaatcttctcaaaatggaatgccgggtcgataatcttccggtgtttcacccatttatctccatcggcattagcaagtccatcagttagcaatgaagtcaaaggaaacgtgtgcgtcttctcgaaatcataaaacttgttatacacttctttgatcagctgtggattcattattgttatggcaggtatgggtcctgaccatgtgaaaaatgtcttccctgttgtagccacagatacatacatgcatatatattagaagaagaaccgtttagacctctagtaaatacaaaaagaatttaaaatctcaaccgtaagtgttgagcatgtgaaaagagtaaggcatgacaagtgagatgagatcatccgttggtttcatcggtttggatcttgcttccttcaacatgctaaaactccttctcacatctcctacaagaggcgtgtaacgagttccgacaagaccttgtcttctcaggtaactctcaagcatcttaggtttaagccaaacccactccaaaattctccatatacaccaggacacgacatctacagctacagaaactgttgccgatgcaactgatatctccatgttttcaactaaagagagagagagaggtagagaatttgtgaccattctcagggtttagaatatcggagaagatatggatgtggtgatgatggtcacaagttattttatactagatgaacagccacacccatgctacgcatgagtttttgtttttaaaattgtcggaaaaatatgattataattttttgttgattttgatgttcattttgataaattcatctatttaatataattattatttttatgattagattcatctataactcgaaatatcaattttactacaatatgtatatttatatatctattattctaatatttcactatcatgatcacatattacaacaatatatgatatactgatacaatgtatgtggttatattacttatatgtgttgaaacttgcctaatttaattgtaacaaacgattctttattccatatattctctcgtcatctagtacacaatcacatcatgatatgctgataatttaagtcaacagtgtaattctcatccctaccatatagtcatatagagtctcatgttgttgtttttttggtatgtctaatgtcttggatgactattacgtaaatgtacataaagaaggtcatatgataaatcaaattcacaaaacgtaataataaaaaaatatccaactaaaattactaaattaatatgaggttaggtagcaaacatctaaactccaacacaagtaaaattttagccattatgggttaataactattgataaaaaaattaataaaataagtagaaaagaatgaaagtagtgcttgatacattattatgattttttatttattgattattcttagaaaattcatttaagagtgatattaatggagaatttaacacaacaaaagacttttgattttttctcaattatttttgctagtttttttaatttaactaatgtataataacacatgtcattttcttgtgtgataatgtgtcactcatatggagagagttgaccaactttcatatatatgatttagaaactcactcaaaactaaatctctctaggtctttagaacaactctctatagcctcttaatctctcttgtgtcttatggaacatctctccataagcccgtatttatagatactagatgagtacccgcactacgttcgggtttatgtattattatttacaaattgttttatataatgtatgttcatataaagtaaagttgaatgcctcgtttttgaaacataaatatgatttgtaattgtttttcaaaagtccaactatattagttcatctgaaaattgaatatgcttgagttgttttttattgttgttctagattctcagttttttttttaatttatatatccttctttttttggttatatgtttagattatgagacggtaaaattttagaaaatttatttcttacactaaaaatataacatgtctttattaatcatattcaacttgatgttcttggaaagtttagttaagttcttgtcataatcttatatcttacgtattaattgtaaggatagcacctcaaacatctttaaaattacttgttttcttagcataaatctcgaaggacttaaatatatttaatctgcatattcatttagtttctttcataataatcgtctaatttttaggacaggaatatgtgtaacatgtttggattttatcatcactttagccacttaagtggatctcaaaattaaagaggatatattgaattaaaaaaatatagaaagagtgatggttcaagttctcattaattatattctcctattttagttgttatattgaattaattactaattatatattacttattttatgaagtctaggtggcaagctctcatgtgctgatgtgtcaagtggtgggagagagttagtcttctttcatatatataattagaatatagctatatatatatatatatatcataaatagtttatgtattattgttactttatgcttttatgttaagattagatagatctactactaataaaaagaacttattgaaacctctcaaggtgtccacctcagcattctcaaaaatactctccctaatagacacatcatcaagccctcatctcttaaaaatctcatgccacgtcagttttaagtttcacgtttctttgtggaccaacgattatgttttcattattctcttcgatatcttcgtaac

SEQ ID NO: 27555 - DNA, 2220 bp, Arabidopsis thaliana landsberg
  unsure (1)..(2220): unsure at all n locations
tggtgtcttggattcatctaaagctggtgaaaaattcctcagctctgttaaatccgctacttctcttggtctctgaccttctccttctatctccgatcgtcctgaggtaatcaaaatctcaactttaacttgttttgttcgatttcttaacatcaatggagttttttagagaattggattttttgtgtagattccagcacgtgctgcggcagctgctgcggttgctcgtgctttggcgggacttccttctgatcagagattgagtatatcttctactgctactgagcttaactcaatttatggaaacagacctcttcctcaacaagttgaagagcttgaagaaggtttctatgaagaggtctgtgtgtgtgtatgctttgttttggtgtttgtgatatcattactaagcccacaggtgacattttggttttgttgttgtgtaggattttgatccggtaaggcatattttggagaatgtgccggatgatgaaagtgagttagcttattttgagaagcaggtactaacttttaacttctctcaaggaattgaatataaactgatgcctctattgtgaaaggttaagaatgttgatgaacgttttagttagtgagtttaataggttttgtttactgtgtaggctaccttgaggttggtacagctggataaagtggcagaaactttgtctcaccatgttatggagcatcgtgaagttatgggtaagtattcttgaattgagaagatcatatgcgtttggttttgtgagtattaatatttgcttttggccagtgaaggggatgaatttggtaagagaattggagaaagatttgaagattgcaaatgtcatctgcaaggtatgagtttcatattcttaacctaaattttacataaacaatacagtggttttattttctattttatctattactggtttgacttggttttggctgtttttgtgtgtttattgccagaatggaagacgaaatttgacttcttctatgaatgaggcttcaagagatcttattgtacacactcattccaaaaagaaacaagctcttctggtaggcttctcaatttatttcagacatctaggctccactgattgtttctttaatctgctttcttgaaatatttcatgtgttatagtttccttctgaaatcaccatcaatatgctctagaactttgtgtacaaaattcctctgtattatcatctatcagaaagtggccgagtatcttttttgttttaatctctaaagttacgaacaggatgtttctagcaagtagtttcttagatacaatctaagtgtaacctagcctaattttttgttttaattgctaaacatacttttgagattattattcctagcatgcctgtttgcttctctggataccatgtaataagagcgacatgaaagtttaatctttttacttgcaggatatgcttcctatactaactgacctccgccatgcaagagtaatgcagtcaaatcttgaagaccttgttgaagatggaaactattgcaaggttggtagtttaccatcgtctctgttgtatacttccatggttttcttatatgaattatggtgatgttatgttatgaaactaacaagagatgggaatttattccttattatgcaggcatttcaagtcctatcagagtatttgcagctgcttgacagtctatctgagttctcagcagcccaagagatgacccgtggtgttgaggtagttatagcttattcatgaccaaccattgtcttcataattttctatcgtcagtcggttgagcttctcatactcttttcaaggtttggttaggaagaactcttcataagctggattcactgttgttgggcgtttgccaggaattcaaagaagatagttatgtaatggttagtaagccaactcattctcatgtatctctgtagctttctcctttgtaaactaaaaggattgaattgtgggccttcagtttagtggagaactagaaattttgttcagagatttaacttgtttatgtgctcatacctttaggtcctcgacgcttatgcactgatcggtgatgtctctggtctcgcagaaaagatacaaagtttctttatgcaagaagttatctcagaaacccactcagtgctaaagagcattgttggggaggtatgtgagctaaatatcatttgttgctcctgtaggatgtagtcgtgcatgctnggatggttgaat

SEQ ID NO: 27556 - DNA, 1082 bp, Arabidopsis thaliana landsberg
aaaagatgagatctttcttaaggtatttcatttctgtttttattttgcttacaatctgcttgtctttctatgcttggaatttatgagtaatggatacttagagtaatgatgattgtctttggcgattgtatttgtctggttgtttctgtgtactcatacagatggcaaagggaatccttttggccttggatcacttggggagactctgaacaaaagaagaaagacagagacttatgcgagctcttcatcaacggttgcaaagcttcaagagcagctgcagctcaagatgtctgaacaagcggagcaaaatgcaaaacgtgatgaggagcaccgccaatctcaatctcggatagccagcttggagaagctcgtcctcttcatgaaagaaaaagatcccgagttggctgtttatttgtcttcagattctacagaacctgaaccagtcacacttccaaccacaacacttccaaccgccacagccaaccaaccaaccaacacagaagcaggcacccaaggagacaacagattaggcaacacaccgttagcctctacttcagctactttgtctaacactgcttctaacaattaaacttgatcttatgtagcttttgtgaacttgttaggatgcttatcttctgtggcttttgttgaacttgttaagatggtattatttaggtttcactatgactttgtgaatgtaaacttgattactgttcttaatggtatttaactagcattattggctttttaattcaatatcaatcaagtttataattccaaatatacaaaaatttgtgactaaaccaaaacataaaatgtgactaactagtgacacttttgtgaccaaacttactcccactatgtgacaaatatgtgaccgaaacattacaaaatatgtgacgaatttgtgaggaatttgtgactaaatcaaattatacaaatatgaccaatgtcgcaaaagcattacgattttgcgatgaattatagaacgccttaacttcgtcgcaaaaaggtaagactattttacgactcaattgtaacaaagtgtatgaaccgaaccttggtgtatctcgctgcagttt

SEQ ID NO: 27557 - DNA, 1726 bp, Arabidopsis thaliana landsberg
ggtagaagaagaagaagaagcaatcacgtgggtattgttggtaaaccgagacaaggcctttttgtgttttgaatcgtttcagtcccttaataagattcctatattgggagggctttctacttcgggaaagttttccttttgcgttttttcttttcttttcaataatttatttgttttttagttcttgcaaaaaaattcaggagtatgacccatagactgctaatctgataggccttttcacatattccccgcttacttgggataggcctgagttatgcaaatctaaaagtagagaaaaacaaaaatcaatgcataaagctttggctctatctaaagtgcattttctcatgtgtcgatgattggaatttttgtgataagaaagtcttaacatagtagcaaaccacaaaaaggtcgatccaaatcaaaactatcaagctatatgaaacaatgtatctgattaattgattatagataagataaaaccaacagttacaagattacaacaagacaccatggataaagaagctgtattggtgtttcttatagttcgtcatgttgttgtgtagcaatgtcacctgccattacaatggggtttggttggtcagtgatcataagtcataacagataatacttgaatcgaggaaagaggtaagagtttaagaagtaatatagggggtgaagaaaataaacctgaaactacatccttgaagaaaaactttatctctctttcagctgacgatgttgaatccgagccgtgcacacagttcttctgtgagttcttaccacataatgctctgatgctacagaaacaagagaaggccatattataagtaaataggatcaaagaacaacctaatgattcataacaagtcagagaacgatttcaagtaatacagcttacgactatattcatcttagccctcacatttgagtttgcaaagtcaagaattgtgtttggcaacaaatcgaacctgtgagggtgagatatcttagccttttccgcatctgttggaccgattaaatcacgccaatcagaaactgcatttcgcttctccaataccatcaccaacaccggaccacttgtttcaaagatacagtttacacacattagcaaatgcagacatagcagagattgcggaagaattatggcaagcacactaaacagaacttaccaacctcgtcatgtatgtaacaagatgaggaaaaaagctcctcgatgagtgctcctcgtaaaacgcacaagctgtctccttgtccagctgagtaagcatctccttgacgatattgaaaccagcctcaacgacgatcgttttgatttcttcagtatagttaccagagactccatctggctttatcatagccaatgttctctcttcactacttgctccataacctaaacacctaacagttttatcaataaaccctaatcggtgaaaaaaattggaaggcaagcaactacaagattcatccgggaactattaatttatattcagagcgagagagaagttatcaattggattgaaactcaactctcagatccattgcaattgagttcacagacaaaccgataaggtcggattattcatactaaggaaaacaatagaacccctagaatttctcgctcacctgaccggcgacaaggagacagaggcgagaaggagggggaacaatagttgatatgtgattcctgacattgacttgaccgggagaacacaaaattcggcaa

SEQ ID NO: 27558 - DNA, 1661 bp, Arabidopsis thaliana landsberg
gcacattctatattgggttgttcctagcaaatattgtgttgtcttttgtactaaagtttattggcgagttaagaaatgctttgtggtgtgtgggaattattattatgtattatttattgttctttagtttgctatgcaattcgagcccactaaagaggctttctatgggcccaaaaaacgcagcccactattgtagtgcaaaacgtgctgagttttctacattgcatgcccaacaatggccaccagtgtagttaaagactcaagaacttgctgacctctatttgtttgactttcttttttgtgtgaacaaaatcacatattgttgatgtcatttgttctgctataattcttaacttcagattacagataacgaattttctcttgatgatttaaacaaacatatataattatcaatatcagaaaatgaaaaggagatataaataatttttttttgcgcctaatcaacttcacctaccattttttagcgtataaaaacgttaaaaataccaaaatttagaaatccaataaaagtgtgaaaaaaagccgcaaagggtcgttgttgtttgtcgcctctcaatggcagcttcttcaactaatgctcgtctcaccaaccctcctcgtctactctccaaaccccgactttcacctacctccgtcgccaatctccgttttccagccgccgatttctccactcgcttctttgccgattcttcgtccccgcggctaaggagtgtaccgtttccggtggtattttccgatcaaaggcgccggcgaagcatggaacctagcaatgtctatgttagtgattcttcctttagttcagttttcttttgttgttttctgttccgtttttattggagaaggataggtaatgatgaatttgcagatttatcgcttcaaataaatttggtattagttttggatgaagactttgatgtttcgtgtacaacattggtttagctatttagaatcgatcttcagaatttttgtttagttctgagaagtagttggatttttaattgattgtggaatttatcctgttttgtgatctcaggtggcttcaaattccacggaaatggagatcggaagtcatgatatcgtgaagaatccgagcttgatctgtgctccagtgatggcggattcaatagacaagatggtggattgaaacgagtaaagcccatgaattgggtgcagacttggttgaaattcgattagattggctaaaggacttcaatcctcttgaggatctaaaaaccattattaagaaatctcctctacccactttattcacctacaggtttgtgtgttcaagcttgagactttttaaatgtttgatatcgaacttcttgtgctttattgtgtcgagctttcaataagttacgagctacttattgggctgcagtatgagtaatgttgttttttgtataatgtctgctctttagaccaaaatgggaaggtggtcagtatgaaggtgatgaaaatgagagacgggatgtgcttcgtctggccatggagttgggagctgattatattgatgttgaacttcaggtgaccatcgtaatatattttggatattttagaagatgtttttgatgctaattagtttctcctactttatatttgtatgttaaggtggcaagtgagttcatcaaatctattga

SEQ ID NO: 27559 - DNA, 1205 bp, Arabidopsis thaliana landsberg
gcctgcaggtcgactctagaggatccccacaaacgataaatatatcattctgtttagcgattgttcttctccttggatttagatggttgtcttctttttgtaaccaacccaaactttcaacccgacccgattcgataacccgcaattcatcatctctcaccaaacgcggcaagtttgatccggccacgtcagcgtttctctcaaccgttttttccgccgtttcagtttaacaacccgacgcaaaacgctcatccataacggcaaactcttcaacggttcctccaaacacgccattatctccgccgtgatctccctgaaacacggtcgtgattccacgtcagacgaaacgcatctcgccgccatacgcaacaaccgtagactcattccccggaaaacacccgatcctcctcctcctccgccgcatatttctccgatcctcccttccttaatcaacggaaccgcccagtccactatcgacgccggcgaacgagagacgtcaatagcttttctacaactaacaatctccaacaaaacgacaccgtaactataaacatcagtcttcatactcagattctccggtaacgtgtaacacggatccaagtatccaatagttcccgccggagccggtcttatcttcttatcacctccaaattcaacggcgagtccgaagtcagcaagcttcgcttcccaattcgaatcaaacaaaatgttttccgatttgatatcgcggtggatgacaccttgttcatggaggaagtgaaccgcactcgcgatctgaagagcgatttcgatgcgtttaagccacgtgggaagaggatcagttgacacgtgtaataactggtgtaacgatccgtttggcatgtactcaacgatcatgagttttttctcggcatggccaagaaagcttaacacgtgtgggtgataaggtaacgatgacataacattgatctcgttttctagtttcttcgtttgttctgatttggatgatgatgatgatgatggtgaggatggtgatgagggagataatgataatgatgatggtgttttaatggctacgactcttcgacgtgtttcgtcatcgtcttggtgatgaagaagggctttataaacatagccatggcttcctttcccgattagtttcgaaggagagaatcgatctatggcagtgacaagcttgtcgtaatcgaactccttcatcagaatgt

SEQ ID NO: 27560 - DNA, 864 bp, Arabidopsis thaliana landsberg
gcatgccatgcaggtcgactcgtatgaggatcccctagtatatgtcggttcattctctcgtatgcatgtaccttcagtaacaataaacaccacttttagtcatacattgcataaaagaaaacaaggaaaaaaaagatcaaagagtatcaaaactctttttcaccaagataatttgagaacttacatgtcctgcaaaaactatgtcaacacggtattggtaaagaagctcttccatttcctgcctcatgcattcaaactcctggtaatgcgaggagtagctgttgtaccaaggcggatgcattgttgcaaccagccatggtgtcactgcacgatcaactttagacaagtcttcctttagccatgcatattgcagccctaaaacaaacacataatcatcatagaaatgagatatattgtagtaggagcacaagggactgcgagtgtatccatggatttaccagtgtgattgtaatcaacatatgcacccaacataacaaaatgcactcctccggcatcaaaagaatagtagaagttgctgttggagccactctcacttgcaggaacagcaaacctttcagaatatgacttaaaggtgatccctgaagcttgaggctcaatctcatggttgccttcaatgaccatcgttgggaccttggaagtcagtggctccatgaacctgcacacaaataaaacattaattactcctaagctgatctggaccaacgcagagttcttcaactcctaacttgttaacccacatagtaagtttcacctttcccacgcatcccagcgaggttgatacgtctctctaatcggtgcatcgggaaacgaacatgagaagcatggaactcctttgccaccaat

SEQ ID NO: 27561 - DNA, 1348 bp, Arabidopsis thaliana landsberg
atagattatctacatgaatgaagtgtatattatactttacggtattcatttcttctcgatgaaaaatcagcacgtgggagaatctgctgtttacttgtgggtccataatacactttttagtgttgctactaaagtactgataatatccaagtcgatcattatatatcaaactaaagagtttgcattcaatacataagctagaaaagtagagcaatattttggttctaagtttatgggctcacgtatgaagaaacacatgtgtaagatcgaatcctaggatcaaaccttaattattaaatccttgaaaggtaaacatatgaagtatttatacattctgaagattaattactaatggacttcgacgttagatcttgttcccatgatagaaaaacgtttttttttttaatttgggataaatacgaggaacaacttaagcatttatgttttatttaaaagcggtttaggcggttgtattggctccgtctagacgttatgctgtcaagttatggttagatcactgattcaacgcctaaaatagtataagtttcgatttaatgtattttctattttaaaattaaatttgagtttaaaactaaaaataaaacactttagacatccaaaaaaaggaagtgtctttctgtagttaaactttaaatatccataaactctttatgaacgtagatggtcttactgtctaatgctttcttgaacattgatagccatcgttcgatgaaaacgctctcctccaagctgatcaacgatgacatttaaacgatctcgaacccctttgattttcttttattaacattttttattgattagtaaattgtgacataattatatatgatacaagaaattattgatacacgtgaaaatttattaacagttggaagataactctgactatgaaccatttcattttaaggttctgtgcattcaaccgatatattttttgcgtacttccacatatccactcagaagaaggtctatatttgatatagaatgaaagagtaacacgtaaaaggctaaaagtcaaatgatatagttatataaaaaaaaataaaaaaaaattaaacatcagccatacaagaaggttacaagaatcttatgctcgtaaacgacatccatgattatctaaaacaaaaatagcatgagatgaatactttgcgtcccaaaaactgaaagtgtctagtttttataaagcaaagttatttagagataaaaagcaatagaagatttttcaacaaatcaaaaagcaaaaaggagaggtagcatgatatttaggaaaagatagataagagaatattgtcataaagaagaatttattgttgtacattggtgcacgtgg

SEQ ID NO: 27562 - DNA, 1505 bp, Arabidopsis thaliana landsberg
  unsure (1)..(1505): unsure at all n locations
tttctgcatttgttcaatctatacatcaattagtgtagcaatgtctagcctaaacacttctttgaccaatgtgacgaacctttctttgatcaatgtgaagaacctttctttgaccaatgtctgtgatcttagcgtaagctgaagaagattctgaagcaattctttcactttctttttcgttatcttccttatctttgatcaattctggacacagcttccttgctttgcttgtcatgcaatctgcatcactactgatgaattgatgcagttcgtcattagtagtcgaggctgctgttcctacactcttcaagttcttctgataatcattaccgaatcttagactacgaacaggaccaactgtccagaacctgagctttcgagaagcaccaattgtcgcatcccatttactctgatctacttcctcatctacccatttacattcccgggggttgtgtagtcagacctggtgagttttgtnnnnnnnnnnnnnnnnnnnnnnnngagtttgtcttgtgaatgttacccagttcagtgctagttccagctagagccttctttcctttcatcccacctgaacatctcgaagagaagttatctgaaaagctacttgtcagcaaatcttctggtttatccgctactgttgcttgttctctttctgctaacatctcagtagcccgttcaaaagacttgcaaaacggttcattcttccattgattccctagagactgttttacatcctcaagcagagatttagcttcatgggttctttccatacgtatcaaacagattgcaagattgcacaacttgttattgtcaggctccaaagacaaagcattcctatcacagtaaaacccatttcacttgttaaggcaatgataaaactaacattcttaatgggattgatggtgtttcacaaacctgtaatactgctctgcaattccatagttatgaagctgtaagtgaacccaagctaagttccctagaatcctacatatccaaacagcaagaaagtcagagaaactactctttcaggtataaagcggacatgggagattgtcttgccgtgctttctcttgctcgattgtcttgttattctgctcctcatggcttcttttcgctattttgatcctgccaccataatgtttgtcttgttcaagtgttctcagtttgtgttcaagcagctcagcgacctctgtaatcctcccagacttctgcaaaaccaaaatccatcaaaatcacatactgagcatagaaatagcttcacaattagtcatactgagaaagttttaccatgtagagttcaagtaacaagttatcaatagaatcttgagattcaaaagggcagagatatcgaaaagacttgatagcttcgattccttcatcgaatcggttcaactgttttaaaacaactaccatgtccttcaatgcactatcaactctatctccagcattaatcgccgcccaaaacaacgagatagctcgattcgggtctttagaaaccaact

SEQ ID NO: 27563 - DNA, 1309 bp, Arabidopsis thaliana landsberg
actgttattatctatgactctgatttcaaccctcacgctgatatccaagccatgaatagagctcatcgaattggacagtccaaacgacttttggtatacagacttgttgtccgtgccagcgttgaagagcgcattttgcagctggccaagaagaagttgatgctcgatcagctttttgtaaacaagtcgggatcccagaaggaatttgaagatattctacgctggggtactgaagaacttttcaacgactccgctggtgagaacaagaaagatacagctgaaagtaatggaaacttagatgtaatcatggatttagaaagcaagagtaggaaaaaaggtggtggcctcggagatgtttatcaagacaaatgtacagaaggaaatgggaagattgtttgggatgatattgcaattatgaagttgcttgatcggtcaaatcttcaatctgcctccactgatgccgctgatactgagtgggataatgatatgctcggctccgtgaaggtgtgaaatcatattcatatgtttttctttctaatatgacatgttaatatgcatgttttctagtcacaactaactgtaaggtttccagatgcaagtttttcttatagctgattaacaaaggaacagtgagacaagtctcactagatttactcaaatgacccttaaatacctaggcagcttaaactgcatagttgaattgcctccttttgatagtttatatatttctttataaacagcctgtggaatggaatgaggaaacagctgaagaacaagttggagctgaatcacctgcactggtgactgatgatactggtgaaccgagttcagagaggaaagatgatgatgtcgttaattttactgaagaaaatgaatgggacaggcttctgcgtatgaggttggagttccctctttctctgagttcagcgtcttggctttggtcttggcagcatatgttcttgtttcaactgcttattacttgttagctaattttcatacggacaactgtatatgtagatgggagaaatatcagagcgaggaagaagcagcgcttggcagagggaagcgtttgagaaaggctgtttcgtatagggaagcatatgccccacataccagtggacctgtaaatgaggtaaccattttactctactcctaaaagcatctttttgtggttatgaatacctttgtcgtgacaattaccagtattcctaatttataattattgcagagtggtggtgaagatgagaaagaaccagaaccagaacttaagaaggaatatacaccggcagggcgagccctaaaagaaaag

SEQ ID NO: 27564 - DNA, 1173 bp, Arabidopsis thaliana landsberg
aaaacaaattatttttcgtataatttaaaaatagacccttttggtattttaacataatacaatttattattttgaaaatggagtataacataatgacttataaaccataataacttgataaatgaagtggttataaattgttttaaaacgtggctacatttaaaaaacaagaactcgattttatttttatgtcaatgaaaaatgttccttattggtctgagccagtgaaaaatgttactaagtgttctgcttctgtatgcagcatgcaaatagttattacactagagaatattagttgggtgctaacatttatttaagataacattaatttaggatataatctagataaaaactaactattttttttttatatatctaattattatatttgtgggataattagatgacaccgatcaatataaaaggatcagcagggacgctatgcaatttaactagctggtccagcaattggttcgtctcttacacattcaacttcctcttccagtggagctcttctggtaatttacttcattttacaattgtctctaagtaaataatgcatttactaacttttgatcaaattttaatcatttgttgatatttaaatcataggtgtgtttttcatatatacaatgatatcgggtgtgggcatcctgtttgtgatgaagatggtacccgagactcgaggtcgttcgctcgaagaaattcaagctgccattacccgataactttgtaaaatatcatttactcggtgtcaaaattcatataattgtatacatggcctccctcacttatcaatgaattcagaattgtttgtcccagtttttaaatgcttgattttgacatcattcaccaaacaattggctcttttattttttaaggttggttggttcatgttttgagatacatttccatacaagatataaatttaaagcttgaacaaatatgtactatttgagtttaaatttttggatggtaacatatcaacatcactaacacgaaatcattaccgctttttgccatgatcagtaataatttcaatgaaacaaaagttaatttaccaagtatatatatacagtttagagtacgaacattggaccatcggagttattgctatatatccaaccatggccagttaataaatagtccagatatatgcggtattctatgtta

SEQ ID NO: 27565 - DNA, 1961 bp, Arabidopsis thaliana landsberg
tggaaagcactatcattgtaagtaaatgtttaacaaaatttcttgaagttgcatcatttctattgtgccctatttgtttacatgtctgtatcacattttcattgcagttgtaagacttatgggtcgtgctgcttcccacattacgcttgagtgtgctttacaaactcacccaaacataaccattattggagaagaggtaacgtttttggttgacttcaattcaaattaccgtaaagatatctgaatcttaatcgtgtagatgatagaattagactgcaaatcagattcatatttgtgacacttttccattgaagcaaattattcatttcaatatggggttattggttcagagagacctcacacatgcctcattagatcagtttatatttactcaactttgatctggaaatacttttttgcaggtttctgcccagaagcagactttgaagaatgtcacagactacatggtggatgttatctgcaaacgtgctgaacttggttacaactacggtgtcatactgattccagaaggtctgatcgactttattcctgaggtgtgttgtcattgtaaaaaaatagaatctactacttttaaaccgattaatataaatgttctttttaactgatgattaaatttatttaatgacttctcaggtccaagagctcattgctgaactgaatgaaattctggcaaatgaggttgtcgatgaaaatggtttgtggaagaagaagctcaccgagcaatccctgaagctgtttgatcttctgcctgaagcaattcaggaacagctgatgcttgagagagacccacacggaaatgtccaggtaattgatcatggtcctgtctcctcgtactaaatttccaccacaatgcagttagcttcatctctcacaaatcattattaataataccatgtcctcatctcaataggttgctaagattgagactgagaagatgcttattcaaatggttgaaactgaattggagaaaagaaagcaagctggtgcatacaagggacaattcatgggacagtcacatttcttcgggtaagttacgcaatttgttctttcagttaaaccaaatcgttatataatacattgcttatttattgatgtgaataatacaagcttgatttatggtttgtaatcaacttgaatacaggtatgaaggaagatgcggcttgcccacaaattttgatgccacatactgttatgcacttggttatggcgctggagtactcctcaacagtgggaagaccggactaatttcttcggtttgtactccaccatttccactaaaatctgttttccatctgtgatcataatagcctttggtaaactagcatgtgcttagaatgagatgagttaacttattggcgcaggttgggaacttggctgctcctgtggaagaatggactgtaggtgggactgctctcacagccttgatggatgtcgagaggagacacggtacagaaatataaatcaataaagcttactaagacacattttgaaatctagatattaaaaaatcagagttgatttcaacttgcaggtaagttcaagcctgtgatcaagaaagcaatggtggaacttgaaggtgaccctttgattcccttcccttttcatagttttcgattggcggttagattgtcttgctgactgtctttttgagctctgcaggtgcaccatttaagaaattcgcatcactgcgtgaagaatgggcattgaagaaccgatacatcagcccaggtttgttgcatgtttcttgtctttttttgacataccgactgttgagtttgagattctaatccctccgcgggaatgttatcgactggcacgacctatccaattcactggacctgggtcagactctatcagccacactctacttgttgaactctgggctcactagtccctcgactaaccaccatgtcctatgcttttctgacccccttggaatt

SEQ ID NO: 27566 - DNA, 988 bp, Arabidopsis thaliana landsberg
aaatgaataacccattcataatggatgcaaaagccacaaacatgccattcttagagatcacacaaccattgttttcactcgcaaatgaataaccatccttcatcaaacatgaaggagacataatgtttcgactcatactaggaactagataacaattatttaactccaaaataaatcctgatgggatgtggagttgcatcgtcccgacggtcaacgcagcaactcttgcattattgcctacccggaaatcaacttctcctcttttcacgcttctacttcttatcattccctgcatcgaattgcaaatatgggcaaccgatccggtatcaaatacccaagaattaatataagaatcagcaagaaaaatttctgtaatgtgaatagcaagtgtacctgctgcggctgtacccttaccgccgcgatccttaatagaggccaagtactgcttgcaattccttttccagtgaccaagttctttgcaataaaagcactctgcatctgcagctggtccagccttgggcttttgatttggcttggatactgtatcctttgccttgcccttcttcttttgagatttacccttcttcttaaagttgggtttgttttggaccgccatcacatggccgctgctgccagcgcttttctttatgtccccctctgctgttttcagcatgccacatagttcattgaggcccctctccgccccatgcatatggtagttcgtgatgaagtttccatagctgggcggaagagatgccaaaatgaagtcagtggccaactcttggcttattgggaagcctagcttctccaacctctgactgtaaccaaccattttgattacgtgtggcccaactgctgcgccttctgctagcttgcattccagaaaggctttggacacattgaacctttcagtcctagcctgagtctggaacatatccttgagcgccacgatcatatcgtacacctcatggtttgtctcaaactgcat

SEQ ID NO: 27567 - DNA, 1689 bp, Arabidopsis thaliana landsberg
tgtgtcatcaaagagtttattgggataaatttcaagagtttttactttttatttcatgtcaaaaagttgtatatttcatgcttttatttttgtcaaaacgtttaatttttattgacaatttttaattttataagatggacagaaacacgttttccaaaaacaacaaatggacataaacacattgggcttagcccatacaaagtggatacataaaatagaaaaaccaaattaaatgactagaaataaaaggactgggcccgagaacgtgaaagtaagcccaacttacatagaagtccaaaaacactaaaactttcatgttgttaatattttccagtttgcattattttacacttatacaaataacaacagatgcttgattctcttggaatcttcgaattctctgtctttaagactttacaaagatctcattaattaccactttaaccctgaaatctggtcacgggtctgggtcattttggtcacttttatctctaatcccacaaacgtaccggcaaattcttcctttttttctgctcgacggtctctcgaggacgcgactcacagtcacatcaacagcatgcattcagaaaaatcaaaaaacaaatgaattatatgataaataaaattagttgatcgaggaatcaacctaaattctatagtttataccttgacaaaaagatagcatgaaatcagcaaactcatgtaatataccaaacataccataaaaggtccggtcaaaaatagaaaaacacgaaaaagcattataactaaattcaaagttcaaacataagactcaaagagaagttattagagaccgaatatgccagaggatttgtatcttcttccttttttactatacaacaacaataatctaaccttattttttttcatctctttattacatgccatattcacaacacttcgtcacgctaaagctaagcatatccgctttcatattcctttacacaaccactatttatatatctctatatttaccctcttcttcttcttccaatttcgttataatatacttctttccctttttcaatcaaaagaaagaaaataaaccacacacatttttaaggtaaaaacttgagtttatattttgatgaagtttggaaagaggattaaagaacagatacaagagtcgttgccggagtggcgagacaagtttcttcgttacaaggaactcaagaatctgatctcttctctggcgccggtggaatctattttcgtcggtttgttgaacgcagagatcgacaagtttaatgctttcttcgtcgaacaagaagaagatttcatcatccaccacaaggtataatttatgggtaaagaaaaaacagagcgattgttcttgttgagtttgctaagtcaactgatctagctataaagtgctttaaccatcactgatctatctttaaaaaatgtaggagaaattaatccttttttttattggttgataagtattataactataaaaaaatgtgtaatcgatctgaggaaactttcaacagagtggtattttaggtttctggtattgaagattttttaagaaagtgacacatataaaaatcctccatttaattagtccctagaaatctgtctgtctaatatagaaatttggattattaaataatttgtgcactttaaaaagtattttttgtggaagttttctcacataatataaac

SEQ ID NO: 27568 - DNA, 779 bp, Arabidopsis thaliana landsberg
tttgatttaggaaacacattaaaaccttcatgatggatagggacaacagttatatgtattttctttataaataaaaaaaaatatttatttcactcacatttatcttaaaattagccattgttttttctctgtaatagatctatcgaacatagttgctaccgaatttttcattttattgaagaccattttaaaaatattataatgaacgattctttgcataaccagcatatttatatataagttacgataaaattataattagacgttgtgcgcttcaaataatcatcatcactggtgttgcttgagtctttatattgacaaatgtgatcgtactgagaaaacgtaaaaataatgttgaagaaaggaaaaacaaactgacgcttttgaaaaagggaaaacaaactattaattttttaaatgttttcaacaaaaaaagttttttctttttcttttgagatatctcattttcgtaacctgtccagctagatcgttttatctctatcttattttatgttcataacaagagtctcttatcctttgtcatcaattttcgccgaaaagatctctataaataccatcattcactttctatcacatgaaaactaaaaaacacaaacatcacatgtatacacacatatagttacaaacacacatacacaaaacacagatatataaaaatgtcttgttataataaagcactattgatcggcaacaaagtcgtcgttatacttgtattcctcttatgtttggttcactcgtcagagtcacttcgaccactg

SEQ ID NO: 27569 - DNA, 1220 bp, Arabidopsis thaliana landsberg
tttttattacactccattttttttttatcgtttatttttattacaactgtatttagcgttactagttaaaagactacggttatgaaaacttaaaagtaacaagagtagtggatacaaaacaaaaaacaaaagtaacttgtaactgtggtcatgttgcaggctgactcattcacctttgtgccttatccttctggctcttgcagtttcgttgaagtctccactgccgcctttctccaacgtgtcttaaagatctgttctcacatatcctctaattatctaccacgtcatctctctttcgtatcttttttttttctctctttatatactcataacgaccataaaccaaaatctcctctctttttctctctttacttttttcttccttgccaaatatagcaacaacaaaaaaacgttttctgtcatggaggtcccgattataaacagaataggcgattttgacatggggataaactcgataaacgacccgtcgtatttatctcgagctttggcagtctccggtgtcggaaagttacatcaagcttatagtttttggaaatggggcgccttattgctacttgcattttttgcttcatttacatcgttaactacaagaatcaagactttagtctttagattaagaaatgtaaacgtgtctctaccttcccaaactcttttatgtaattacgacagcgactccgattggtctttctcgtcagactcttcagacgaagagaaagatgaggacgataacaaagaagatgactcggtcaatggcgattcacgcgttcaaagatttggttattaccatgatgatgatgataagggtattagtggaagtgtcccctggttgcggcggtgcagtggtagcttcggagatttgttagacttaggctcaagcggagtcgtgaagctttgggacaatcttgatttcaacggagaaggaagtccggtggcttcttttttcagcaaatgcggctcatactcgttattgtcatcggcggttttattagcggcggagaagaaaggatccgacggcttggaagtgagtgcgtgggatgcacgcgttggttttggggtgcccgcgttgctcgcggaatggaagcagccgggaaggttactcgggaagatcattagggttgacgtaggtgacgtggacaagatctacgtcggtgatgacgtcgaaggagagattctgtgggagacataggatggttacggtc

SEQ ID NO: 27570 - DNA, 1170 bp, Arabidopsis thaliana landsberg
aagatgtgtaaaataccagggtaaaatagtaattttaccaactaattcctgtaaataacgcttacccgttaccaccaatcgtggtcctcttctgctcggacacactctttttatataatctctttctttcacataaagagaaagcggaataaaaagtgttcaagagctcataacatcaagaaaaagtatattcattcttctgtatatctctgagaaatattatgaatgttgtctgacattgaacttttttaaaagaaaaaaatcataaacttctctctgttttgccagaatcttatattataaagtatattctattcattacagatctgctcttggatttcggattctcctgcaaacgtaaagacgaaggtgtcttttcttcttcactgcgaaaaaaactcttgaattttatggttttctttagagctgaaatagtaaacgagtcttgaccaaaaaaaaaaaaattcgttttttctctaatgatttttgtggtaacggaaattttagttacagaaactaattctttagcctctatactaagtctcgatttttttttttttgtttcagttcacattcttattgtttgtgctttgaatcggtgaaagatgattcaaatggatggtggcgataggctgagagtgactttattagatcgtatgtcaacggtggagagtagccggagctgtttaactcttgaagctattctaatggctgataaaaacagaacctcgccgcagattctctcaccaccgccgtcgaggagccaatctaaccggtcacttgttgaagtcatgcaaagagagcaccgacacagtagagataaaaccgcttggaaaagtctccgtgaaaagctccgtcttaaacgtaacgctactgtttggatctcgtctaattctatcccgagtttggatacgtctattcctaaccgggataacgttagccaccaactcggtttcctcctttctaactctggaaatgtaacggaggaagcttcgtcggtggagggaaggattcggttaggggctgtgttggcagaggagagagcattatcggctagagaagaggaaacgccggcggagagggaagtggagccggcgaggatgtctttgatggagttgttggaagagaatcaagggcaaatgagtttggtaagtgttgacggagaggcag

SEQ ID NO: 27571 - DNA, 1974 bp, Arabidopsis thaliana landsberg
gaatcggttggtgggttttttgaaaaatagatttttttttgaaattttttgtcaaattctgtagaattgttgttgtggtgaatttattattcatcagaaggtaaaaaaattactttttgttattgggttttagatgtttgaatcgcatctttacttctatgagcttgttttatgagaaagtttgattctttgaggtttttgaattgttttttattgtgatgatgctttatcttcaagctgtgggtttcttttgtctttgcttttaccttgctgtttcaatacatctttgcttggtattgaggatttgtgaaacttcatacgctgttgcatctatgggtagttgatatgtcattgatgaggcagtgcttattttgatatttctcttgtttttctgaattgccattgtggtggtagttgagtaaaatgtttttcactcttttccttgtttcaaaattggcatgctttttacgtggtcctggattttgtttgtacctcattttcattgacgctttgtttcgaagttggcagttaggtgtcaatttgataatttagacttgaagttcttttgtgtttagaatggttgatcatataaattttctatcgcatctgtcctcttattttttaagcttgttaataactcatgtgtcattagtttcctactgaatcatttgtgttttagttaggcgtcgcatctagaagtaagttgcatttagtagtagttgcagcggtcttgctttgagtgacttttgcaccttgtgctcttctaggtgaagcagattatatgactgtatatgcaatctcagggtgccatttattattacaattgtaggagctatgttttgattgagtgtgtttatatgtttcttattacagttgacatcgtgtagaagccttttccttgtctttgttactgaaagatctactgtctttgttgttttgcagtctccccattaggcacattgttgagggcagggtagtctcgtgagttctcttctcctgagtgtaactgtggttaaaagcttatccaagatgcagggggagagggccagtcttggctatttatcagaggccttgaactttgagcatggttcttcttcaagtaatggtgtgatagatcattgggagaatattcacagtcttggtgataatgacttgcaggattacatgattgcaaattctgaatcaaatacttcgcttgcaaactcagtttatcacgagcaacagggtttacgcagatttagccttggtgaggctagctctagtggcacgaaggatgaagcttccagtcacaatgagcaacgaatggaaacaagatgctttgacggacgaggaaatgaaataattgatttagacccagtgtttgcgcagccatcacgcacaaatcaacctgttcagaatgtcaatctgaatgcagagtatatagaaattcacgaggatattaatccatatagaggtcggtctggcttcatagaagctaatggaccagggaccagggtctcacaacctggcagatcttttgaagagaacggtgttggaacaggttcttctgtagagggacgtcgtgcatcctgcaaaagaaaagctcttgaaggcagtattagtcaatcttcttcaggaggttatcatgatttccagcgtggagaaagcagttcgtggaccccaggttctacggtttttaggccaggaaatggtttaaacatatctggctcccttgacaatggaccaagaggaatggtctccggtactgtaccaaattttgctgtttctgcaccaaattttcctgtttctgccattgcagagagctccagtagaaatatatgcgtcaggagtaatccctcagatcatcacagaaactgttaacccatctacctttgctgcgggaactgttgtcaggcggcctgtccctccatcccagttgaacttgtcaagacacttaccagcagatcagcattcattggactttgagacctgaca

SEQ ID NO: 27572 - DNA, 1543 bp, Arabidopsis thaliana landsberg
ttggactacgtggtgcaatcttcctcagctttattttgcgatctatggacacgattccaagtctttgatcttgttgatagcatggttgcctgctgcggtttctcttgtgtttgtgtatttgataagagagaagaaggttgtgaggcaaaggaatgagcttagtgtgttttaccaattcctttatatttctatattcttggctttgttccttatggcaatgaacattgctgagaagcaagttcatttctcaaaagccgcttatgcggctagcgctacgatatgttgtgctttgctttttgtgcctcttacggtttccgttaagcaagagcttgaagtttggaacatgatgaagttacctatcgaagagccaagcgaggtcaaggttgagaaaccaaagaaagaacttgatcttgatcaggacaaagccgccaaggtgaatggagaagagaaggagacaaaatcttgtttctcgacggtgttttctccaccgccaagaggggaagattacacaatattacaagcattgttaagcaccgacatgataatcctatttgtcgcgacattctgtggtttaggatcgagcttgactgctttagacaacctcgggcagataggagaatccctcggctacccgaaccacacggttagttcctttgtgtctctagccagcatatggaactacttcggtcgagtgttctctggctttgtctcggaatacttacttgcaaagtataaattaccccggccgcttatgatgacattagtcctcttattgagttgtgctggccaccttctcatcgcgttcccggtaccaggctcggtatatatagcgtcaattctaatgggattctctttcggtgcacaacttcctctgctctttgccatcatctcagaactttttggactcaagtactactctacattgttcaattgtggacaacttgctagcccgctcgggtcttacatcctgaacgttcgtgtcacgggaatgctttacgataaagaggccttgaagcaactaacggctcgagggctaacccgaaaagacgtaaaggacttgacttgcttaggaagtcaatgttataagctgccgtttctgattttggcagcagtaacgttttttggagcacttgtatctttggggctagcgataaggacgagagagttttacaaaggtgatatttacaagaagtttagggagagtcctgagtccgagtctgaattagttcctgattcaagaaaagctgttgaatttgttggtaaataattatcacacaaattgtttttgttacttgaatcatagttgaataaattaatagaaaagagccgtttaatttctttagtctttctcaacttggtttacttttctttaattcaggacaagttgttgaagcatttcttttgtcggtcaatctaaaatactaaaaaagggtaatagtaatcatgtgataaactgataatctcataacattccaaaacatcacgttcacgagttgtaatgttacatcgtagagctgtcatatagcactcgtgtccgtctccg

SEQ ID NO: 27573 - DNA, 878 bp, Arabidopsis thaliana landsberg
aaggccaccatttacaatgtattttgctcatgaatgtcaacggcaaatgatcatgattgacgttattaggtcgttttgggtcatcaatgtccaacgacagcttagaagtgggattcataaattcaaaactgttaacataactactgtaattttcttatttgtactctcattagcttttgataatatgaccaataacgccaattctccgtggcggggacgtaacgcgtatgtttagtttggttgccgagaggttgagatgctagttatgggttttgtatgagtttcgggatgtattatctcacacaaaaagtttgtatcgtggaagtcccttgatcgaagattaacatttctaataaagtttagcggtgtagaactgcccacgcctctgtgtatacgatttaaaaggtattgaatctaaaattttgagattttattttttactttttgtttcaaactaaaatatatattagtcatattttctaattaagaatctaataaagctcagcagtctagacccgtccacgcgtctatgtatacacaatttaaaaggtattgaatccaaaaatttgagattttatattttttactttttgtttcaaactaaaatttatgtttttttttttggtaagccaagggagacaatgtctcccaagatttatgttagtcatactttctacgtgattatctaataaatctcgtttatctaaacctgtccacacgttgacaacggtttatcatcaaatctccaaacctctaaaaacattgggggttcggagttaaaaaaaaagcacgaaaaaagagagatagtgagcgttaagtgaaaaacagccatggaaagaggtaaagggggaaaagaaccattcagtaacacttggaaa

SEQ ID NO: 27574 - DNA, 1617 bp, Arabidopsis thaliana landsberg
cgctttgtggtttttgttctaagagtgagtatgtctaactttatttagttactgttctcaagtttggtcatatgagtggggatatacttgcatatggagcatcagatggaagcttaacagtttgtagtctcttagaagagccttctgtcctcaagcagttgacaggtcactctaaagatgtcacaggttcgattgactggtactgttacttttgtcttttctgtatctcagtatctgctacactgaattgctcttgaataatctgagaatatgatgatacatggtacctactttctatgctttgttaggggtaagatttgagtggaaaatgtaaaagaattatctgtaatggatagagcataagtgtgtatgtatgtcattgggtttagatcctatgtctaatattaatacaaacttcttatcagattttgacttctcgtcaaacaatcaatacatcgcgtcatcatcacttgataagacaatacgagtatgggagttgtcaagaggcgtttgtattagagttatatatggaatctctccacagtattggatccgtttccaccctgtaagtttgatgttcttcatcatctttttttttttttttttgtcaaagatgttcttcatcatctatatatttctcccttgtaacaacttgcaactttttgttttgattgtgaaagtcgtctcatataagatactgagtgcggatggtttttgttgttttctcttgcttctccattgaagatatttcatttccatattttcaacaggttaataacaatttcatctctgctggcaatgcaaacaaggaactcacggtaacttcactactccttgtagctaagtacattagtgtattgcttttttcgtttgttttctaattgtttacttattttatgcctaacatctctctgcttgacaaagtaggtgttcaatttcagcactgggagaattattaaaaaactgttgtttgaggatgaggtgacatctatggaccatgatcacactggccaaataattttctgtggagatgggcaggtaacttttctatactgatgtaaaaagataaaaactagggagatggtctgttatggttatggttggctataccgattacctatgttgtggtcaagactgatcaatttttgcatttgttcggtatgctagaaaaaggcatttctacattgtttttacaaggtagttaataataattgcagggaactgtatattcagtaagcatggattcgcatacagggtcattatcccggtctcatcgtcatcgtacaaatcacaaatctcctgtcaccactgtgaagtacagaagcttctccctcctggcatcaggccctgttctgctcacatgtactcaggacggaaacttgagtttctttaggtttggcgacagaactacttcttttttttctttcttgtttttccttaagagatccttttttttttttttttttttttgtcaaggtccttagagatccttataattgatttttctgctttgtgttggtgatgcagtgttgcccttcagataaaaggttatttgactttgcgttgctccctcaaattagccccgcgaatacacagaatccaagcatcgttttgcgc

SEQ ID NO: 27575 - DNA, 1639 bp, Arabidopsis thaliana landsberg
aaaactacataccaacaaaagatacaaaccaaaaaaggtattcctctatacattgaaacagaagttaaaattgaacaaaaaaatttggtactaataaaactaacctttacttactaaaatatatactcgtataagatttagtcattatgtcaaaatgaaacaaatttcatttaactttcttgtttgataaaacacaaaccatgcattaataagtagatattatataccatgcatttataagatctctataattatgaacgaatcccaaaaaattacagtttataaaagcttttaacattttcactaataacaaaaaatgtatttcgcgtatcaaaatatttcttccttctcaaatttaaaattattcccgtgccaagtagggggtatcatatagcacaataaaagcgcaggtcaaatatctatttatctagttcagaagagtaggggtgttatgtagccgtgtcccaaagttcttgagaactccaaggagaaaggataaagaatctcttagagaaatatgatgaactacaataattaaggggaggaagaatatatgttcattgaaaactctagaggcaataccttgtttgcttgcagaactgaatgcatagcctatacggcacatgccaagaagcaggaaaaatcttccaaatttcttcatttgttcggattcgacgctttatccaagcatatctccgctctgtcttatccaactttgccaattctgccaacagctaacctcttagaaattcaatccaaaaaagacaaactattgccagttatacttagggcattaagtccaatgtaccagctccttcaaaaatttgttcatatgaggtgagctccctgctgcaaaagttatttaccaactcttccctcacagatggttccagagcatcaacaaccaagcaagaatcagataacttctgtagcaaatttgtttcctctgtatctttcccagtacctaaactgagataacaacatcatacaattttggtaaatgttgatttcaggaatcgaataaatagaagggagggaggggagtggtctgtagaggatgcaaaagtgaaaataaatatttgaaaaacatcttaaaacaaactttggtttcctacgtaaaccaagcaacaaataaccttagtcactatgcaggcactattatagcaagaaagatgtcaacaagcattcaactcaatttatgacaccaaaagtgcaaaattcatcacatgacacacttaaactctaccagaaataaaaatccgttccagctgtaatgttcttgagattgaagtaaaggaatcgagaaagagaagaagaatcattgaaggcattacctggaaaaatcagaaaatacatgggacttaaggatttgctttatattattaagcttctctctgagctccgtgattttaggaacatccctgtatgcttcaaagtggttacacaattggtttacagcctgaaatatatattatagaattagaatcctaagaacataatcagaaaataagtagagtcgttttctaggtagcctaacgttaaatttgattttcaaaatgacaatgagctggtttgggggttccatagtgaacataaagctaaagcagtgaactgcacccaatgtacagaaggcatcaca

SEQ ID NO: 27576 - DNA, 1178 bp, Arabidopsis thaliana landsberg
aaaaaggatcaattcaatttcaatcagattcaatattgctataaattgggttaaacccgaaataaaatcaacatagcagatatttgagagaataaagggttattaacaaacagccaaaaaaacaatgcttcgagatttatatatcaatcttgaataatctcggataatgatgatgagagaaacttacacactctctaatctttcttcttgataaaggcaaaggctcctttaggaattttgctcatcaccttactcaaaaccttcacgtcgaactccacgtattgcttcttgatctccctcatcgccttttcaccaaagtcatctactttatcttcatacttctcgtaaagcacgggaatcgtgaagagaagtacagttgctggaagcagaacaaaagaggattatatattacgaaaaaaaaaacacaattggtgaagttaatcgattagatgcaataaaagtatggattcgtaccgatgtagattaaggtcaagaagttgcaggagctaccaactttggacaaaacccataaaccagcaatcacctaaaacatatttgtgaaccaatgttaaaaaaaaataacaagaaaccagcaaaatcaaacaacaacataattaacaaaaaggtttaccaacagaaacttcttaagatctcttcctgatgcaatgtccctaagaacagtaaatccacgattgatttcaatccttaatccagaaacaagttgaagaataggatcttcagggatgtgaacttccgggatgtgaggagttgacctgaggataagaactcagttgatcaggcagttatctcatacttaacacttaacatataagggatgttgtaagaacatacttgtggatgaatgtacaagcattagaccacaagaacaatgctgcaagagcaaaaatcgcaaagtgacagagaaaagcgaggagatggtattcgtataactcgaataagacccaagacgcagttacagcacccaagactccaccagataccttattgttcctgcaaaggaatatatcagcagctacatgcaaacaatgaatccagattcaacatagtttctgagtatttcacaagattcaagcgtactttcgagcacagcagacaattgagcactcaaatacactcaattttagcttcaaattagagcaactttcactagatcgagc

SEQ ID NO: 27577 - DNA, 2399 bp, Arabidopsis thaliana landsberg
tggtttcacgttattgctaggctaacccaagagattggtgtatctcatcatgtccttcgtatttaagtagaacacttcattataaagcgattttatatataaaaaaaaaaacttgtcagcttagcttcaatgaataaattattaaatgtaacgaaattaaattattacaaatacaagtctctagtaaaaaataaagcttagtgagatggataaaatgaataattttgggctgagtcaatcgtttgatcaacagcttctagcctatcaatgtatggccttcttctgtatgctctctcctccaactgtgcctattcaacagagtcaaaaacgcaaatctttataaaatcagtttaatagattttccgacacacgaagatcacaacatcttgcatgtaagagacctttccgttttttattaacctataagcaccaagatccaactaaattattacagacacacgtgctacagcgagggatcacgtgccaaagcagggcctagctagctgagggtggatccatgtgataattacatcatgggcacatgaggccatgactgacatcaacttaataacgtgaccaacttgtgtacgcatgtgtgcgtatgtctcatcagttttatctggtgcacatatatagagtacacacaaaaatgatggatagacagaagctagatggttaagatttaagaacaacactatgtgaagaagacacattaatgtataatattactaatttgtaaattgtagtcgttgtaaagatatatatatatatatatattaaaaaaagcagtaaatttatattaactaaatagtaaatacgtatgtgaaacaaatgttgactctgatatgtatatttttttctcaaatgattattgctatagtacttaattatccaaatatgtaattttcgatatctttttagtgactagctttcgatcgttataattaatagaatgacaaatacctgatataggaggagtggaaaaagaaagaggtttcgagaatgaaggttgtggaaacccgatggcttgagattgatgataaggatagacagtgtagaaaggcaccattggacttgctgccccaaccataactcgtcctccaccatacatgtgatggtggtaatattgcggttgtggctgcgattgcggttgtggttgcatttgtgcatagtatccgttcatataggttcctccgacatatccaactttctgttcattaaacaatcacataagaaattcataattaagtggaaaatcatagaagaatatcgattttttttaatgaattagaattcatgagacttacttgattgaaggtcatgttcggggcaacgtatgcggaaaggtaccttaattcaatattaagacgggactaatcaaattatcatacctacatattcaagaagattaaaccctagacaattatttacccatagaaaggaacggcttgatgattttgttgttgatgttgctggtttgtgaatccggacgggtagtaccactgagaatgatttccaacatgtggtggcgtggccctgttcccattttttggtccttcacatgtcaaaacatcattgatgataatgttaatattggttttgaaaattgattctaaaaaggttgaataatggcaaagtggtctttcgattccattcatatcaaggtttaatccttacattgtctcctatctatggcaaagtgttttttccaaattgtaagtgaaaacataattagcttttttataggacattatggccaataatgtgtatatatatatagcttttttattagataaaataaaatgaagatggaccttgttgaggagaggtcatggtaggggatttacgaagacggccaccgagggaggcgagattgcagttggcacggcggccattgatgatcggagtagagtcttcgcaagctctcgtggcagcttccgcatctttgaaagtcacctatcaaaaacatattttaaaacaaaatgagaaaggagcaaagaaacaaaagtgaaagaaaagaaacgagagaggaaggaacatacaaagccatatcctttggaacggcgagtgagtttgtcggagataatgactgcctccaagatgtccccatacttgatgaaatgatcatacattgcttctttgtgagtatcccaagccaatcctcctacgaacactttggtcagcttcgtgtctccgaaacatccgttcacgttgttgctcgtcgtcattggatcgtgtgtgtgtgtgagagagaaagagagggcagagatagagagagaaggagagcgaattgaattatatatcaaaagtgagagagaataataataaagaagttgtgtaaaataaagagtgacagattggtggacaggtaagtcttaacgtgatcactacacccttca

SEQ ID NO: 27578 - DNA, 1370 bp, Arabidopsis thaliana landsberg
tatcaggtgtcagaatctgactatcggttatcagaagactaagtgtcattcgtcttacaaagcgttggatgacccgatacgtaagctattgaattaggatcactcttattgctttccgttagctgtttctttttctacaacaaaatggatttctttgaatcctcttattttattgcaagtgtttcttctcataaagtaaactctaatcatatcttcatcgttaacgaagtatataaaattgtcacggtatcatccgttgccaagttggtaaatgaggccacaagagatacatcgatcgagaacttgccatgtcagtttggatatttaacacttcgcgatgaaaagagaaataacaacaacttacatgtagtaacaatatatatagaaaatgtagtaacaatggtgcgtttcttttataatttatgtatattatagccttcattttttcgcactggaagagttagaaattcattgtataggggtcaatttttttcttaattaccatatacagtattattattagaatgtcaacatatgataaatatttttggacaaaatataaataatatggtaattcataattcttgaactagtttttggattaagttatgccaaattcctaatatgatatcatagccaaggttagtccaattaacaaatgtttcaaaaaatggtttttcacatgtgtgatccatataagtagtatgtcttgttgtattttccacctatgtagtgttcgaatcggatattttaatattaggtgacagaatctgactctaagttatgagaagattaaatgccattctttttttttttgggcaaagccattcatctttcaaagcatccgagcgcatcacgcaatgaattaagaactcttctcgctttcgtgctttccgttagctggattttttttgtaatcctcatattttggtttttggtaatcaagtgttttttttctaactaaactcacatttaattcaactcaatttaaatgatgttagctctagttccgaacattcgaaaagatactttgcaactgtatcttccaaattccaacaacttcttgatatttaaattatttataattgatgttaaactaaatcaaattaattgctcttaaattactttaaaatgaatgagaaaattaattttttaacgatgtgattattttcccatcttatttttcttaattctaactaattataaataaacaaattaagccaagctgtaaaaaaaaaaaaaactaaaagatcttgtatatagagatcgtaaattcataaactaaaaatctaaccgggataaataatcacaccgtctcatatttccaagcaacgatcccactacatttctgccggatccttcgtgaattc

SEQ ID NO: 27579 - DNA, 1195 bp, Arabidopsis thaliana landsberg
  unsure (1)..(1195): unsure at all n locations
aacatcactcgtcgttgccgccgcaaaattccatcttaaatgttttgttttgttaaataaaaaaaaagactatagtttttgaggaacttacttacacatcatgacttgtgttggtgtcagtgagagtgagtgtatgtatatatgtttccatttagataaaccggaaattggtttttggagccgggttaaatgtgaaacccgtttggatttttgttttgtttttttatctcatcttcttcttcagaaaaacacaagataacagaattgccaccaaagctccatttttatccccacacagaagaagcttggggaatgagaagataagagctctcaaaattccccgaatttcgaatatgattgtaacactaaaccctaagattctccatttctccaaaatccatcctttttctcgaccttcttcgtatctctatagaactcgaaatgtgtctctgataaccaattgcaagcttcagaagcctcaagatggtaatcagagaagtagtagtaacagaaatctcacgaagaccatttcactttccgattcagcaccgccggttacggaggagaccggcgatggaattgttaagggaggtggtaatggtggaggaggaggaggaggagacggaagaggaggattagggtttttgaagattttaccaagaaaggttttgtcagttttgtcgaatttgccacttgctattacagaaatgttcaccattgctgctctcatggctcttggtaagtgttagggtttttgtagatttgaattggtttgttgcattagagttgagaaaatgattaaagtttcatctttttagggactgtgattgaacaaggtgaaacccctgatttcnnnnnnnnnnnnnnnnnnnnnnntaatcctgcactagggttcttcacttgcagatggatttccacacttggattggatcatatgtactctgctcctatttttcttgggatgttggttcttttagcagcttcacttatggcctgtacttatactactcagatacctttggttaaggttgcaagaaggtttgttttagttcctttgttcgttttgtaactccttctttctactgaagagcactaagggaactttggcaaattgcagatggagttttattaacccagacccggcgattaaaaagcaggagtttgcaaatactaatcctagagcttccattcaaga

SEQ ID NO: 27580 - DNA, 1249 bp, Arabidopsis thaliana landsberg
catccgagcggaagtgctatatttgaatacatagaatgactctattacacgtctcaagacatggatctccatcagaagaagtagaaacaccgctcgccacactttaaaccgatgctcaacatgagtcatatggaaggagaaaacgtgggaacctccggccattttgcaagcatacatccaagttgcagcaagcaggagagttgtccacaccactccgacaacatagaagtgaccaaagaacttctgaggaactgtaaacttctacatagagagtataacacatctgagttacttaaaaatgctttagcccttttccacattcaacaatcaaaaacagaacaagttcgaatatttttacgaatacctgagaagaggggtgaagaatcttgcctctaccagcgaaactcaaaacgagttcacgaaaagagttaagctttgaagtgggtatcgaagcaatcaccaaaggaagtatagagacgatccaaacagtgatccaagcgcctctaaccaaccacacaatctccaattccaccatacttttgtttttgttttgagtgtttcttcttctctgaaatcacatatagggtttaatcaatttgaataagagaacccaaatcggggaagaaacgtataggattcttactattttcttcaattttcgtgcgagggaaaaaccagttgtgaagttaagagttgttgttttgagtcatgcttgtgatttgtgataatctggaattataagtcaatgttaatttgttaattatgtaattagcgataagaacaaaaacgttaacgcaaaattaggtgacaaaatactcttttaacattattttttttggcaaccaccacatgtatgatgtgtagcattttgagaaagcttttctttttcatcgggtaacttactacaagcccaaacaaaataaatttgtgagccatacaaaaaagttgttcacaagcccagtaagaaatgtgtacttttttagttagggtttctactttagctagtcacgaactcacggcaatgtcaatgaactgaattcaaactgaaccagccaaagagcatacacaactggtgaacctcactaagagcatctccaatggtaggttctccaatgggattcttcaaattttaaaagaaagtgtatatgatccttgtgccttgtaataaattacagcatatatgcatttcaaatcttaccaatctgggaggtcttgtgtttccttttttacagacagttcttcaaccagc

SEQ ID NO: 27581 - DNA, 1901 bp, Arabidopsis thaliana landsberg
  unsure (1)..(1901): unsure at all n locations
actaaatctgtatcttctagggtttggggtgcacctattttcctataaaagatttttacatacattttcgaaatcgccaaaaaataggagagagcgagagttcatggtttacatcaacgaaaactcgaattcttattaaggagaaattcattgtagttttgttgatctatatcttgtttcgcatacggatagatcttctacggaccacaccattttttccgctcatcaacctcaaagggataattttacaccatttcaatctcataaggtatcttcacatccctattagatttgtttcactacatagcgagcataatacttttgaataagttgtaaattttcatgtaataattgtttttaaagtgttagagacaaagggcatgaacttgttaatgttccagatttgattttcgtatgaaaactattttacataaccatcatgtgtagtgaatcttttatgtattcaattcaacgagatcttcatattaaaattttgaagaaaagaagaataaatctatacatcatattttaaatatctacatctaatatatactaacaatttggtcacttggagttcattgccaaaagttatatttttcaaagaaagttcactgccatcctagtgattctaaactcttaagatatgaatggtagacaataggaggaaaaggataaggtaaaaacttttaatgaaattgttttgactaatattttgggggtgaaaaaaaatcactactctaggacactatttcgattaagacaactattaaaagaaaatcattttcatttttaaatgaatagttaacttacaatattcttagcaacaacaagaaaaactaacataaaacaaagctcaatctcgtctttaagtcaagtaaaactttgatttattttattcatcaacctaaatgaccatataggatttaaccttacattatattcatcaacctaaattaccattcaacaaattttcataacctaatgtaaaatgtaattctaaaaaaaaatacgaatgacatgcaaagtatcatgtgtccctacatttataaaaactctcttgtttcgtcttcttcttctccagtctctccgttcaacaaaaattgaatctttttgacatagtttgtataagaatcattgtatttggtattcttcttcttctttttcgcgaacgattactctagtcacaatcttattttctctgtttgagttcatatatacccacaagttttcttttcaaagtctcagttttttttttgctttttctatttcattgcangttttcaagattccgagtatatactttgggtttgatcaagctctctactactttctttcatgtcttcttttcataaaggtaacgtttgtattgggattctgcatttcatagttttagaaagttttagactttttnnnnnnnnnnnnnnnnnaacgtagcgtaacgattgttttaatcttgattttacatcctagagttgttttatttggaaagttacatgattgtgagtgctaattatattggttgatgtgttgtaccataaaagaggaaactttctttgtctaagatgttcttggaacttatagtaatgaatgtggattcactacttgctttgtctttgtgaatgaatgtggaaacatgtatcttgttctcttctgggttttgtgagcttttgtattgttgtttctagttctctggctcgttgatgtctcagcaacatgtagaatttgagttgttttgttctgcggttgtagttgaggtttctttgtgttactgtacaaggtaccaaattagattttctagttgcataaattttgatctgaaatgaagtttggtgaacaggctcatgtagcttttacttttggtgatacaatgttatttacgacacataagcttgtttttcttc

SEQ ID NO: 27582 - DNA, 2240 bp, Arabidopsis thaliana landsberg
gctgtactttaagtgcttaattacctgaaagcaaactagcaacatattacacaagtaaactcttttccaaaactgagtatatatgattgatgccggaaaatctaaagctagttctgtaaaaaaattagtatccagtttttgaattaaacatgctcttgcttgaccaagttccttgttaagtgagaaaagaatgtataccctgtcatagcttttgaattttgtaatgagtgcatgtgctcttttgagtcccattcctggaagtgactgcaaataatcgcagccacttaatatgcacatttcgagaagcatttggcttgaaaatcctgatagactgagatccttatttttgggtagcttggaggcttgaaactcaacaccatgaccaaacttgtccattttgaaaatgatctattacataaaaattagcagtgaaagtttgaattatactctagtgtcgtgtcgataaggaattaaaattctatataccagtaatgaaatggaaattctgatgaactgcatatatctcatgcaaagtgtaacagaaaggcttactcttgggcagccaaaaggtatgagatcagaatcctcagtgataatcgcatcaacttgcttagtaatagctaagaatgccatctgcgcatcagcttcgtaaggagcaacaacgtaatcaacattctcctgcctcagaaccttgaatggtagaaattagaaaacttcggttcaaagaaatggaaaacaaagcaattaaagacaactatgaatctttttatcaggagaagagtactgttacctgtatcaactcatgtgcaatagaaggtgaaatatctacggcctttgagtagcactcataagcagctgaggaatttccatttgcttcatgctccaatgcacgagcaagattttcctttctggacctgaacttgattgttatagaaaagaaatgacttggtttgaaacttgtaagatgataaccaagaaaacaaacatacatttgcatattctgcttatattagttagccaatgtttgcatacctagcacgcttattctcttgttctagtttcatcggtaacggacctccatcaaagaccatgataggcttcactccatgatggcgaagtaaattcactctatgcatacagtattgaatatgcctgaaagattaaacaccagtaaaactcattatcttctacaaaaccagaaccagaacagtaacacgagaacacatcttaaagtgtaaaacgagatctcaatcacgttacccaacaagcctaatggtgaaaattctagaacacccaaatctttcgagtttggtttacctaacatcctcaagagatagaaatcgaaatgcccatcaaatactacccagaaaaggtttgatttttcagagtttacataacgaattaggaccatagacttcgagacaaagaaacccactttctactaattgggcaaaaccaaaatcattatcaatctatatctgggattcatcaagcaacttgagaggagggagagagacgaacctcttggtgggtaatcccttgcagagctctcggctacaagataaagcccctttgtgtagccatgaatatgtatcgacggcgacgatacaaccctcgagatccttgatatgaatcggtaccattatcgatttcaacaacggcaaaagcccttgtatacccatttttctctccttcctgtttcaaatacgaatctgaaggacgggaatgaagaaaccctaatgtcgccctgacgagaacatttcaggaacctggactgtatcgacaatcgaggaggggtgttttgacaaatctggcgggaaaattctaattagggattttgaccagattttctctgaccaaagactctcgaaagattttttaattcataaattataaaagattataatttatttgcaccaaaaaaaaaacccaacaaacaaattgtataaaggaatgaacaaatcaaatgtgatttaagaagaaaaaaaagttactaattaattttagtcaaacagtaatttaatggagtcgcaattttgtagatgtttagtctgaaaggtttttatgccaacttaatcaaaatataaatcattgcatgaccacaaagatatagtgatacacaccagaaaaagaaaaatacattatcaacatcattttcattaaattggtcaagatttattaatggttgtgatggttctaatttattggctatagaatcaattttttatgttttatttcca

SEQ ID NO: 27583 - DNA, 1171 bp, Arabidopsis thaliana landsberg
  unsure (1)..(1171): unsure at all n locations
gctacaacgagcccaggctcacagcttacctcctccacgtaaggaagctggaaaaagacttcacggccctggaactacaacatgttcctcgggctgacaactcgatggtagatgaactctcccagaggacataaacttgggcacctgtgcctgagggcgtcttcaaaagacggctgctgagacccaccacctagcttaccgaactggacgaagggggcaagactagcacctcgaagctagcggtcccggtggcgtaccatctacagaacccaccgaagactgtgggtgctacagagggtcctgccagccccttagcgccacagtcaatgtctcagagtggtcccgatgcatggatctccgagattcgggactacctgaaggaaaacatccttcctaaagatcatgtgtccacagagcgaatagtgcggttggctaaacgctacacggtggtagagggggattctatctccgtggcgccaacggattctcatgcggtgcatcactaggaggagggctgtgggttgctcacggagatccatgggggnnnnnnnnnnnnnnnnnnnnnntcccacacattggtcggcaaggccttccagcatggcttctactggtcaaccgctctccaggatgcagctgagatggtaaagtcctgcaaggcatgccagttccatgcaaagcagatacatacaccagctcaggctctgcagatgattccaccctcctggccattcgccgtatggggggtggatatcctaggaccattccccagggccgtcggtgggtaccgtttcctcttcgtcgccatcgacaagtttacaaagtggccagagcaccccttatggtcagcatcacccagggtgctgctgttgccttcctcaagtcgatcgtctgcagattcgaggtcccaagccgtatcattacggacaacaggacccagtttacaagtcggctcttccaggagtattgcgagggcatcggcacccagctctgctttgcgtctgtggctgatcccaagagcaatggccaggctaagagggcaaacgcagaaatcctcaggggactcaagacacacacctataactgcttgaaaaagcatggtgcaaattgggtcaacgagcttccatccgtgctgtgggggaacgggacacacccagccgagctaacggggaga

SEQ ID NO: 27584 - DNA, 1366 bp, Arabidopsis thaliana landsberg
ccaagatatggttgtcttttcacgtcattcacaaagattatataggccaaacaatgaattttactccattaactgcaaaaatattcaatatatttcctttgacaattttctatttaactatgccgttacgttaatttcttttagacttttaccatgttattattaatttgtgtatgtaacaattaattacgggtaccacgaattactcattggacacatagactttaaggtaagaaagattactcattggattatttttgttgttgttgttgacatcattactcattcgaattaaagctcaacataaaaaagtaaagaaggctccgtttatcacgaatcagtccatttattcagttacgtcgtcgcaccattgttttaatttcggtaactgtttcttttttttttcttttcttttgcagtaaccattgtttcaataatcgtgtattagagtgtatatactttaatacattgttattagagaaaaacctaaagcaaaggaatcacctttatattcctctgtatcgccattaccattaaagaaataattttgggattttggattttcctcttctcgtcttcaattttataatcttctattccacaaaacccttaattttcccgcactttctcaacgcaaaggaaggatctttcttccaagacaatgaggtgggagagggtccaacaagtgggtctcggtgattcttcttctttcggccccggaaagagatggggacacacttgtaacgccattaaaggcggcagatttctctacgtatttggtggctttggcagagacaattgcttaacaaatcaagttcatgtcttcgacgctggttagtatcttttctacaaaatgtcagttcttgtccgtcgattctcttagtgggttttgcttaaagtcttaatctttgatgcatctctgtatgtatgtatcgatgattttgttcaatttgttcgtgcggtagaccccactctcacaaacttatcttattttgttgcaaatcttgatctttttcctttgtcctttagtaacctactcaatgtttctttctttgttataccttacttgaatgatttggactttatgatcctttttcaagatttaatatatactatttgttgggatgctattttgtggtttactcgtagtcatgttttcaaaattttcattgttgaaacaagtctcatttgtggcaattttgttgcagagacgcagatatggattcgacctgaaatcaatggcgtaccgccctgcccgagggacagtcatagctgtacaacagttggtgataacctttttgtgtttggtggtactgatgggaccaaatatctcaacgatgtgcacatccttgatactagtaagctt

SEQ ID NO: 27585 - DNA, 1384 bp, Arabidopsis thaliana landsberg
atctgacaaatagatgtcgttgcgaggacagtaagtcttgtatagaatcgcagtgtatccaccaaatcagatttttggtggtataaacgccgaatccgagtgtagtagagatttgcctctttaagtgcatttgttatcagaatgttaacacaaatgacatatccatcatacttgtagttttctaaagtgggtgcgtccaaccggatgtgtcggagatccggcataaaagacacaacaagcgacttgaacttcttatgattctgagcacgtatgcttaatatcccatccatacggcattcgattagttcaagcgactctaggtggatgcagttgttgaagattgcatcgatagtcttcaccatcacttgggtacgcataagcgagagtgtcttcaagagctttagaccttttggggaactatcaggtatttcaaatttacaccatcgcagcttcaaaacttgtagactctccacagccgagaaatcaatgggtatggccataacttttctagattttgaaaaatctaagacaagctccttgatgtttttgccaaaacatgtattggtccatgagatgattttatcttctaccccaatatgattgagaagtagaacgaatcggtgaatctctgatcctttatgttgattgaacactttttcgatgatgccaacaacttctactttacgacgtcttctagaatatattccactgaaatcgaggtcaagagaacgtaccttggtctcgcgaaatcttttggacaacacacgagttgttaacagagattggacgggaagatacgtagacatgatgtgttccaacaaatcttcaggcaacgtttcactaggtttcatcctcttatttgatgattctgccatttctactcttgttctcttggtaggaggagccatggattgatttttctgtggtgataagatatgatatatgaagattatatatatacacacacttattgtgaaaaactatagatttgcttttgttttagacttttagttaaattttgcttcttctgtttttcttttgtctttttaaagaaatataataaagggtaatttttattaaacatttatttttatttttgttttaaatgctggattgcatttagaagaaactcaacaacacctttgcttatgttgacgaatattttttattttttctaaacaattacatatctattaaattttatgttatttctttccaatctaatttatttctttctttagaaattgtttgcatgtttgctatataaaactttttccatataaatcatcagatacagttgaacatattgtagagcaacacatgtagtttactgatttaaataggtgtcaggaaaaacgaaactgaaaatttgatgaatataaaa

SEQ ID NO: 27586 - DNA, 1496 bp, Arabidopsis thaliana landsberg
gccaagagagatggtgctttggtagactttgatcgtgatattgaacgactatgggaattttacaaactttataaaagacggcatagagtggatgatattcagaaggaagagcaaaagtggagggaatcaggaacaactttttcttctaacgtgggggagtatgtgcatctttaatccttgtggtttcctgtttttgtaggacagtatttggattctatccctagaaaatggctgaaattctctaaatctgaaacatgcgtcctgaattgtgttgatgcttgttctttcattcggcagtgattttctgggtgtagattaatttgtttggtatggacgtttttataaattatcttgatagcttctgttcacttatacagatgggattctgtagtggagatggtttctgagatgtactgttgtcttcttctttttgtaaaccataaataattaatccttgttttttccccctccttttcataggatcttgaagatgaggaaggtgtttgccacattgagggccctaattgaagtgttagaggtgctaagcagagatgctgatccaaatggtgttgggaggtctatcagggacgaggtacttttttcccttacctgttgtgtttcgaaagctatttaatctgcttctcgcttcctgttctgatgatgccaagcgttcaaaaagtcatatctaataactctgatgagaagatcttggttcagaagttgcatctgcatgagttgataataaatgtttcctaagatcattaaatcaatcattcaagttgtcacgttatacacttatcttgtaactcatatttttgtttatgttttcagcttgggcggattaaaaaagctgatgcaactttgtctgcggaactaactccttacaatattgtccctctagaagcgcagtccatgaccaatgcaattgggggttttccctgaagtaagtcaaacaagaatgaaaactttgattttcattttgtattagtagttttagcttttcaagtttttcctactcataaaaggctctattgtctttatttagggacgtggtgcagtccgagctatcagatacactgaacatttccctaggcttcccgttgattttgagatttccggacaacgtgatgcagatatgtttgatttattggagtatatctttgggtttcaggtatagtgataactatttgatcaaattcttccctgattgtttattattcttgttgcttactcttttttttttgtcttgagcattgtctcagagagacaatgtaaggaaccaacgggagcatttggttctcacactttcaaatgcacagtcccagcttagtatacctgggcagaatgacccagtgagttcttccttctgatagtattatttttttgtggcatactcctttactgatggacagttatgattgtcctgtttgttaagagggtgccctttaaaatcttgaactcttaatctttttatgtagaaaattgatgagaatgca

SEQ ID NO: 27587 - DNA, 1957 bp, Arabidopsis thaliana landsberg
taaacaatatatacgtgatgctacacaaattttataaactaaaacgacaatatttaacccaaacatagacaaaatatatgaattgtacgtaagaacttgttttgaatcaaaatatattcaaaaatttgttcactaaatagaagagaaggggaatgggtttgcaactaggagtattatttgaacttaatcgtgttttctaccatctatctgagcaacacattccattattgttcatcatttcatcaacacgtcatattggtaacttgaggaagctgtttgaccaatgaaaaccttgttatttgggggatacttgttttctccatcgctaatgatttgttgattgttcaatggctgcttaatgtcggtaaaataagagaggcttaggtatgctaaacattttcaggtcaataaaataagattccatatatctttgcagggatctgtacgtatatatatatttataagatacgtgaacccttaaatctttagataatgctttttatttatgacggaagataagaattaggtgcgttaaattaataattggagtagtatacatactttagcaggtataaattattgattttgaatcaacttggaatctttgtaacgttttcccctttttcgttgtttagtactcatatctaacgtttgatatcgtgaaaataaaaaaaacgtttgatatcattaactatcaaattttattgtattttgttctggaaacttaaattgaagccattaaaagtggaggccccatcagtctcccaaattcaactgtcctcatgaccccaaaaatcaacgttcaaaattgatccacgcacttcgcaaacattgttgtgtgtaactcttgtttttctttaactcgagattagatagtaataaccctgtaagaaatctacttttttttatatatcttatctaaaaggctgaaaaccacaaatttacattcaaagatattgaccaaaataatacacatccattaactaccccaaattagcgtataaatctgacatgcaaagaacatacattaatgacgacctaaaatctgctttagttaatttgacctgcaaaaccgtgttagtgctgaaaattaaagacaaatagtatcttagtttagcaaatatttatgctatgtaaggaatattttttattacaatctttatagtaacacaaatcccctaaaaacaaatagtatacctcaactataaataaatttccagtaaacaagttttataaatgttgaatttgacccatatagataataatcaaaagaatcttttttttttgttttattttgttgatttgaccaacacaattatgttaatgatgatatatagaaacaaatatgttagtttaggaaaaatatatttaaatgtgctatacaaggaatgattttattagaataacataaaatccaatgtttttaatttaattattaataatataaatcatgtatagtcaatactatagtatcccctaaccttaaagaaattgccagtgaacaacaatttttgacttcttttttgtaatcacaagtgtggtggatactcagaacttttgtcgtcgttttctcttgactaatccaagtcacactaaacgattcatctgagttaagtttttatttattatgattttcatcacaatcttatgagttctgttttctttttgaattatagtagttttttgttatatatctcaatgattcatccctcttcaatcttcatcatattcttcttcttcttcttcatatgccatgctctacagaaaatatgatttctttagatttcatctttttttacttgtttttattttagtcacttgaatgtgagggagaaaaaaaaaaactggaggacttgatgtgaaacgacgcatttacccttaagaagccaaacattgaaaatagaaaccgcttttttctttaatttttttcttaaaagtaatcattaaaacaaaaact

SEQ ID NO: 27588 - DNA, 903 bp, Arabidopsis thaliana landsberg
ccattgcttccgtattcgtcaatggacaaagatgggcctaaacgaaccaagccttatatcttttgtgggcttaggcccatttataggagaaaaagtgggtaatcgtttttctcaagtctcgttcttttgtagctagagaactttttatattcgtatgaataaccatcaaatgcgagcaattacggattagtccacataaggagaaaacctaaaaaaaccgttatttatttttaattttttcgtttaatacctttagtatttaattggtccgtttaatacgttttttttttgctgtttttttttcatcttcttcctcgactcttcttctcagttactcttttcactcaatcaccatatctatggtttcgctactcagcctttttgtcttttttattcaggtttctgacagatttacttaacaatagaagcaattaaagaattaaatcgatttgggttttgatctactctcttcaaattcatctgggctctcgaaatcttctagcttaatcccgattctgaattgccagttctgataataaaaatggtgtctttattgttctctgttcttcaggattgctcaaaacgctcgccaggtttccagcagaatgagctggagcaggaactatgcagcgaaagagattaagtttggtgttgaagctcgagctttgatgcttaagggtgttgaagatcttgctgatgctgttaaagtcaccatgggtcccaaggtactctttttcttctacacattttgatttgatttggacatgatttggccagaggttccttccttagcatgtgatttgggtgaccggttgattctgtatcgaatttggtctaagactttctgctttatgtgattctaattttgaagggacgtaatgttgtgattgagcaaagttgggg

SEQ ID NO: 27589 - DNA, 1498 bp, Arabidopsis thaliana landsberg
ttcttcttctaatttaattcaatctgggattcgtaaattctcggaagatgaaacgcgatttcgacgaaatctccgaggaagagtggtctcaacactcgtttaacgcttcgcgagttcttaaacgaccacggactccgaagaagactcgcgcggcgacgaatccaacgccgtcgattgagtcttttgcgtttaggagaccttcgacggcgatgacgattgagagtaatagcagcgatggtgattgtgttgagattgaggatttgggagattcggattcggatgtgaagattgtgaatggtgaggatttgttgttagaggatgaagaagaagtggaagagactaaggttgtgatgcgcgctgcgagagttggtaggagatttgtgattgaagatgaagaagcgagtgatgatgatgatgatgaggctgagagtagtgctagtgaggatgaatttggaggaggaggaggaggaagtggaggaaggagaggagaagatgaagatgttgtggggaaggcattgcaaaagtgtgctaaaatctcagcggatcttcgaaaagagctttatggtacttcttctggtgttactgatagatactctgaagttgaaacttctactgtcaggattgtcacacaggtactggaaattatcactctggtgttcttaaagtagttgctttgagacgatttagagtgtcttccttatacaattgtgacgtagcttttgattagatagcatattttggtggtaagctttgattggtttggttagagtttactgtttggttaactaaaacttgtttacttttgggttgaatctgtgatgatcgcagaatgatattgatgatgcatgtaaagcagaggattctgattttcagcctatactcaagccgtaccagttagttggtgtgaactttcttcttctgttgtataagaaaggaattgaaggaggtatgtgtttttactagtttcgatctgtaaacctttttagcgtgaatgtcactttgtaactcactttctattgtttgtagccattctagccgatgagatgggtcttggaaagaccattcaggtgcattttgctctgttattactggataagttttctttgtttctttatcttataaagaactaattttgttctcatttaccttaggcaatcacatatttaaccctcctaagtcgcttaaacaatgaccctggtcctcatttggttgtatgccctgcctctgtcttggaaaactgggagagagagctcagaaaatggtgtccgtcgtttactgtacttcaataccacggagctgcgagagcagcctactcaagagaattgaattctttgtcaaaagctgggaagccaccaccattcaatgtgcttcttgtgtgttactctctgtttgaacggcataggtgcaactcttgatgcttttatttgctttttggcttttcctgttactaacagaagttggaattttacagtgaacaacagaaagatgaccgggaagt

SEQ ID NO: 27590 - DNA, 2346 bp, Arabidopsis thaliana landsberg
tgtttgcaaggcttacaagaaataaaacatgacaagaaaattgggtaatggtgtaaaataaagctttatccattagcagagggggaaatattaacctatgaggttcatatacgattgtggataaggtgaaagttttgctgtctggttcagacgcccaaaacttgagggacactaagcctcctattccatcttccggaagtttcacctcggttgtactcatcactgagccatccagggagagagcaaccgctgtcaccacaacctattaccgtttactcaaattatcacccaaacgaaaataatcttagatatactatcaaataaacagcaaggaaatgtacttactgtgatctcatctcctggttgatggtttctctcacaaacttgaatctgcaaaagcattgattaaagaagttagagatttcatagacaggagaaagtggcatagagtttcttaaggatatattggagccaaattctaacctctgaaattccccggtcattgagaagattatatagctgtacacaataattctctgtgcacaaagcagctatgccagaagatcgatcaaaggcaacagtactagccaagccttcatacatcctaggcaatgatgggggaggctgtaacaaaataacacacattgaagtaaacaccaagaaaaaggtaaagcggttgcgagagtttctagaatcctagaatcgttgacaaaactgacgagaatgattacaggtccttaattattaagtttccaagacgaaccttgattccagaaatggtccttaagatctccatggaaggcattttaagcaaatggatctgattatctgcacaaaccacctgcagctctcattcgtagtcaaatcagtaaaacattcccttttgctttcagcagttgtgtgttagattagaatgaaagagtaagctccgacttacagaagaaagagttggatctggagaccacatgaaatacagcaagggggatcctatccttggtaagaatttctttttccctgtgtctagctgccaaacgacaagtaccccttcccttccccctaaagagtcagaaaacagacgcaatatggagtaagaagtcaggacattactttcaaacagtaaatttgctcatgacctattagtctatgtcggttcataaatccaatggatatcagaatataactcggccgcacctgaatacaaatatgctccatcggaagagaaattaaggacattaacttcagcagaatgccagtgccatgtagtgcaagattcagcatcatcttcagttttcactgaagtaaattcttcaataccattatccttccaaattaacactcttcctgttacatcaccggctgctaatattctctgattgggatggaaagcaaaaacagtaatcaactctgtatgatgtaatgtcgtctcctttggcatgaggtgctctgatgccacattccatatatgtatagtgcagttatgacagacgccgaaaaactctccagagggacttaaaacaataggttttggttcttccatctgcacattaacaaaaatgattatagaatcaaacatgaggctaatcgaaaaatggttaatccacaaatctgacctctttcaaagtgtctccactatgaagagggtcttgagtgagatcatatctccggatttgtccaaacaaatctttggacacacttgaatagtcctcaaccgaaacataagcaatcacggaatgtgacacgtgaactggaatcatcacctacaaagtcccaacagacacttagaaaagggcaattgaaagttatcaaatttctgtttataagctgcaaagtatggaactttaacagaccagagagtgaattggaaggtgggtatcaaatatcttcaaaagcttcggcgcagagaactcccaaatccgaattttcccatcgagcgacgaagtccaacagtaactgacggtttcgtcggaagacggatcaacaatcacagacgtcacaggcgctgtatgatcctcgagtgaagtaatcttaaaaacacacacacgcatacgctaatgagagaagaagattagagggaaaccctaaaaggaaggatgctcgagtcgagagataaaacctttaagccagtggcgacgctgtaaacagagacggtgttggctgtgcataaaagaagcttctttgcgtctttcgaaaacgccggagcggaagtaatgttgtttcttccgccgcgaatcattttccttcaactcacggagattctgagaagacgcaaacatcttactcggcgattaataattagatgttgcgacgtttttccgacaaatatttcaatgtacccagttttcgagc

SEQ ID NO: 27591 - DNA, 1961 bp, Arabidopsis thaliana landsberg
aatgtcagccgaaggcaagttcgttagctgtgttcaatggcttctactcctactgtatattaatggcatctcttcttctcttatccaggttgctctctaagcctagaaaagaaggttctttcggtatacatacaagcaagaagaacagcgaagcagcggctcgaggttatcagtctttggcctaatagagtcactaaaccaaaccaagtttggcatttatgtatatgatgatgactgttgtatgattattatgtaacattcttgtttatgaaaaaatgtattgctatcatctgatggaaagagaattaagatcttccttttcaccacaaaagtaacaaagagtggttggccatttttttatgtacactgacttctacaatctttgttgcattgtttattcaagaaccctaactcctacacaggtaaactgtaaggagagatgagcttatcggttttggtgtgagcagaggcagtctactcggcgaaagagtgttcattcaattgctcggttggaagcggctcaaccttctcggccttcccgtctttctttgggattatcagaccgtaacctccttcttttctcttgtacactatgtttatctcacctgcaaaccaaaaacaatatcaaaatgtaagtattcctgttgatcttcctccgactcctctgaggtttaagcaatcgagtatttatggaagaaaataaaattgtcacatgcataccagtttcttcattttggaagccatagaagtcgtgactgactagttccagctgctcgactgcctcagcgacagtcaatggtggcatctcgaaagtcttggtacggacaatctgtagaaaaacccgcaataacagaaaacgtcatcataagatcagcaaactccaatgataaggcattagcctattaggtaagtctggaccaacctccttgatcaaatcatcctcttcttcttcttctcctacgctcgagtcagtactgtcctcaacatcctccacaaccggctcaatcactggttcccttaccttcaatctgttgaaacctttcatgtgccttccatggtctgagtccttctccttgatcttcctcagcttcctctgtattatcgttgataccaagtcgatacaagcgtatactgtctcagcatcttcctcagcacgcacaacaccatgcttctttgtaaacaatgtcaccttaagtaccatagggaactacatattagcttctgaaagcgtttctaatatcgagaacaagtcacaacaaatcaataaaaacgacatggttaccgcacattttcgaatcctagggcctttaccaaactctccaccacgaacagagagtcttacatcaacttctctcacaagatgactgtgtttctgaacagatttgcctactttctcttcaacatgctgcttaattggctctgataactgccacaacagtatcaaagttaaccaattgattgaagacaacaaacttcaactatcaaaaccaaaatgttgaacacataaatcccactgagtaagagtcaagagtcactatcataaacctaacagaatcagtatccagaaagttcaaaacttttctaatgaacattcctcaataatcgaaacccagaaaaactcaacataaaattcaacattttgttcagaatccaatcaatttcaagtgtgtaatagcagaatccaaacctcgaggttttttccttggatgatcaacttgacggaagcaagaggaccgtcccacgacattttcacagctaatgagcttctacagtaactgtgtcttacttgtctccgatcttcgtaaccaatctggccgaggaaatctgaacggagctttttcgaatcagtccgattcaagcccaccattgagactaccgtggaagaagatgagaacggcggaatagaaatccagacgccgcaatggtgaaacttagtctagagaaacctaaaagcgttgcca

SEQ ID NO: 27592 - DNA, 1889 bp, Arabidopsis thaliana landsberg
  unsure (1)..(1889): unsure at all n locations
acgacgacgactgttgtatacttgtttcttccaaagaagcctccttttttctaactaattaaaacccctaaaaaaaaatcatttttttctttggtaattatgtaatttctcttcagaagaatcatactttttctttgactagcacacaatttaaaccgtgattaggcaggatgattaatttttattattttaataatccagcaacttgggcttggtaatgggccaatacagcttctagcgggttacaaaaaaagggaagcagaagccccggcaagacttagtcggagagaagatcggaaactgaacgggacgagtaattactctttacacttcaagtaaaataaacaatctttcaagtagcatgacactactgcatacatggaaaagaaggtttaaattctaagcgtattaattaagaaaagtcggaaagctaaagcaaggttagggatctacacatgaaattgtgaaagaataggcaaattaatagagctcaaaacttgctaaatgagctcctagatctagggttttgtttacacgacataagggagaattataaaccacatacaagtagcaacaatttgttcacatccgtgtttgccacctacataggcgtatatttgtgtgacaaatatacttgggtaacctaatttgtatgtctctctatatataaaagagagtgggcaagttagaaaaccctcatttctttctattcggaacaatgactacgatctctgatatttcgaattacttggtagagaagatactctctagggctcccataacttgtctcggagcggtgagaaccacatgcaaacgatggaacgctttatccaaagaaaatactttatgtaatggagaagcaagacatcagtttctggggtttatgacgaaaaagtataagctttgttcaatgaggttcagatctcaatggaaaatataacgaaggaggaggtgacgatttcgtggatccaactataaaggagttagatgattttctgaatcatgttaagatatctaatgtgtctttcaatgcgaagggttattgttatgcgtgaccaacgaaggacaagactaggctcgccagctcgtggtatggaacccataaattagatatattaaatcctcataaaattgctgaaatcagaaactaagcctcagtttaacctaccgatcaactctaatgaaatgattgtaagctcaagttgatgatataatacttactactgattccacaataacatttctacgttgatcttacctactaactgaaaaaagaagttcaaaaacaatcatttatttgaaatcatcacatatttctaactagaaaatcaaattggaaatatataatataaagttttatatatatcatgacacatgtaacaatctaaaattataagcacgatgatatatgataaaatcttatataattcaaatatgaaagtaaaaatcaaaataaataatttagaaaaaaaaatgaaatagaaaattataaacatgatgatataaaaatctttgataacttaataaatttcacgatcatagagatcttggataattcaataaacactatataataagattttttacttaaaatataaaaaatttatattctattgccttttaataatatttttttgaaaatagtaatagtaattattttttatattttccctttatataaaatttattgtttaattgaattatactttaattatatactttaataaatatgtttttatgtaaacaaatttgtaagtttaatttttgtgtaaatatgtgtcaaaatataattgggggaagttttttacatgtatcanaatctcattacgtgtatcaatatctcatcaaatgattgacacatataacaatcatgttaattagttactaat

SEQ ID NO: 27593 - DNA, 764 bp, Arabidopsis thaliana landsberg
gttcttcttatatacttttccataaatccaagatatttgttgatttgttctatagtctctctatgaatgtccagaagccaggtttgaaggattagtatatcacttggaagttcaaattttggtccttaagtaagattggaaaaataaaataaaataagatttgattagaacaaactcaaaatagttatagcttctgaaatgataacaattttttttggttttcaaggttaattcttgttcaaaagctaatatactttacagaagaatgtcgacttagtgacttgtatgatttacattttgtggatacgccacagttatcatcaaagagttgctcatgtttacactataaatattcaaaaatttcctaattatgaaaagaaatatgagttgtatctatcaaaaaaatccacatcaataaaaaaacccgacccaaaatagactaaccagtatccaaatcgtaatctcaaagatgagagaagaaacataaagttttgttgcaccctatcctcaaatctagaaacgtgatggtttccctaggccatagttggaccatgtggcttctccattattatgttcttctatatgatgcttttaagcaagaagacaaagataactcaaaagaaggtgacaaatcttaatagtgattacttcctattcgacaagagacagatcaaaagagaggataagaattatcaaagtaataatattgggtccattttgttacaatgcatgctatttcgacgttatcggacaaatgctccgaa

SEQ ID NO: 27594 - DNA, 1169 bp, Arabidopsis thaliana landsberg
  unsure (1)..(1169): unsure at all n locations
gcaaaacccggtttcaaattctgcccttgtcagtgcctttatgaccgaactggagactgatacacctgtctcacaggtacaatactactatctggatagtgatccttgcttgctgtcagcattgcagattttgactcttgatacttctgtattttcgcctttctagggcgattatgatcgtctacactcatcaaccactcctttccttgagaacaatatggagtttttgattaaatgcatggatgatttatctatggaacagcaaaaggtgtggtttcttctgcactcttgttcaattctcatcatcagaagtccgaactatcttaacgcaaaatcttaatttatttctccagttccagtattactaccggaacctgtctcgtcagcaagcacaacagcaagcctggctccagaagagaaggtaggtttatattttctgcagaacctttttgttctagttcaggtttgattagtttcactacctcgttatcttggaaggtgatacaactttacttacgagagttgtgaatgccttgtaacatttgtcttcagcttttccttgtccttttgatcttccaactaatgaaagaggtgtttggtttatagaacggagaacatggctcgtaaatcagctggagaggagcctttaccagaagaggatccttcaaacccaatcttnnnnnnnnnnnnnnnnnnntctaggctagagagtttcctcatcacaaaccaagtctcaaacttctgtggccaaatcaatgggtatgttcctctttagtattgtttcaccatttttggagctttgaaagatacttaaaatgagtcgacctgttgttatgcagagtggctggccagaacttcagcaggctttacctgaccaaagcattgcacgacaactgattgcaaagactacccaagtttttgttttttgagtcagaaagtgaaagacttggtggtagaatggatcctatatttgtttttcgtggatgtttttgtttttatttttgttgttgtgaagtaatttaatttacaagcttttcaaaaaaaatctttattcttatgcataatgaaaaattattgaagttttgaaagatttatcttgtattggacctctgattgccttacaacaaattatacatagttatcaaaatcctaatcaaaagagtaagaaa

SEQ ID NO: 27595 - DNA, 628 bp, Arabidopsis thaliana landsberg
gtgccacatgtctctcccctaatagaccaatccaagaccacaggaaaccccacattcctattttgctgataagaatatttgtccgaagcattgtacttaaacttgccattttcaacgagaaaggcgtagatgcattgaccctcagagataggttgcactgacgtgtcgttgtcaaagcgatatgatctgactatgaaccaattgttccctgcagggacggggttctggcagcagccttcaccattacattctccatttgcttcatgggaaagagcatcacatgctgatatgcatccaactgagtttcttcgagttccattagagtacacaaaagcgtacgagttacagcctaatacagtaatcgtgttgttgccggagagagtcaaattacctagatcactatagtagtaagtccctttagcgaactttcctttgctgttgtagcaaatgtaggatgcaggatataggacgcgtaactggctgctgtgagatatttcgaccacttcaaggcccttatagaatagattctcgttcacacaactgagattgaaactaggatcttcggcacgccaacaacctggagaaaagccaaaagggtactcaagtgtaacgttgccacatttttcgg

SEQ ID NO: 27596 - DNA, 2057 bp, Arabidopsis thaliana landsberg
aagtttgtttggggaaatatttaatttttttccaatttactttgtaggtataagggatacaccatcgtgaaatttctttcgacatacaacaaagaagaatatttcactccacccttttctgttttgtcaaaactgatgggaactgattgatctaccagcctttaatgttcttgtttagtgatgatgaattctcattgtatgaagatgtgatcatccgactaaaacaattaatatagtggtttgtgtaagtaatgcaattgtaacagcttcttgattcaaattcgtatattgttaaatcattgaagtttgtggtatcgaatgagaatagtttcatttttctcgttctaacaatatatagatatttttgattatacagcatcgagagttcgagtgtgtgaattaacatgtgttggagaaagaactatacaattgacatgattgtcaaattcgcgagttactggttcaatcaaatttggattgatcaggttgaagatcgtaccaaaaggtccaaaactcaacccaaaaaaatggtcgtacaatatccaatatatatgttatcaccaaatttgcttacaaagagaatatttaaccaagtaataatcaaccaactttattgattggggcatatgacgacaacatttacatcaattatgatctaggtaaggtatttaataaactctggtgtgtagcatacgtgggactctcagagtcagagttcttgactcttgaatcttgatttacacatacttggatgcatatatgataaagtaaagaaccatgtcaatatgtacataattgaaaaacgttaggtcatgttagtgttgataataatttatgagactttggatgcttgcaccacaatacatgccccacgacaaaatcaatgagttgagtgatcgatagctttctttctaatcaaatccatacatttttttctacacttaatcaataaatctgttttttgttctttgtttgtgacgtttggaaaccaaaaatcgagagatttgaaatctaaaatccaagctacacgtaatgattgctaggtgatataatgtacggacataaaagactaagacttatcttctaagatagagttcatccacattctggtggttttctttatcttttgctgttcaaaatcatatattatattctctttacaaaattctgtttttgtaacaaatgatatatcttgcattttggaataagaatagtatggttttgccggaaaaacatagcagtgcttcctataatgagtaaacactacaacaaagtaaattcaacagagcacattaaatcttaaagagagaaaaccaagaacctgacagcgaaactccctgaggactcaacctatggactctcgataacggatccaagtgacaacgaatgatgcttttaatctccataatcaaagcagtcgcttgtctctgcgcggattcttgagccatctaactccttcatcaatcaagtttggaggagaaacatggttccttgcagtgaaataaaaccaaacttccgcagcaaatgtaacccactttgtattggtcgttttgtttatgcttcacttttttcttcgtaatgtacaagtgtaaagagaaagacgcagaatcataaatgaaaccatacccaattacccattatatataaaatatcaaaccaaacgaaaaatactaaagaatggagaacaatttgttgaataacctacaaaagattaatatatatattgagctattaatatgggataatttaccaagtaacataatgcttatgtgttggaccaaaaaaacgttgaaactttaaggtgtcatcagttagtagccactagccagattctccttgtattcaacaagctcagttccagtttcctattgcgcacttgtgtttaaagggacatcgacaagtgccccgaaaccactagcgacgagaaactagaggagatgcatggagctggagaagagaggctccatgagtatgttcaaagatacttttttacagttcaaagatttctaacttgcatgatattttcttataaaaaaaaaaacatcacggaggatgga

SEQ ID NO: 27597 - DNA, 1248 bp, Arabidopsis thaliana landsberg
aacagagagtggtccagtgttgaactcctcctcctcagtctttccctgctaaagaatgacattcaaggaagagtattaaacaacaatgcatccaatacaagattgccttgttaagtactctcatccaaaactagcaacattcattcatatagccaaaactctagctgaccatctgtgatgaattctcaggacagtgttttctattcactaacacaactacttgaagatacagaaaccacatgacttgtaatggtacatattcatcaacaaattacataaaatgaaggatcaggcaacaaaagattccaggcactaaaaagctagagacatagacatggtacagatatcgaatttagggttctatgtttatgcttgatagatcgagaaatcagtaacgagaaagacggggagagttacttacgttggtatcctcttccattggtttactgaaatcgagaaaaaaaaaagtgttagagaagatctagaagaagaagaatgataaaaattagaagacgaagatgagaaaacctagaactagaattacctcatgttcacttgaagctcgatgaaattcggcgaaacggtggaagctgaaaaggaggaaaacgatgaatttagaaactatcaagagattttcatagaaacgcagatcgaagaaattagggttttacctgctatacgctaaatcccgctttcgttttccaaaaagatctctctcacacgaagaagaatgatgaggtgtactcgatataatcaagtgtttacaaactcagtggcggtttagagagggctgaattgaggcctatctaattattgggccttaagatactaaagcccattaaatatcctcatatgttttttgtttataaattaaggcctaattggaataaatttcagtttagttattattttcatagcccattcaaatattcacaggagtacagagattttgacttttcaaaatggtttcaccttttacatgaaataaaaatgctcagattcgtggtttagcctggtcagctcttctcattggatgggttgttcaaagtacaaggtccctttcgttacattatctaagtagggtttgagcaatttgtaacttataaaatgaagtaacaacttccaggacaggtttgagctcaacgattagtaaagacgtaaactgattatgaaagatgaccataacccgtacggcatgctttactcatacgcttgctcttcataaatatcttctagtacttgggttta

SEQ ID NO: 27598 - DNA, 2343 bp, Arabidopsis thaliana landsberg
aacaggaaaacctatgttgagttataggaatggtcaacttacgatgagatattttgatagagatggtcgtatgatttcctcagcttttcataagaagatgcactgtcttcactaagctctcctttagcatttaccagctttgcattttctttctccatttggagaagtaactgtagaaaaaaactattacgaagatactacagaaagggaaaactagcaaaatgaaaagaaaagaaaagggagaggaaatgtttcatttttcaggcaagaaaaatcaaaattcctgcacataagctcatgggtaaacaattaaggatctaaccttgtgctcagactgaaggagatctgcaagagcatcataatatgtgttgaaagctttcttaaaactctttttctgatctgcagtgacgtcgagacccttgaaaaactagagaaaaccttagtcacatttagctacgtaccggaaaatatggggaaggcacagacaagagctcatcaaatatggaagtaaaacttcagttgatcttgaaacctacttacatcttcgtcttgtccagagataggaagccccagaaaaattcttccttgccgagcaaaactggtgagaagtgtcagatttgtttgggtcgtatctctgtctttcagttgttcaacactggtaagatccttaataatattgataaagatgttactatcttctattactccaacatagtagagctccagaagaagttttagggtactgcgctttttcatggcctttgagtttttatcagcttctaaatcttcggcagattttccaggaaagaagactttcaagagcccttgtgttagactggcagaaaattctttatacctctgatgaagtagcgagcaaatctgtcaaaatacatggatatcagcatagaaacaaattctgaacagagagtattgtcgtatgctactttctatgccccataagaaatacaaacagaaaagagacccaaatatcatctaaactaagaggaaaagatatcgttcaacagaaacctaaactgtggtagaggatttgccataccaagtggtggaaagcattaagaaactatctaaatataaagataacaactactgaaaatctcaatgtgacaagttgatgacgagagtcgcatgaaaaacataagaaacaaggtgtaaatacagatacaaaagaacaaaacagggaaacataacctgaacagctgcttgtatatctgagcttttgagcttagcctcacaaatggcagtaacagcttcactaacgaatttgctaaggttaacacctcgcagatcatccatcaacccttctcgctgctcttcattgatctgctttaacttcttaataactgctgtattccgcttgatactagaatctagagtcctaagatatgctgaatctgtaacgtggaaggactcactatcagtaacaactcaaaactacacattctaaactagaaaagaattattgtaaaatcgtgtgctctcaagtcctgaatggctattataggtactcgattactaacagaagcattgtggaaatcctacatagtcaattccatgaaaacaaaaactaaccaggtcgttcaggattgagattgttttgacgaagagtcagtttagcttcaattgacttcttaatctcttcaagacgagcaagagcttcctgcgataaccagagaaaacaattttcgaattgaagaatgagatcatagtttcaatttcatcgagtaagacaaatccgtaatctcgaaatcaaacctcgtcgtcttgtttctcgctgtgggattcatcttctggatgatccattagggttcagggagataaagtcgtgtgatttcgagtcaagtgatcgctttttcgatcggacttaggtttagtgtgttcccggagaaagagatgatagaacccggccaaggaatttttcaattaacacaaaaagagaattgagggaaaaagcccaaacgggtcaaaaagacccaataccaacgggttttacccggcaggactaagcagttaccaaaataattaccaaaccggaaccgaaaaaaaaacccatcgtgttggtaaaggaacctatgtctgaataggtaaagccatggaagcaaagagagggacagtgacataaaagacatgacacgtgttcctcacgagcctactaaaacaatcattatttcttcttcttcaccgtgttcttctctccatggcggtttctcaccgtctcctcaggccggcgacgacgacgataaagaatacttttcttctctcttattagggctctctcttcttcttcgtctgggtcctcgctagaccccaaatcgatctggagga

SEQ ID NO: 27599 - DNA, 3645 bp, Arabidopsis thaliana landsberg
  unsure (1)..(3645): unsure at all n locations
atagattagttggcttacccatatccatttcttgggtctacatgctttctagatcatttttagaaaacaggatccaaaactgatggactctttgttctcttctgaaatgatgggttctctctttgtctaccaactgtttgttataatgtctctaagagaatgatacatcaaactttgtatgtactacagatctcaagtactttcttttatgtaccctttcttgatcaaagcaaacaaattcatggttttgctaattcattgtttttccttaattgcaggctgcaatctgaactaatgggattgatggtaagctatcttttctctgcataactgaacctgttgatatggttggatgcttatatagaggcctttgggtttatgtattgcagatgggagctgatccggggatatctgcgtttccagaggaagacaacatattttgctggaaaggaacaattacaggaagcaaagatactgtgttcgaaggaactgagtacagactctcactcactttctctaacgattatccttttaagtctcccaaagttaagtttgagacatgctgcttccaccccaatgtggatctctatggcaatatttgcttggacattcttcaggtacataacaatcacttgctctttctacttgtgttactgtaaatcccatggaatcacatatcagagaagcagtacttaaaacagaatctgttttcacatcttttgtaggataaatggtcatctgcttatgatgtgaggacgatattactctcaattcaaagccttctcggaggtaaactctatggctgatataactgttgaggttacttatgaagaatttctctgttggtttgatccagtatctgatttttcctgttttgttttaattgatcagaaccgaacatcagctcaccattgaacaatcaagcggctcagctttggagcaatcaagaaggtaaaattgcaatagttatcagattacacatctctggacgtctccatttttcgattcataatgatattcgtcttcttgaacttgtaatgttatacagagtacaggaagatggttgagaagctctacaagcctttaaacgcatgattctcaaaaatcactgtaactgattttaaaatctcaactgtattggatcatatctcttttacttttataatctcaatttgagccaatattagcaatcaaactctacctttattacagttccacaatcaccacctatatctcttccgtaactgagatttgagaagttcataatagtaactctgaaatgttgtagtaagtatctgaaagtataatacaaaaaaaagtttctgaactattgaaaaatccagaaaccaaaggttccccacgagagaagtaagactcaaacatgtgaaacgttggcaccggacaaagtactgaagactaatgaaatgttttgaaattgacatttatggccttctttttaaatccccaagcccataattcgtgcttaactctttattacaaatgggctttgagggtatatattatttcggcccaatataaaaacgtcgccgcttcattcataccctggccgtacatcccagaaaccttgaaagttaaaaacccgccggagtctctcactctcacaaacttttgagaagcattttcgcttcaattcaataaaaggcgaaaaatctctcactgcactttatctcgagagctcagatctccgatctagagcctttcgcttctcctcttctgttcatataacaactgaataatgtcgatctccgcccaaaatccgnnnnnnnnnnnnnnnnnnnnnnnnnnnnnngatgttcgtactcagaacggtactactactctccatcgcttcctcttacgtctatttcctatctcttctcattactaaactgttcactttgttttcatcgcaaatttgtttcgatctctagctagggtttgttttgaatctattcttttagatgttttgtggttattgactcgtattttatatactctatttgcagtgatggcttgtcaagctgtttctaatattgttaagacctcacttggtcccgtcggcctcgacaaggtttggtttctgatttgcatctgtgtatatatattctgctagctttcttttttatatcttagatgcatcttggcaacagttgtgtttagttttaggttacttttagacctaaccatttctagttttattctaaatctgctcgatattgtcctttgtattttcgttcctagttcctccaatcgtgtttcatgttatgttggcttgtgtttcagatgttggtggatgatattggtgatgtgactattacaaatgatggtgctactattcttaggatgttggaggtcgagcaccctgctgctaaggtaatttatgcaaatgtgattgttatacgtattttcttatcatcatttcaaaacactggttatgaattattagttactcagttctctaatctgtctacttttgttgtgacaggttcttgtcgagttagctgaacttcaagatagagaagtcggtgatgggactacatctgttgttattgtagctgctgagttgttgaaggttagtttgattactgttttctttggttttggttttcctagagttgggagatttttcacatggtaactattgcttgatgattaatgggtcttatgtatatatttgcagagggcaaatgatttggtcaggaacaaaatacatccaacatcaattatcagtggatatagggtaagctgcgactttaatttcatatgttgtaacctgcactgcagaagtgtttccagtgtgttcattatcttttttactgttgacagctagcaatgagagaatcttgcaaatacatagaagagaagttggtgaccaaggttagtcctcgtgtgatggtctatagtcttgcctcttagaggaaattttcctctcttcatacaatttttttgtgtcagtataattgggaaagctcactgtactgtctgtctcttcccctttagttaattacttttttttttgcgttttataggtcgaaaagcttgggaaagttccattgataaactgtgccaaaaccagcatgtcctccaaactgatatctggtgacagcgacttctttgccaatttggtacgcttccagttctccttactaagcaataacgtggaaattcattaaaacattagtgttattaaaacctatgtttattcttggttttttcttgggggactcttttctacttaaatctggtttatcttgcaataataccctagtcattgcatgtggctgaactgttataatcacatttcttttaaaggttgtggaagccgttctttcagtaaagatgacaaatcagcggggagagataaaataccctatcaaggtctgttaatgcttctctgtcaaagtttcaaacataaagatctgtagtgaggatgatatttttatgcttaaacgcttattcttaccgcattgtaaggcattaatattctgaaagctcatggacaaagtgcaagagacagctatttgttaaatggatatgcactcaatactggtcgcgctgcccaagggatgccattacgagtgtccgcagcaaagattgcttgccttgacttcaatctgcagaagacaaaaatgcagctgggtgtcc

SEQ ID NO: 27600 - DNA, 2480 bp, Arabidopsis thaliana landsberg
cagatgtgtagctgatcattacttgtcccaggcactccagagaggtgcaatgtggttgtgtatatcgccaggtcaagttccagaatttgaacttgaatctccaccacatcaggcatctggtagttatctttaatttcatggttaacagccacaacaacagcaaagattacgcccctgatctctctgttcagttgaactgagaacgtgacagggccttgtgagaaccagcctgggattctgttgccaggcaagctcagattccgcaacaatttcaaagaaacctgtgatgagaagttcacaaacattgcaagtaagttgttatcacatcctgaaattcaactaactgagattatgtggagtttggagaatcaccttggacagttttttctttacttcagggtagcaggtggagttacaggcgctcatgtataatcgtttcagagccgtcaacttgtctagacctggaacatcattcaatttcacgcagatcgtgagattgaggtcgtgcaagatggtcagctctgaaaggtcggatatactctccagcgaaaagcagtttgccaggtttagctgctttagttgacatggaagagggggaagacatgtgagctcctggcagtcatgcaatgaaagttctatgagatttgacaacccctttagactgcacggaagactgtgaaaacgattattccccaggttcagtatcattagagatgaaagcttctcaagaacatctgggattttgcccgatagtcccaagttgcgagcacactctaccgctgagttatatcccttcccccatcaagaaatagaactgactaatcctaagtcaaagggtcgagaaactcaaggccactattcttgaacaacttggattggagccgggctttcctttcgcactttatacgggtatgaaatgaaaataatggaaaaagttggattcaattgtcaactactcctatcggaaataggattgactacggattcgagccatagcacatggtttcataaaaccgtacgattctcccgatctaaatcaagccggttttacatgaagaagatttgactcggcatgttctattcgatacgggtaggagaaacggtattcttttcttaaacttaaaaaaatagagaaataagaaccaagtcaagatgatacggattaatcctttattcttgcgccaaagatcttcctatttccaaaggaactggagttacatctcttttccatttccattcaagagttcttatgtgtttccacgcccctttaagaccccgaaaaatcgacaaattcccttttcttaggaccacatgcgagataacgaaaaaaaaaaagagagaatggtaaccccacgattaactattttatttatgaatttcatagtaatagaaatacatgtcctaccgaaacagaatttgtaacttgctatcctatcatcttgcctagcaggcaaagatttcactccgcgaaaaagatgattcattcggatcaacatgaaagcccaactacattgccagaatttatatattggaaagaggtttacctccgtgcttctatggtacaatcctcttcccgcggagcctcctttcttctcggtccgcagagacaaaatgtaggactggtgccaacagttaatcacggaagaaaggactcactgcgccaagatcactaactaatctaatagaatagaaaatcctaatataatagaaaagaaaagaactgtcttttctgtatacttatgtatactttccccggttccgttgctactgcgggctttacgcaattgatcggatcatctagatatcccttcaacacaacataggtcgtcgaaaggatctcggagacccgccaaagcacgaaagccagaatctttctgtcaataaattcctattcgaagagtgcataaccgcatggataagctcacactaacccgtcaatttgggatccaattcgggattttccttgagggatattggtaaggaattggaatgtaataatatcgattcataatggattcatatcgatacagaagaaaaggttctctatcgattcaacaagtgctgtacttatgggaaagcgatagagaaagagaaaaaaaaaaacgaagatttcacatagtgatttttttttttttttttgatcaaaaataaatctgattgaatttatttcgtaccccttcgctcaatgagaaaatgggtcagattctataggatcaaacttatgggacttaagaatgatggaagggaataaaatcaaaaaagaaatcaaataaagaaaagagagagaaaataaagaaaaaataagtaaatcaaaatgaagtagaagaacccagattccaaatgaacaaattcaaacttgaaaaagtctctttctgattctcgaagaatgaggggcaaagagattgattgagaaagatctcttgttcttattataagatcgtgtgattggacccgcagatgtttggtaaaaagaataatct

SEQ ID NO: 27601 - DNA, 1857 bp, Arabidopsis thaliana landsberg
ggtgcatcttcaagcgcctttacatcgcacctaaaatgagaggtctagttagtgcatgtattgagaacaacaaccaagtcttctcgggacaaaaatatttacttacatgagaagttctgccactgtgttaagatgaaatttcgacttgtcatctttgggaactgatgaatccacttcttttcccttggtaaattcgacgttgccaaggtggagaattgcagcaaccactctgaaaattgcttcctgttgatttatatagagggtgacggatcaaaataaataccaaaatgcatcagaagatcactttcatacacaagcttacctgttccttttcgctcatcccgacaatatccattgctcttcttgtcgcaatgtaatcatgagcatcacttataccaacaagttcgaagcatttcgactggttcagataatgaaacgtcttgggatgacccaacttgtacttttcgagctcctgctagttctataatgttatgccaagagttttcaatgacaatcagaattaacaaagacttcctggtgagtatacctcctgtggtgcagcacatagaagataaaaacagtggtaattgcgctctggatcagaaatctgacagacacgagacctctctagaagataggtccgtatagcagctccagatattcttccttgcttatcaaattggatttcaacaaatttaccgaagcgactgagccaaagcatagtacacagttagctgaattccgaaccatagatatagatgcccactattataaccagattttgcttcaccttgaattgttattcctcacagtttttgcgttcccaaaggcttcaaggacgggatttgactggagacagatattacaaacaagttagtagattaagctcgtgtagaatccatacataagaagatcacagaaaagagatagaaaagtcattacttcaagaacttgttgttcaacagtccgtccttctgtaacagcacgacctcccaagtatgcaagatatctcataagcatcttagtggtttcagtttttccagctccgctctcaccacttacaagaattgaattgctttttccctcattaatcatggccctgagtgtataaagaagataaaagccgtcttatgctcacaacacatatcatcattatatacatgtagatcacatatatataagtattaaactcacctgtatgcaacatcagcaacagcaaaaacatgaggacttagttctcccaatggtgctcctttgtattgttgcatcatatgggcatcatagatgtgaggcaatcgttgaaacggattaatcgcaataaggatgtttcctgtgtatgtctgtcatgaacaataatagattatagccaagacagaaaacagtagaaggtcctacaacagaattgatgtaagagatacaaacatagatctcattaagttcatatctgatcttcaagttctgaagaacaccaggttcatgcaagtaagagagctttgtcatgtcatcaacaccaccagcaggagcttccacatccttagggtaaatctttgacaactttgcagtgacctatacaagtcagatatataaaatcagtgttgggatatatacactataggtgtgaagttgaaatgttagaatttcggtgattgatgactggaccttttttccagtagtggcttggatgacaacttcttgtccattgattttttcaacctcaccatcaatccaagccacttcagggtcttcaaaccaaacatgagaacctacaataatatttacccgagctccctgcagttcgcaaaagcatgaaaaagtattgatatgctttaggaattaggatatgcaaaatatataact

SEQ ID NO: 27602 - DNA, 2416 bp, Arabidopsis thaliana landsberg
  unsure (1)..(2416): unsure at all n locations
aataaaattcactttcgacaaaaaaaataaaaaaaaatatgagttaattagaaagctttatcaataaactattttagatcggatgtacgtaaataaacttatttagatccaaaatgaataattataccaaaagttataaaataaaaagaaatctagaagctgttaaaaagaaatctggaatataatagccctattttaaacaactttaatttaagtagaatatttcaaaagaaattaagttggaaacatgaagatgatgacaaaaacaaaacaaaaaacatgtatgtctaatcggcagtccacagatttgagcttctatctccttgcgtttctgatatattcagatttacttctacgacttgttcgagacaaaaatataggatctgtgtgatgtgtctttctatgtttatatacattcttcaactccactgcaccctttttttttttttttttttggctttctacatgagtaactaatgtcagaccaaacatagattatctgtacatatttaagcacaataacattgatgcttaggtgcctgttccgaggctaaccattgctgcctgcggaacttcccattacggtgttcggtatatcacggaccagaaacttcactgtatgttttctcataccatttaatatctcgaagcattcatggagatcagaatctgtgaccaacatcacccattcttcttcatcatccaagtatttcaactgaaaggcaccttcttgcagcttgaaacgcttagccacttctctgtagagctgagaacacccaacaacgtatggatcaagcttgaaacgtacagtgtcctctctgtaagtggcttttacggttagtgttgaacttgatccgctttcaccgctattgttatgagttcttnnnnnnnnnnnnnnnnnnnnnnnnnnnnnnnnnnnnnnnnncagcaaaactgctcctgagctatttgatgaatccgacatgctacttgatatggagtggtttggttctacagttccattacctcgctcgattcttgtattcattccatcacctgcaagtgctacagagctcaagcaccttcgaacacaaaggtcttctttatccttgtttacctcttcacttctttttcctatgtcggtatcatcactatagatcaagccagactgtttgcttatccaagtccatggcttcttcaaggatcctgaacacaatgagaatgatcttttgttagaccatattcacattcttatagctcctccaaaaaaggtcttaaaatgtagttattattttttacctggtcccgcttggtggtttgtttcaacatcctcctccaacttgacaccgtcaccatcatgagatttaacttccaaaggctctactgacacatcttcatccatatcaccttggcttcttgcacgtgcatcttcatcatgagaagacagactcttttgggtcccaaattcttgtataaaagggccaactgctacaaattcccctgtcaccgagtcaaacttcagtcctccttctacaccctggacagagtcaagcaccgtctgtattttccttagtgacctattcactttgttaatctttcgagatggccatctcataattccgtgttgtctacatatcctttttagtgtagtcggacaaactgcagaaagaaagcaaaaagaaaaacatccaaggatcagcaattgaataatcttgtaagggaaacaagcaaagagcactactagtactagtttctcacnnnnnnnnnnnnnnnnnnnnncctttaagctcccagagaagtattgttggagaacatttaagctcacattcttctctgtactgcttttcttcttctctaatcttcttgctccgctaatttcctatgtaagatatacaacaatactcaggctctatacctagcagcatgtatcaaaatatattagagtaaatgaatggattagatgcatcatcatacctgctgaagagtgccttgagaacctgccatttcatttcttttattagaggagatgttcgaaaaggtacttcgagtagagttgacgtcagtatcaagaaatgtcgtatgaaagcttccaacggatacagtagcctgtgggagatttgtcatttctacactacgagatccaaattctgtaccgtcaattgattcagcatctgaaacagttttcagagtccgacatagtctctgcatggtgcccgagagactgtccagcaaaagttgttgttctgagcttcccttcatacttacaggtaaaaaaaactcaagtatatagtcattgtcaccagtgaatgtgctcctcagtttggtagcaactgcagcattaagaccaaactttcgagcatgttgaacaagagggtactcgcagatatcaaatgtctttacatcagatgagaaacacggtttgtttatatgagtgctt

SEQ ID NO: 27603 - DNA, 1485 bp, Arabidopsis thaliana landsberg
tggttaagagtaaaaaacacgagatcccatggtctgatctgatcccaattctcatttggttatgtcataagtgggtattattgtattgggcttttattaataaatatgttatgtattgtcgtattgggtctttcccaaaaaaagctgcccgggctgggcctgtactttttattttcgtaaatttaattgcaagcccttttaacaataataattgaaaaattcaatgttgttaccctaacttatatccaaacttggacaagtgttttaatcattttgtaagaaaaacttttttttttttttgaatgaaaaactttactttatcaatgctctctttcatatgatttatatgattttcacgactcatttatcacgaaaatctgatggacagtcaactttattatatataacataggtgtaagaaaatattagaacaactgtagagcaaaatactgtaagaagaagaaaaattgaaaatttgaaacattacttttttttttttttggcgaagtttgaaacatactttaaacctctaatatcctacgtaaaattatatcataaaacaatagaaagtaacaatgtgtgttttaacaaaaaaaaaatcagttgcactcagcaggcatgactttgtatcttggcttatcactgcaataagaatagaacatcagctttctcctagcccaatccatggcattgatctgattcttcgacaacgtggcaaaatcctgaccatcaacagggtccagactcgaaatcgacccgcccgacttggtacatggcccggacccggtagaggatccgttgttaacggaacagccacttaactccacgtcagcaacggaaaccacgaaaggggcgtacttgtagttgacggggtacttaccacctttagtggcccactctgaaccgtcccaaacggtgacgtatagagacatcggtttagacgggtacgcgcttgtgaaggctccccggtttggaaactgcctaaccggaatgttgactaccaaaaatctgtaaatccaataattgaaaaagcattttaaaatcctgaataacgatcacagttagtatttaaaagaaatattgagtttctttatgtccaattgtttaactaaaatatttattaagtactgaaagtctaaaaccaatccctaaatatattgtattaatctaagaatatcaacttgtatctttgtttttgtttgtcaacatgcattaggtgtactttattagtttgtaactttagtagatgacaaatgctcattatgatgattaatctattgttatatttcgtgttcaaaaaattatacagaaaaagccattctagtgatctatatgaagcagtcgcgcttaggattcatgaacttatatttaatgtttttgttagttttgacttttcttggcccataactttgcctttcccttaaatggaatggataataaatgatactaattcgtaagaaaaataacaggaagatgataatagtc

SEQ ID NO: 27604 - DNA, 2762 bp, Arabidopsis thaliana landsberg
ataatacatctatatctaaagatatatgtgcatgtaatgttaatgcagaaggagcagaggcattaccttgggatacacgtttgaagatagccattgaagcagctcaaggacttacctttttgcataactccgagaagagtgttatctatagagacttcaaagcttccaatattcttctcgattccgtacggtgtcgtttttcatctctagctccttcccacgtttaaagcaaaaaaaatgctgtttctagaagatatgtcctgctttttagtaacatgttctttgccatttttatagaacttccacgccaagctttcagacttcggactagctaaaaatgggcccattaatggattctcacacgtgaccacacgtgtcatgggcacacaaggctatgcagctcccgagtacatggctacaggtaaataaaacgtgctaattatattaagaaacatgttttaattgttatcggtattttcctttgtctattggattaacttaaagtgatgttataggtcatctatatgtgaggagtgatgtttacgggtttggagtggtactcttagagctcttaaccggtttaagagcattagacccaaaccgaccatctgcgcaacaaaatcttgtggaatgggcctaaaccgggttgaaccagaagaagaaggttcagaaaatgatggatccacggctcgagcagaagtatccacttttggcggtgaccaaaaccgcggagctcattcttcggtgtctggaggctgacccgaaaaaccgaccgccaatggatgatgtgcttagagaattagaagtcgtaaggactatcagagaccaaccccaagaagagaggcgtaaaaggagcagtggtccagatactaaccgggttcgtggaaatgattcaccatatggccgtagaaccggtcgaaccggatagtcaaagagttcttttggatcagtcatacgtatattacacagtatatacagacgaacaacctttaaagaaaaaaaaatgtaatactttttctctggtagtgaatatatgttattaatttctagacctagtgaaatatttgttgtacacttcaaaataaagccataatttattggaagacatgtaaataaaaattgtgtatctacattagcaaaccaactacacattacaaaagtagtaaacaaagaaaacttgaatcattttttctagaagaaaggctctttacacgttttctctttctttgatacgttttaaaacaaaagccaaataaagcaccacctaataatcttgaaatagtgaagaaaaactatgaacaatgctaccacagcacaaactatatgtagtctatgtctcttaatcttcatgtcatgaaagacatcctctgacagaagaacgttctggaagataagaagaagagaggtgaagcaaaagcttaatcgtttgtcctgaaaaagatctgcaaacatctacacactcttctacatcatggtcacatctcaacaaaacccattcattgtcttcatctaagtatttcagatcgtatctgctcacatcttctatactaaatcgttttgctatttcccacattaaatcttttaacctatgcgagtttctcatcttaaaccggatcttctcctcctcatagcttacctttaccctcagaaaatcatcctcttgtgatgatggtgataagtgtgtggtttgcgtttctttaaaagatcttgagactagtctagtcttatccgtgggatcttccttgattacttgtgtttcactggaacagcttgagctgtgactacacgaggaaccaggggactttgcaggtggtgaatgtgaataggacaagaatgtagtaatcttggattgctgttgtagggatgatgcttctggtgaagcagctagatttgggaaactcgcgtagaaggagcctataggaagatgatgacccgaaacaccttcaaccgagtcgatgaccctttggattttctgaagcgaatgaccaactttcttgatttttcttgaaggccatctctgtatcccatgctgtctgcatatcctcttcaatgtcgttggacaaactgaaacaaattccaagatcaataacagaatctctgatgaattcaaattccaagaatgagaatgtcaatgttttacttaccaccaatactcttggcagcatctttgagactccctgcgaaatattggcgaagaacatccaaagttatgtttttttcggccttcgttcgctttttctcagtcactctattgaaaccactagcactagagaaagtgttgttctcattcacactcacacctttgccatattcagaacctaactcgcccatctccgttgttcctccatcgaatactaatcctacattttgaggagtgctaatactctgatgtacttctgttgtattctctatctttggcaatgtcactcctttctctatgacctcgctcaccattgaatctccctcttcttctagttccttctgcgtgactgtccttaagcttctaggtacatgcgccattatagtcgaaagagcattcaacattttcctctgttcctctatatcccgacaatttttaggcaaaaagaactccaagacgaaatcaactgagccagtgtggatacagcgtaagcgtatcgcgactgtaccatgtaagccaaacatagtcgcgtggtgagagcccgggtactcccatttcttgtagctagaaacatcaaatgaaaagcaagggccattggtcaaaaaggcttctccaacaactc

SEQ ID NO: 27605 - DNA, 1548 bp, Arabidopsis thaliana landsberg
aatataggccgttcgatggaacagcagaggaaatatctaccgttggatcttaatctaccagcaccagaagatgatctaagagagtcaaagtttcaagggatagtattctcagcaacaccagcgttaatagattgtcattactagttgttttttttactacataatatgatgaaatatttgtgaattcttcttacttactactatattgttgatcattggaattattttttttttaaattgaatcaaatattatcatttttaagaaaagaggaaaatgaaatgtgcaagttataatgaaagagaggaatatagtgggagttaagtaaagggttgtgtgatagttagatgatctacttgttgaagtaagaatagtttgagtaagcaagtggttagtgttcatggttgcctttcattcacgaaaagtaagtgacttccaaggcatcttttctttccctctttttaaggtatttttttgttatttttattttatttaacaaaatttgcaaattatgaattactaaaattgttttttttcttgaacatgtgaagcaactatttgtattacttgaagacgcctcttttcccacgattacttagattctccgtttgcagccaaacgctgtatcgtggtgtggtgttctgcgttggcaacaaaatatgtcatagcatatactatctagaaaaaaagattaggaaaatatttccaatataaatcaactttttggtcatatgggtaacgtatgactttggaagacgagagttcaaactttctttctgcaatttttaactatgataagttactgtagacgtctagagtgacaaaactatttgattttataaggttatggagattagtttggacttttggtccaatagacatatatgttggtccctttaaaagtgtgacaataaaatatctgattttaatagtttcaatttttattatttaagattaaacttagaatacacctgattattagaaaagaaaactctaataaaatatctaactatttttgttactttgcagagataataataatgtctctgttacgactttatgctataaggaccaatgctagtttgagaatttcctcatcattctcatttcattaccattttgtatatacgagtttgaattcatattttcaaaaaaagaaaattttagaaaaacattatcatgtaaaattattgtgaattgatacaaaaataataaataaatagaaaggcagtggacacgagatggacgtggtgatgaccggcttagggtttggcaagagaatcacaaccacaactaaatagacgtggattaggttcttctttggttttgggttgttattttttctggtcaccacatttacacttttataaatatatgaattattttaatcaattatgacagactaacaattattataacagaacagaaaaagaaaaaagagcagaaatcaaataattaaagaaaggaaaaagataaacagtgacagcagaaacagtcacaagattcactcaccgcttcactccttgcttccagtccttctcttttaggat

SEQ ID NO: 27606 - DNA, 1407 bp, Arabidopsis thaliana landsberg
gagccaccgaaccggtggccaagtctcccgccaaaactaataataagagacatatacacggttcaaacgctgaaaaggttaaacattttcatcaacgaaacaattataaatatattttatactgtatttagttaagtggtctctcatcagaacttataaatgttgcttgtattaaaactttttgccccttcctggaatagtaacagaatctttcacttaaacaactaaattaattagttattctaaacaacaaactctagtagtattagttattctaataattaattatgtccagcgcgtgatgacataagtgatgatctgacaaaaaatgaactttgatacttaggagatctttttgaatcaagggaatcatcaaataatatataatactcaattactcagcatttgcaataaatattatcttcgtatcttaaggagttgatccgcatatatgcccaaagaccaaagtaagtaaccaaaacacattggaatctctttgcaagacgaaattcgaattcggacataaaatttgatttgtttttaatctgtgtatctttctaaacaatatttaaatttggattacaactagaacaatatccttacaatcggttgagctaccaacatttttgttgctatatctagtgtcgataagttagtgaactattgaaatcaagattactgtatctcactagcatatatgtttgttctaatattaatttaatcacagttctaaattaaataagtgtaatttctttgcgtgcagacgaataattcattacatgaggacgacaaagtattggttggagaatccgccaataccagacatgtgtcggataagatcgaacacgttgataaaattcttcagccgaaatttgaaacaattgaatgcacgattattattaacgttatgtatgtagaacaacaaataaaaatacactttttgtgactactagttcagtggatctttatcagttttcgtgcacgtggttcacgtggtttgaaaatcgagtttctttcatagagcaaaaaagtcggaactagttccattgacttatttttaagctcgtgttggctgaaaatcatccacatttttaaaaataatacaatcttacctctttgtctcatctatactttatttcgttttagatatttcatatttatttgcctactcattaaaaaaatatctatctagtaatcttttttaactaactcatttcattaaaatagacgagaaaggatagtggtttatgtatattgattataaaataaacaaaatgatgcatacatttcttttgtagtccggcgttaataattgattatatgcggagtgaaaaaacgaaaaccaatggttaattaattagttcatatgcaaaatatggtgaaaatatgtaagattggtgtgagcct

SEQ ID NO: 27607 - DNA, 2367 bp, Arabidopsis thaliana landsberg
  unsure (1)..(2367): unsure at all n locations
attataaggacataatcactcaagcggattcgaatgaacttttatagcatgctcttaagagctgaataagcaagtatcttaggtaaaaaaaataagtgcatgagacaaaataggcgtcttggtttgtaatcctgttgactagtacagtgaatgacagagaaagtgatcatgaatagggtttgaatttgattctagggaatagttgatgtttcagcactcaaattcagaggtccacatcatcaggaatatgtgtagttttatttaatgtctgaatttgatggatccttctgaaacctttgatttcgacaaaacacccacaatgtgtttgtctctcacttctttacgtaacctttgtagattctctcactctctctcatgtccatttgcgccacgtcactcagatggttgtaccatttgcgattatttgatctcaatgtggattgttatacgtgacatgtcatcgtcctattggtttagaatcaaaaactttaatctcccgcgtccccttacccaaccaaaaaactattgatgatcactttgccttttttttnnnnnnnnnnnnnnnnnnnnnnnnnnnnnnnnnnnnnnnnnnnncgactatacccaaattaatactttgaggagtcaattacgtagatgattaaattatgaatattatctggaagagatcgacgacatttggttggagaatccactttttcgggggtttgtgtcattcataaataacaaaaattttagatgaaaaagaactaagttaatcattagacagaaatttcaatagcgtaacttcaaaaaactaattataaaaaaacaaaatcaactgtgtaacttacgtcagatgtaatgtttattagatgtaataggttccactaatccatatcaatattatcatttatgagatggagtgggattttgtcttttatgctacattaacaagtacatgataatttctgggtttcttttaccggtcttaatattaataaacatgttggtatgcatggttaagagttaggacttaattaggaggaggctcatacatatatgacagaactgaaaaattcagtagcaaacatttatctataacatgtcgtgtaaattacgttggttctttttacgacagaggtttactaatgtatatggattatctcatactcataatatgtagttacaatatatatatatatatatattataacttttttgaatctagattatattcaaagaaaaaagaaacatttatacatgtgaatgcaaaatgcaaactttttaaaaaacaaattacaaagattttctatccttaatgttgctcgatgcaaaccacgtttggatctcatccgcatatttcttcacttctccttttcttaaagtgctcaagtgatttcaaatgttcttatcaatcaacttaccagttatatattttatatgcatgttattccctatttaaacaagttcaacattcctttaacaaaaagaaaaagaaaaaggaaaacaagttcatgcctctcttgcctcaccttaagagtagacgtaccgatgttcaggggcgacctaggcctctaatacgtcttcttatgatatttcaattgtcaaatcgatggtcacacaacggtagtcatcgtagatatacatttgatatgtttgttacaacagttatcttttctttattaatggtaagccttaacataagtgttaagacttatgattatatgccttgtatatttcgcactatggttttatattgtttcaaaaggaattcggtgagttacaattgttgaagtcattattttatttgccattttttaaagtatcaatcctttaaaattccgaatttatcgtttactctccttttatgtaatcatgtgctcttagagccaatacaactaactttcattttcttatataagttaaaacattaacaaataggtatagatttaatttctagaagattatggaaattaaaacacgactaagtgtttttttgcagaaaatgtatagagagagaggggccatggatcacgtggaggatgcgtgagatggaaatgaaaaaacgaagggagaagagagaaagagtgattttacaaatctcctctaatcctttctcagccaattatgatcaatctcccacgtggggcttctggccccatgcatgcatatcatctttcaactattcactcttttgtctccttcttcatctttttgcgtgatcttcttctatatatggctgtctttatctccacaagtggcttttagaaagaagactctcttttaagtttgggtgttaattctagggtttccattaacaatggcagattcttcttcttctgcttcttacattcacatggtaatattatattgattcaagaaccc

SEQ ID NO: 27608 - DNA, 912 bp, Arabidopsis thaliana landsberg
gccgactctactatcctggtattatgagattcttatgttaaaacttacaaaatatatttacctagattttgtctttgtccatactcttccatgtctcgggatcagaacaaaacaactagtttacgtgcttttttggaaggtcttatagtagtaataccaacagagctacagataatggattaaatacatgtaaccaacaaatgttatattacttttataaaataattataaatcaatgaaaacaattccttatgaatcgctaaattttcatgaactcaaaaccttattcggttttcataatgagcaatgatgaatacatgttatacgtcgaattattattttggattctcaagccggccctttgctatcttattttctcctttacaacatttttcaaccccattgtcaaagagtcggctcttagcccatgattgtaatgaatggaaagcttgaatattgcgaccacactaataatttcccgtcaaaatatttgtttaacttaatgtatgacacatgtattttacgagcaaataaattcaaaaaatttaagcattagcgaaaacattgtttctccgctccacaagacactaaaacataaataatgaattaaatcagtcattctacagaaaattaatcaccgtagtcggttgccatcattccaaaaccttaaaaaaaacccatgtaaaatgatcattaacaacaacaacaacaacaaccaaaccaacaaaaattaaagtaaaaacagagtccaaagcctcgtcacatctgcccataaatacccttcaccgactcaccatcttaccacatcaattctctcatatctctctctcactttcgaatatatcttaagataacagagacacatactcttaagtttggtgaagaataagaagacaatgacgaaggaagtgg

SEQ ID NO: 27609 - DNA, 1433 bp, Arabidopsis thaliana landsberg
  unsure (1)..(1433): unsure at all n locations
ttgtacgcaaaccgtcacgtgaaggaagcgtgttcgtattgtcttgatatgatggatatggatttgatgccgcaacctaatactgatgcgaaacttatgaaaggattgaataaactgtataataggacgatcgctgcagagattacagagaaggtggtgaagatggcaagtgagagagagatgagttttaagatgtataagaagaaaggtgaggaggatttgattgagaaagctaaacctaaagggaataaagaaggaaagaagaaagggacagatcatcaaaggtataagggaagaggtgaaagaagtaggactaaagcattgtaacatttccaaaagaagcatgtttagatttgtagctgaataaacagtgtttcatgtttttgctttgtttcatcacattagttcggaccgttgttaggaatttatactcaaccgaattaaaccgagattattactgaatcactgccacttttgtgtaaccgaatgagtaaaccgaaacatatcccgtttaattcgattatagtctcaaaaccgacaaataaaccgatccaaggctaaatataaatggaatcgagtcttcacacaaacaaagtcannnnnnnnnnnnnnnnnnnnaagctttgttccggtgacgatcatatttgatatttgtggatgagcgtaacaacaagttttggaatttggctgaatcacataaaccttgataatcaagcaagtttcttgtataacaacccccatttttgtaatcgtcgtttcaatcgtatctcaatgttgaggacagtgtctcttgctcggaaccgtcttaggtcggaaacgccatcatcttttcttgctcgagaccgtcttaggtcaaaaacgccatcatcgtctccattttcttcgaagcggcatacgcctaagacaagcgaaatagaagaagagtcgactccaaaagattcagttttgttaaaccctaaagatccttcaagcgcacctaagctcttccttgtacagcctcgtttagcaccgccaaagtatctacaagcgaagctgaacgaagcgctttgtctcgcgaattcgcttgaagagcaacgatatgggtactttgaatctgatttttttgacaaggaattgccttctcatgttgttgttcaaaaccctgtccgtagatcgtctaaacctcgcgtaggttcgtgttagatgtttttttatgaatcatgccttccatatgttcgacgatattcctgagagactggtttaaattgtgtttcgattttcttagatacctattttggatctgggactgtagacaacatcaaatgccatctcaatgctgaagattccaaggcaagcagctaaaaatttcaccattatcaatctctttttttttgggtttttttttttgcgctgcttgtaatgaaaaagttgatcatgctgttaacaatctcttg

SEQ ID NO: 27610 - DNA, 675 bp, Arabidopsis thaliana landsberg
gagtgatctaagagtggcgtctgtgacacttaaggcgatgatcttttcgaccaacctgcaaatagctagggatgttaacttagaatcaaatctgtcgatcaccaatacttgtgtagtgttactagtgacaaaatacctattaaaccagccacttaccaatcaaataaccgagaatagatagtcttagctagaccgtctctgctgattaaagcactctgtggatctagacttctcttgataacttcctcgggtgtgatcataactcgtttacataatgcatcttcaagtgcctttaaatcacacctgaaacgagatttctaattagctttcaactgatgaaacatttagaggtcttcttagagacaaatgtgttttacatgagaagttctgctgctgttttaagatgaaatttcgacttctcatccttgggaactgatgaatccacttcctttcccttagtaaaatcgatgtttccaatgtgaagaattgctgcaaccaccctgaaaattgcttcctgttgatataaaggcagaattaagttcatcatcaatatagaagtgcatgaactaaattgaatttgcaacatactaagtgtagttgcttacagaaactgacctgttccttttcgctaattccaacaatatccatagctcttcttgtcgcaagataatcatg

SEQ ID NO: 27611 - DNA, 634 bp, Arabidopsis thaliana landsberg
  unsure (1)..(634): unsure at all n locations
cggccctagtgcatatagtccccgtgggtcgaagatcagagcatgttaatattagcctcttccccaggatttttttagaacttgagaccttgagacacatttcctttacaaggtctcctagtaaacttgtagagctacaaacgttgggcctctaatctaatttgcttcctccttgtgtgtgttttttactatagcttgtcaatggatggactgtggaggagggcttnnnnnnnnnnnnnnnnngtttcaatacagctgcaattgccgtgaaggttacagcaatctcatgaacataaccacatttccttgcttgaagcaatgtaagcagaacattttttattgattgtcaattgaagaaaaaccaagactcaaaaattgagattgtttgtgtttgataggtgcacttggaatggactgtttgaatcttgggattcctttgtcaaactcatcatcgtcttctccacctgctctgcctgatagcagcaagaatcaaggtttgactcgttaaaacaagatagtttctctttaataaagatattacttattgaagattttgagttttgtcttaaattgagcaggattaaatctaagaggatcatcgttgtggtggataacattatgtgtctctttagcg

SEQ ID NO: 27612 - DNA, 1102 bp, Arabidopsis thaliana landsberg
  unsure (1)..(1102): unsure at all n locations
cagacccatgccaacagaaatcaataagagaaaacgaaccctagaactataagcttcaacgggaatcagaacaagatagaatttttcaacctagcaaattacaaagcgatgcatctgcgctaagtcaccaaccattgaatcgttttaaaaaaattcagaagatcaaacagagctccaccacaaaccctaattgggcgataacgaaaagactcaacacaaaacaggatcgcttaaaatccccaaatctcagattcgactttttgtaatccctaatcagaaaacttgacaagaaaaacatcaccaaatccaaaaactttggaatctaagatacattataaggaaagttacgaattgggtttgatcgattnnnnnnnnnnnnnnnnnnnnnnnnnnnnnnnnnnnnnnnnnnnnncgagagaaaggtaagaataagctcacgaaatctgaaatccaaaggaaactgtcgccgccaaatttcccagaaattttatttatttcgattaatctctcttatacgttactatttattttatttctcttttgttggtcaacgacccggtttgtcatccggtttacgatgtttggtttaggcatctgaaatctaccgaaatgggccggtaattagctcatacccaacacgaccagaccagaccgacccgacccgacggctccagattcatccatgtttcatcttcctcatcagatctaattcaatctgcgaatttctcttaaaccctaaccctctcgctgccgtccggtggtttttccgacgacgaactatgacgattcacgctgcagtaatccagaagcttctgaacaccggagcacatctcggccgtcgtgccgccgagcaccatttcaagcaatacgcttacgggacgcgtaacggaatgacaattatcgactccgacaaaaccctaatttgcctccgtagcgccgctcatttcgtcgctaacctcgcccacatgagaggtaacatcttcttcgtcaacacgaatcctctcttcgacgaaatcattgagctcacttctcgtaggatccaaggagattcgtataatcacaaccgtgcgatgaatctgtggaagatggagggtttttacga

SEQ ID NO: 27613 - DNA, 2013 bp, Arabidopsis thaliana landsberg
cgcatgagagttgaaacatttgagatagataacaatgaaacgaagattagcacagggtcatggtcacttacatcctgagaagcaaagagagaaataacaccaaggggaatgaagataacactaatgatcaaaaacgttgaaatcacctgcagaaaaagagataaggaaaaaggataaatttgatagcgattcaaagacaaaacttgggagactcaaacatgagtaatacgaagagaagcttacccaaccaggcgtaagaattggtttgcaagcaggaagctcctgctgagtaaatttcgaatctgcagatcaatcaacttttagctatagcattctcgattcctagctaagacttccagctaaaaatcaattctttcgatgaaaaaataagaaccctaataatcatttttgactaaagaacttgaagtcaaaattcaaagacacagcgaatattgattgaatctaaccaacgagaatcgaaaggaagaggaagagggaaaggagaaatacacttgggtctcttggaatttctccgggcggcggaagaatctatcgatccggcagcggcggcgctagaagatggcgtgttagaagaagacatagctaataagaaagggagatctctgagtggtgaaggaaatggtgaatttgcagagaataggaaatagagaaaagcagaaggagagaagatgaagaggaagagaatggtcgtcgtagtcgtcaacggcggctggtaagacccatgtccctctcgatctagaagaagaagaagaagaagacgaagagaaaccccaaaattgaagtttcttaggatggatcgtgtcagtttcctattggtaaagactgtcccttttttctttttgctactactgctctgtttttgtttttttgttttttgttgtaagctgaaaaatacaactaaatattacgagattaatgcatgaccaagtattttattttgttatggacttatgatcacagcatgaatattgaattagggagacaaaaagaaacaagaacaaaaaacaaatagagcactatagactagagtggtcaaaaaaattgaaaaatctatgcatggcaaacgtcacgttaggacgcgtagatagcgaccaattcattgggcctttaatacataaattgggcttaaactatttttaaaaaggcctccgctttttttttattcggtccaatatttgtattgctttttttctcaagctggatcaagacaagtcttcttcttctttttttctcaagctggatcaagacaagtcttcttcatattagagtgagatgaaagggaatagattcatctgtaaagtaatataagaagaacccataaaataaaggagactgcttaaaatctaagcaaccaaaacaaaatactttcttccttttttcatttttttccaacttctgattcctatttgcatacatatgtactcaattgatgagctaaaagttaaacatcagctttgctccacttgtcatctttattgaaaggtacaaagcacacgaatcttttcatcgagattaaacaaattttacaacagattagatgctttaattttgttccttattcccatgcatgtgcatactaaatcactaaatgaaaaaaaaaaaaaaagtaattttcatatcttatgagttatggatgatgatatttgcaaggccacatgcgtcaatacattggaaatagaaggagttagacatgtaaatttgaattttttggtatttagacatgtgtggatgcaaaaaagcttgcatggtttacaacttcaaagcctaaaccctactgcatatatagatatgtctcccattattttccatatattaaaaattatttatgtcaatgtctcttaataatttatacttgtaatttgcaagacgtcgtgtgttcctttttccatctttcataaatactaatattctcttgttgattagagcatcatcaatcggcatttagtactttgttagttaaatgatgcagtcgagagaggagatcagagatga

SEQ ID NO: 27614 - DNA, 1124 bp, Arabidopsis thaliana landsberg
aaagacaaaacaccaactgaggttacttccagatctgatacaggaagtgctttggtgttaacagaacctaagaagctatttcggaatcagcctgtaccagttgataaaggaagtggtggtagagactcgaatgatatgagtatcgtcggtgaaaattctcggagatatgattacgggtatctatctcctacactagcagctctaatgggagatgaaagcaaggaattgcttcctgaagacaatactgtggaagcaagatcacctatcgatgatttttcctcgtcccttccaaatggatgcattcccataggtctgcaggaatcaggaagccaacgttacacaaaagaggcttccctttcctcgtcaactattagaaggcaaagtgcgtttttagttggtatgttgcctcagtctttatcttgtgttactccttcccctacacagggtggaagctttatgagcagggagactcgggcactagttgagagcttgtcaaccattcagaaaagcaaatccagacttggtttgattccaccgtcacctggttctgctctttctcaaagaattgagaaatcaaagcttcaattatccggacaccgttttctgactaccccatcaattgggagggaagaaataggtgtactcagggataagcatgcggatatacccattaccaacttggaggctttgttatctaaacatgataatagaacaccaatttctgaagagaaaagcatgccagataaatgcattagtggtgcattgagccatgctgttgacactagcgatgataatagaacaccagttccagaagagaaaggcataccagatcaatgtattagtggtgcattgagccatgctgttgacactagcgatgataataaaacaccagttccagaagagaaaggcataccagatcaatgcagtagtggtgcattgaaccctgccgttgacactagcgatgataatagaacaccagttcaagaaaagaaaggcttgccagatcaatgcagtagtggtgcattgagccctgctgttgacactagcgatgacaggccaccagtttctgaaaagaaaggcataccagatcaacacagttgcggtgcattgattcctgcgtgttg

SEQ ID NO: 27615 - DNA, 999 bp, Arabidopsis thaliana landsberg
ctaaccccaaacctttggttcgttttattgaagtaatctcataaatgacaatgacttgtgaacgtgagccaacacatcaaaagaaaatagaaagcttataaagaaacttcggttccaccgaatacatatttttaaaaataaccaaaaaatgcaaaccatgttcataaaaagaacttattcggaatacacttatccttctcaactccatccaaactagtttgtaacacaatccgattaatgtcttaaaggagttcgctctccatgaagagagctagtgcccaccggtgggccacctgccttagctaccgtcctctttcgaggagaagttaggtttctcttccttgagttaacccccggaaaagtagccttatttttaaccgctttcttctttgcaggctgctcatcatccccaaattctgaatttgacacttctaatccattttcctcccccttggttagtactccttccaccaaattatcactctccttagtctcctcattaaccattacttcctcctgtgacccttcctcatgaggctgctcagagagatccatctgtgaaactgcaaaccatgttcataaaaagaacttattcggaatacacttatcctcctgtgaagtataatattctcgttaactaatagatcaccaaaacataacctcactattgtggttagttgcactgaattgtaatatggaaatatttgcaaaatgaatctatgtatttataaaaatttattattggatatccatggattaatcaattgatcgttaatcaaatggctatgcatccaagcaaggtatattcttaaaagttaaagtgtattgtttagccataaatattaatgcaagtggaaatttttgttcgaattaatgtttgttgaaagtattcatttttttgtaacaactagcctttaccctacggtataccgcgaagacaattaatttattttaaattaatatatataagagtttgcaaattatatctgtctataaaat

SEQ ID NO: 27616 - DNA, 1728 bp, Arabidopsis thaliana landsberg
tgtggaagcttattgcaaggaaggggattttaggagggttaatgaaatgttggaagagatgcgagagaatgggtgtaatcctaatgttgtgacttatactattgtgatgcattctttgggtaaatctaaacaagtagctgaagctttaggagtgtatgagaagatgaaagaagatggttgtgttcctgatgctaagttttatagctcattgatacatattttgtcgaagactggtaggtttaaggatgcagctgagatatttgaggacatgacgaatcaaggagttcgtcgtgatgttttagtctacaataccatgatttccgctgcgcttcatcactcacgagatgagatggctctacgtttgcttaaaaggatggaggatgaggagggggaatcatgtagtccaaacgttgagacttatgctccattgctgaagatgtgttgccataagaagaaaatgaagctacttggaatattattgcatcacatggtgaaaaacgatgttagtatcgatgtttcgacatatattcttctcattagagggttatgtatgagcgggaaagttgaagaagcttgcttgttctttgaggaagcagtacgaaaaggaatggttcctagagatagcacttgcaaaatgttggtagatgagcttgagaagaaaaatatggcagaagcaaaactcaagattcagagtttggttcaatcgaaaacaatgattgattctcacagtcctttatctgtttcgtagagattagagttttggagccttggctcaaagttttgttttcctttctgttgaatgatactcttatactatgttagatctcaaatcatgtgacctttactaaaatgaaatgaatcaatttgtcacaagttttcatgtcttagatccggtttataaatagtaacgggaaccaattgagcgataatttgaacccggtatgatccggttttgtgagatttccggtttagtataaagcagaaaagggttttacaaagtcgaagcctttaaactaagtttcttcttcttcttccttgcgccggcgggttcactatctctcttctctctctcaaaaaccctactcaagcacaagcttcttcaatcttctccgtaatcaacagtaagttttcttctattccttctcaaagggtttgtgtcaatagaatgataaaccctaattttgttcatggttataatcttaagtccttagataaagtatcgaactttattgtcatatagaaggtaacggaaccagttatggaatctctctttgcgttggtgacttataaaccctagtttctgtgattcgccaagttttttttttacccaaaggtataaaagtctgaacttttttgattctgaatctaattttttttgttgttatcgaattttgagtagatgtcattggaagaggatatagtatcagatgatgagatgaacatgattgatgaggatgatgctactgactccgaagcggagtctctttcggattcggatacagagaacgagatcaccgagaaattggctgagcctacgaagactgcgatatacaacagagatgggttgcttgataagcttcaagatattagctggcctgaagatgttgattggactcataagcttactgttgagattgaccagggaggagctgtggatgtaaacgatgaccttgcgagagagacggcgttctacactcaagcgcttgaagggacaagagaagcgtttgg

SEQ ID NO: 27617 - DNA, 1449 bp, Arabidopsis thaliana landsberg
  unsure (1)..(1449): unsure at all n locations
attaaaacttgatagtttgagatctgagtagtgatcgctaaatgggatttagttctaaatacattaaagattaaaaaagtagaggctgccgtaaaattagtggggactaattaagaaataaaataaaataataatgaccataattataatttatataactatgagttggatctagttgaattattgacgttttcaacgtacttttattggtgttcaactttttctgtattttaaaaaaataatatgaaattagattcgtacgtagcaaggactgtctcttgcgaattgatgaaataattatacttgagacaaagaattctctgattgggtatagcacgaaataagattcaacttacacatttaagaactactagattttaacccgcggtacaccgcggagacaattcatttttttaaattaatatatataaaatttgtaaattattttatagtttacaattgttactaagtaacgtcctgccaaacccgtcccgccaaacccgtccacaaaaaaaaattatttattttatcaatgttgatcttatttataatatgtttatgaatcattgtcaaaatattttattcgttgtgggacgttgaacccacacattttttgccaattagttaatatatgttcattcttaaaatttcgaatcacaaaatatgataatttttttttgagattttttaaactctatatattatataatgatgttaattttttttgatatattaaagtttttataaatttaattattaataatgttttatgaattttaaatatataaacacagtggtgatncnaattaatattttttgtcttttaggtaatgacataataactctaaaagcaaggatttagaagatttaaatctttaattaaatattttcattcctaaataattaatgccaatagcatgacattgtaaataagttcaaatacaagatttatttatttaaacaaaaaacatttagtaagaataatatttatttaaacaaaaaactttgtttaaaaatatttttaacaaatacgtttatgctaattttaagggattgatgtgaagtttgtttggattaaatttaattaataatgtgattgacaatttaaatcacgaatttaaagtaaaattaattatttgggaattttttttaatgctaatggcattgggttgtaaatcagttcaagtataggatttatttgctaaaatagctgcaaaaatgtatatgtagatatataataagtgtgtattagttgaagattttaattcttattatttcgtaataataaatggggaattaagtgcagaatcgtccgaatttagtccgatatacaacatacctcacaccattcaaagcctaagtaagtaatttattctagtttttccatcatacatggactaggggacatagtctaaaatttcaaaaactaaaataagtttgttacttgat

SEQ ID NO: 27618 - DNA, 628 bp, Arabidopsis thaliana landsberg
  unsure (1)..(628): unsure at all n locations
taacgttctggactttatttgagtataggtttctttgtgcagttattaaatttactggattaagagttcatacgtgttatgtgcatttcgctttaaaaagtcttagctcctgagatgatcgacaaatgagttgcggccaatattgggtcattagaaactattgggctataactttgggtccattgggccgaagtagcagctagaagctagtttctgttttctcaaaaattaggcctaattcaggttactcaaaaatctagaataaccttatattactgtaaaatttgagaaatctggttgcataattctttatcatagtttctgtagagaacagaagcccacatgttatataaaactaggggttcaatggttacgacttacgatgtacgtggttctcaggcgtgagacccagcaagagcaaaggagatcgaaattattagttattagatgaaatttaaagtaatgagtttcaacttccctttacattgggaggcatttgtctcccgatccattaccaaaaaaaaaaaaaacttccctttacattttatcttaacctccttntgaactgttgtttagttagactcaaaacgtgtaatctatctatcaattatttttccattatgatgac

SEQ ID NO: 27619 - DNA, 1437 bp, Arabidopsis thaliana landsberg
  unsure (1)..(1437): unsure at all n locations
aacttgtgttaactttaaataaaatactaaagaggggttattggatttataattccaagaaaactccacatgcttttataatatcgaagggtttaattttgatattattttatactaagattccctgaaaaaagtattgaagttttaacataagtgaataacactaccctttaaactctcttagcaaataactgaaaattgaataatagtaataatgtgaagtgtgtttagaattatggtctattagtagtctattcaattcatgagtgaataaacacccctaaagcttgggtcctaagttatattgtatcttctttgtgtgtgcaggtggttgtggcgcttgtgttgttcttctttcaaagtatgatccattgctcgaaaaagtcgatgaattcacaatcagctcgtgtctcacgcttctctgtagcattgatggctgttccatcactacctcagacgggctcggcaacagcagagtcggtttccatgccgtccacgagcgtatcgccggttttcatgccacacaatgcggtttctgtactcctggaatgagcgtttcgatgttttctgctctcttgaacgctgataagtctcatccacctcctcnnnnnnnnnnnnnnnnnnnnnnnnntgtagaagctgagaaggctgtgtcagggaatctttgccggtgtactggatatagaccgcttgtggatgcttgtaagagttttgcagcggatgtggatatcgaagatctcggattcaatgccttttgcaagaagggagaaaacagagatgaggttttaagaaggttgccatgttatgatcatacatcatctcatgtctgtacatttccggagttcttgaagaaggaaatcaagaacgatatgagtcttcattcaagaaagtatcgatggtcaagcccggttagtgtctcagagcttcaagggttattagaagtcgagaatggtttgtcggttaagttagttgcgggtaacacgagcaccgggtattacaaagaagaaaaagagaggaagtacgaaagatttatcgatatcaggaagattccggagtttactatggtgagaagtgatgagaaaggagttgaattaggagcttgtgtcactatatcgaaagctattgaggttctaagagaggaaaaaaatgtttctgtgttggcgaaaatcgctactcatatggagaaaattgcaaacagattcgtgaggaacacgggaacgataggtggaaacattatgatggctcagagaaaacagtttccttcggatcttgcaaccatacttgttgctgctcaagcaacggtgaagatcatgactagcagctcgagtcaagaacagttcacattggaggagtttctacaacaacctcctcttgatgcaaaatctcttcttttgagcctcgagattccatcttggcactccgcgaagaagaacggtt

SEQ ID NO: 27620 - DNA, 2449 bp, Arabidopsis thaliana landsberg
tgatccaacatccttatctagaacagtgcgtcatcatgacccaaatgacgtttacattttattgtacctcaaaaagcgtaagccatggtagtccattaatctgaccccgactcatacatattacgacctcatcaagcatattagtatattaccggaacgtaccacgtcgaccgtcataatttctttgattagtttatcggattttatttttctctagtaataattctaggaaattttatagaatgatgataaagatttttcatattttgttacattttatatgatcaaaaaaattatgttcaacaattcagttaaattttgtcatttattattatttatgatatgttggtcctccgatcaccaatctcacattatatcgtagtttggttgaaactcttcaatactaacatgtgctagtatgtacatctctttttattgtgcaataaatatatggttattgatgcattatctcccaaaacatgatatagtactttatatctcgaaactcttcaatacttagttaaaatataaatatgatcgctatcacttgaactgcagaactaacatcaaaacgtgttggtcatcgttgtcaacaattggaaagtgaacaagaaaccaatatgtgatttttggcgcagcgtttgctatgctttgaaagtccctcatcatgccatgttgatatccgattatcgggcgaccatttatagttaattatactgtatttatagaaatttaatatatagaaatttctgcctggttaagattgtatataaaaaaacatatatagctatataattgtcacacataaaaagtagatcactgaagttctacgtaacaaaaaggtattattgtagttaagaacatgatactactgtctactgatgacttagtagttgctatataggtaggttcacactaattgcataatgatttaattaatgtaacattataaatacattaattagatttaactagtattacgaatcagacgacgcagaagcatctaaagttggggatttgagcagagtccaaagaaaaaccattataaataatccgttttgttcatcttgaccatcggatgaagatatatgtttaccttactctttttcttctaatctaatctaatccaacaacctttctttttgtaatttatatgcaatcttatgataatgtatccaaaaaaatttagaagtacattagtcatatcatataatttcacccacgtgaacattgattgtaaacatgcatgcatatatttttcttttcttttcatatttttttacagccaaaacatgtatgtacatatgcgatccacccatttatttttcagtgactctaacatgtaagcaattcagatttatacacgaaattcaaatgattatttggcacaattgctaactattttgtcggtgtatactgttattcatcacgaattatttgtagtgacactaaacataaacttaagatcttgaaatatttaacaagcttttcaaaacaatatacgattattgtttatcctaagatatatattgttttgagcagactttttttttaatgaaatttccataagttttctctcatgcgaatgatagatatgcatgtaaatcaacgttacagtatatattatgaacccctcgtccgaaacagctggatcagaatccgttttccatcttaaaaagaaatataaaaaaatatacaaattatggggacgattagttgaattgtttataattttcttacatattcatatcccaaaagatcagatcaacttgaatctgataattcttttcgaactaagttcggatcaaactcgagccggatatattgattgacccaattgatagacgtataaattttactagacgatctgtcatggaccactataataaaacggtccacagtgactttatatacgcatttgttatttttttaactttgacttgtacatatcatttgattgagtaggaaaaaaaaaatcttgatcctagattagcatttagatttttttggtcaacgagattaaatattactactatttagttgcacaaaacaaaagggaatataaattttagggaaatgacaaaaatttaattgattataactttgaattcagttggtatgttcataattcatttgttgaaattggttcagccatcgcattcagagtgtgtacttatgggcatatacgcaaaatatatcttaaatcggtgtgtatgagtacgcaattaaagaacgccacgtgggacaaactaccaaatttagatgatgtaactaaaaaagctggatcgattattgagagaccctcaagcaaagatattaaaagtctcccataaagttttactgaaaattcaaaatgattagattattattataatcatgtgactagttttgatctgcctcgtgcatttccactagaaccttaattactagatctttgtaacaaaagcaa

SEQ ID NO: 27621 - DNA, 1780 bp, Arabidopsis thaliana landsberg
gccctatgtaaaccggaaataaccgggtattaaattttgaaattgaaccagatactgctagaaacttcacatttcgaaaaatttataattttacacacaattgcgaaagatttcatcatcttgcatcagagatcttcaactgcgaaaaaactcgagtctccgatgaatctgtaaatccaaatctgttcttcgattcatcaccattctgaaatatcgagttcgtactaaacgaatcactcaccatcaacctcggagcaaccaacgaaccaccggaattaatcgccgtactatcttcttcatgagcctctcgacgattcgtcatcatctgtagctgaagaacatactcaagatcccaaatcacatccctcatactcggtctctcatctccatactctttcaaacatttctcagcaatttccatgaatttcttcaacgaattcgtctcaatttgacctatcaaactcggatctaagatctcatcgattgtaccttttgatttgcagaacatcacccattccgatagattcacttcttcgtgaggaagataaggatctatagctggtctcgcgaacagtacctcgaggaggacgactccgaatgcgtaaacatctgatttctctgttaatttatgtgtttggagatattctggatccaagtaaccgaatgttcctttgatttttatgctgatattgctttcatcttgattatgaattttcgataatccgaaatctgcgacttttgctatattgttctcgtctagtaatatgtttgttgatttgacgtctctgtgaatgattgctccttctgagccactactgtggagataatctaaacctctagctgctccaatgcatatctctagtctttgtctccatgttaatgaggggagtcgcagcgtatagatgttctttgagtgtacctttcgccataaactcgtagacgaggatcatttcggagttttcttcgcagtatcccgttagcgagacgaggtgtctatgtcggattcttgagaggacttgaatctcggtttgaaactctaagatcccttgtcctgagccggttttgcctcgtttgatagcggctttggttccatcgggaagaatagctttgtaaacgtagccaaacccgcctttcccgatcaacaactgctcgtcgaagttgtttgtagcgcttagaatgtctgtgaagggaatcgttaagcctaagtgtaggttgcgtaatggggagttgtggtattgagagataggtctattgtctgaactcccacctctgtgcaatggcaaaggagaccatacagtgccctcaacctctggcttagtcttcttcgatctcctccgcttcaagaataccataaacagcaaactgaagaccaaagctgatgcagcagcagcagcaacagcacaaccagtgatgatgtgaacccgggaactgcttctatttgaataatcagaaccagatttactcaaaacctccatcatctccagaccattcagaaaaccagcatccttattggcctccttggtacctatactgatattcaagagtccagaaccatcagagacattcacgaaatccttaaaaaacggactcgccaacctaggctgctctgaaggctttacatctactcgccaatacccatttacaaagagatagaaatcggagtcggagtttgataagttgctcaaaatatcagaaaaatgaatcctgatgaagtgtctatggttacttttgaccttgaacgaccatgtaacattcatcaacatccccacctgctcagcgc

SEQ ID NO: 27622 - DNA, 764 bp, Arabidopsis thaliana landsberg
ttaacaggttcaaagatcgaagactttccttccacataagtagaatcagaaatctcaaaacaacgactaggtcgaaacatcgaaagttaaacaccaagacaatcaaacaaagagaatgaaggaagaagaagaagaagcttacaagttgttaaattcgttgcaaaaacacgaaaatcaaaacgaattacgagcgaattaaaaaggtcgccgattgattaatctctctctctcgcctaccgtattgtcgtcctctgaagctaaacgacgaagaaacagcagagaaatggttgcaataataataaacacacaatcgtagctttttctcgacgctgaatcagaataatcaaaaatctcgtacctgtttgttgagttccagcttggcccattaaagcccgttaggcccatttcagttatatctatcttccaacaataaatttggtagtttgcgcgcttttaataagttaaaaccaagcagttgtcagagatcaacgagctcgtgtaaaatgtccacaagtgggacttgtgacccgtatgcattttttatgccatttttactaatttcgtgtaacaaatctacaaaacaagataatcattaatcactacgtaatcatctaaattcaatgtgtggtatagaaaaaaataacagatgagatttatgtgtttaagattttgatattttatcaaaacaacaatagtatatatttgtggtatagaattaaaaataaaaagaaaaaaatctacataactgacaagtatgtcatctg

SEQ ID NO: 27623 - DNA, 1663 bp, Arabidopsis thaliana landsberg
tatgtttgtaggctctctttaggagttaggaataaagaccctctcttattatgagtaacgtaactaacatacatctatgcaaaaagtacgtgaagtcgtaaacgagaatccaaaagtacatttgtaaataataatattattagacaaatcgtgataataagttaacgtaattacgtaaatatgtatatgtttgtgttcatcacatgtacactgatatacggactacggaggaatacaaacatatcatatgattggttggttttcccattttataataaataaatgtgtacgatcataacaataaaactaaataattatgagaaataatagttagatagatgatctggaaatcgtgttactaatatatttagctggattttgattaaattattctcttgaattatgatgcaagagtgtgttatgatgtttcataatcttttgtttctatttttttcaactgatgttgctgcgtttgcatttaatagtcacatgtttctctgttgtactccattatttttcatcatattctatattggaattatcgtaatttttttatataattttcccaccaagattttacatcttttcttacaacaatttaaagctctcatttaaaccccctataaaaatattcacttgttatattatgaacttcagtacttttactatgtgatattgtacatggtttcaagaacaatgaaatccaaacgtaagagttacacaatttaagagaatatatattgtacggagggacgatgtggcgtttttacgtcgatgatcaaaggtgagaaaaggcgggacgtgcaaactaagaatggactcatgacaggatgtgcatgtgacaccaatatctgcggctttttttttttacttacttgctaagtctcttcccttattgattcagatctaaatcaatgctatgtactgtgtcatttcagaatcaacacatgacttgtccaaaacattttcacatcttttgttttttcgtccaactatatatcatcttaaatatattgaggttgattgtagtaacgcataattaacaaattgtactaagaatgtattattggttatagtcggcaaaactcttcttcgcaatttcctattgtacgtaattctattttcaataaaagaagaagactttgataagtaaatcttaaatgaaagaaatgagaaatatcaaatttaagaactgacttgcctcttctcatattcaaaatataagtaattttattagaaaacattgcaagaaaaaaaattatgcatctgatcatttatcttttgctacaaacctcaaacgcaatagttaatccaatgaatggattctcgttgaaacgattttctaacagaattctaaaaaactaatcgaaactccaaatttattagagaaacaaatgatgtcttcattgctaacacattcattcaattttgttttacccaaatggtgttgcactccaaagacgtagattgaccgtctgctagcaatattgaaacatcattccacactgattttaaagtctgagaatagatggtactattgttcacttacaaaattgtaatatttccccatagtaatagaattagttcttttgcgcattcacgttattctaaatccaccattgataactgtgaattggcaagttttaatgtccaaaacaatatc

SEQ ID NO: 27624 - DNA, 2082 bp, Arabidopsis thaliana landsberg
gatttttggggtggcatgcaacttctttaactcactgttcctggtttagtttttgcttctttacgcaatacaataacacaatgctagcacaaatgtgttgtcaaagaaaactctcagtgtgttcttgtcaccaatgcttatgtgtacttttattctgatattctagaagtataagaaagctacaggactcgttaatgatctcttgatgacttgactatcaccaaagttttactctcgtgtgaaaaaatggaccccgaaacatagaggagttccttgacgtgacaacacttattgaccattgattctagtttacctttaaggcggtccctttttattttgtgatcggatcttaagtccattcacatgacttgtcggatcttcttgagtcccgaatttaaacactaaagcacttgtacctttttaaacttaatgccacataaaaagttcaagccttagccgacaagacaaaaccatcatctctaaagtcatgcaaactaaagaacaaaatgaatctactaatagataagagattgatagcttattcacgccaatcataaaccaacccttttaaatacttaattacattacaaacacaagaatacacatacatacacatttggctaaaatagcattgaataaaatcataaaccaatcaacttgtatttttttttaagtactatctagaaatttgggtttgatggtcggatatcgagttcatgtgtccaagctctccggtcttgaacatggagataccaataagtttgagccaatacatcaggatccattcccatcactcccgagctttctccttctccttctccatcttcgcctcctacgttgaatgattgctctgcgaccattcctcggggagggatgtttgtttctctgaaaacacattttcaagagattttatctatatatgcgatactatttcattttgtaatatcttcaaatgcttaaatgtgtcaatagagtggaccgttgtgagtgtggggactctttttcatatttgaccgatggaagataatgaaatagaggctatggaatcaaaaaaatggtttccatttgctagaaaaaaatagcaaataaataagaagtggagctacatgattctttatttgcgatttttttttgaggtaagaatcttgtcggtttggatcagaatcttgccgtttgtggaaggtataaaaagttaaaagagcctttttcggacagatatttgtggttctaattcaattataatggaaaatgatcacataattgtgtgtaccttggaggtccaaccacaccgtcgatgataacatgagccacatgtattccaaaagcttgatattcttttgctaagcattgagacagtgccctcaacgcaaatttcccacagcctgtgccaatttcatatattttcttcagtgactaacccattaattaatatatttttttgcgaaaaatttaaataaaatcatttttaaaaatcttgagaaagttacatagttcggagaaaccagcaatgccattcaaagacgccgagcaaccggtgaagagtatagttccttttcctttctccatcatcccgggagtaaccttttggtgccatttattataaatcaaatattaaccttagaaataaaaagctttttaaagaaattgaagtgtcggaatcattcactataacatttacgcttctgcttcctgacataaaataaaaacaggatttggtacatctagcacatcaacaaatgattaagtaatctattaaaaatttacttcttgtggaaataatcttatctattttaactaaaacattaaaagtctaagaaaaaatgacgcttccaataatattaacaagtgtttttgataaattatgagtcaatacaaagattatcctgatcaaaccttatattctagggtttttgggccatgaccaacatgcgagggatttcaaaagaaaacataatattgtttcgtatataataactaatcgcgatttcaagaaatatcacctgttgagcgcaaagaaatacagcgaagacagagacagagatagatgttggaaagattaaaaggaatgtggtaaagaagtgg

SEQ ID NO: 27625 - DNA, 1920 bp, Arabidopsis thaliana landsberg
  unsure (1)..(1920): unsure at all n locations
gtaattgttgttttctccttacactttatgggatgataaacaagatatttttagggatgtatttatctctctcatccgcggagtgagagacttgggagagtgaggatgtggatgggatttggctaatgtaatatccgtcaatgatgtttgttgctgacatagcttattctcttcaattcacaggctccggagggttatggtactcagcatgatccaaatcatcggtgagtgctagtaaaatggattacattgatgtagttgttaatttgttattgctcatgggggtatatttattttagctactgtaactaaattgcatttcttgtactttatttggtttggttacttgtgccgaaatattcatgatagttcatatttcatttttttaatatcttttctgtacctatactacattgctcttacaggtttggcgtatcatatgatgacggatatcctgatgaaaggttgatgcgggatgatgtctacaactatccacctggacataatactctgagtgactgccctcaatctagaaagcgaaactatgaagaaaattatcccagtgaacttcgcaggcaagaaaagccttacatcgattcaaattatgctgctgactattatcatgatagtgaagctgggagtcgtaatggacattaccgtgatcatgaacacgaaaggtcgtccagatatgatggctgcgatgactattcttgtaatgataacaactatagatcgaaaaattaccatcatagcagagatgatggtcgtgaaaaagattatgattatactcgccgaagttatgattctgagtatgaaagggccagtgtgagagatggcagtcgaaagagccgtgatccgcaggacagagaacggaattctcgagatagagaatgggattcacgtgatagggagtgggacaaaagatgttacagccgcgaaagagatgagagtcctcataagagatatgagaagtcacgatctcgatctaccggacgtggggagttctctagatcaagatctcctagaggtcggagccatgggcggagttaccgggaggacagctatgagggggatcactggaatgaaagtgagaggccaagagaatatgaagatagacatgaccaggatcatttttctgctgtataaaatattctctcatccctgctctatattcttttgttacgaagacatttaaaaaatccgttcctatatttttatggtttttgctagaccccatccgccactgttgttgtgaagggtctctaaatgaaatcaacagaagaagatctataccagattctggtaaactcttcatttttttgatctcgtatgtcctcaggttnaaacaatttttcatgcatgacttcattattcccatgtgcatgctaggctgaatgcggtcctttgcatcatgttcgtgttattcgggagcaaaattctgggatttctcgtggatttgcttttattgatttccccacggtggtatttgctttcaactaatctgttaattccttgcgctttttcttgtgatttcttcaacactgtgtgcatttatgtattttgtctgagcaggatgccgcacgcaccatgtggatagaattgagcatgatggtatagttttggatggaaggaaacttatgttccattacaggtctttttttaaataaacataagactttgattgatttagatattacctatggagggatcatagaattactacacatttaaattattgtttcttgaccgtttcagtatcagagtataacattcttacactaaattgcgtgtgttgtagcagccaacctactggtagggctggtgtgtcccgtaggcaggaacatgcttctagacgcagttatggtggaagtcgaaacatgatagttcccacagattggatctgtacaatctgtggctgta

SEQ ID NO: 27626 - DNA, 2085 bp, Arabidopsis thaliana landsberg
  unsure (1)..(2085): unsure at all n locations
tgcgaaagttatttcagtcgagcataaaatatcttcaccaaaaaacaaatacaaaaacaaacagttttgtttttataatctagcggatgatgttcgtttgtagatgcacgtgtatagcagattcaatctcataagcttgttgtaaaatgttgtaaaaaaaaattaatataaaaatgtataaatgtaacatattccgtagtcattgggttatgcttatgcaaatgtaacatacgcttaaggaaatgtgataacaacacttgaactaacaacactaccattttctctctttttgtactttgccaattccattaaacttttctatttcttcagattgtatcaaattctctcttttttttcttttctcttaatacgttgccataattaagaagaattctctatttctttagcttgtaaagttgtatcaaatttatagaattttattaattagtaataaataaaattggttactaaaattggataaaatttatagaattttatttaaagttaccaattttagnnnnnnnnnnnnnnnnnnnnaacttaactaagtaactatgtgataaatacaaacaactttaggtgggatttattgcgactaaggaaaacaattttttttgttttgttttgaatttgcaataattgtactagaacaagtcatatagtaaggtccgtataggccacggttatacctgacaaaattaatcaataaatctaaatattatttttgcttatagaacaaaaaatcttccaacacaagaaaataccaatgaccaatggcaattagtagttttgattaattcagattaacacatagaattgactgttgaccttaaaggacctaccaaaccaaagactagagtcaataagagtataataatagtatgtttagaaataaattaataaataattttccataccaaaaaaaaacatactattcaaagaagaaacaagagacataaattgaaatgtgaacgcatgaacaagaactctttaatcttctttttcctcagtttcttcttatgggatcaacaaaaacttgtcttccctctttcttgatttctcaaagatctgttttttttcttcttcatatttgtaaattttcattttttccgtttaaaaattggatcttttttcttcagctaaaaccctgaagattcttgggaagatcttcttaaaggtctgatctttgggtgtttcttggagcaggaccaaatgagtgcgtcgatattactgtgtgacggcttcgatgtgcgtcgaattctaaccgggaaattaaacggtgatgaatcatcgacggtgaccaccgaggaagacgacgaagctgtgttttccggtgaagagtggtgtgcagagagttcttactgtttttacttcgttaagcaattcgcttacgatgaccctgagattaaagccaagattgatgaagctgatcatgaggtttatcattgtaacactgaccggattcacattgctaacagattgaaatccaaaagggtaagccttttttggttttgtttattttattacattttggaaacgttctgattagaaagtgtgtgtttttggtgtaggctgcgagattgtctctggttgcctcaatggagactttgatgagtatgaaaatgaatgaagtagagaaggaacaagaagtagttagagggaggatttacaggttaggtgaacgattaagtgagattaagatggaaattgagttgttggatgttcaaatggcttgtgtacttaatcaaagagataaagctgttgaaaggattaagttcttgaggatgcaacgagataaaggggtgagatttttccgaatctccttatatgtcaagtttgtttctttcttcatcaattggttcttaaagattgtttatttataaggtgtgttttgttttgtagaatgctgcattttaccagagccgtgttgttatgaagaaagctatagaattggctgcttctggaaatgttagagatcttgaagagctcgctgattccgaggtttgtcctgtcagtatattcccgagagctctgagattcgagcatttgttcaaaaattttcattgtgtcttgtctttctgatag

SEQ ID NO: 27627 - DNA, 3350 bp, Arabidopsis thaliana landsberg
  unsure (1)..(3350): unsure at all n locations
ctgcactgcaggaaggttagaccgtgcagttttctaaattttctccatcttgtcactctgtgtctgtttgggaaagtcaaaccaaacaatctgaggcctcaagatcacgcttgcatcattagaaagaaatgacatcccccacgccataaccttgtttagtgatggaagacatgtgcaccccaccatatcatggttccactcgttgctgctaaaagcagatcaattctcgatctttctttgtttttatgaacagtctttgagtcttgaagcggtgcctcaaggaacaaataagcataagagatatatgtcaactttgttttgcattattctccttgaggagagggttgtaaagtaacgcagcacgagtcgcttggaactgtattgaattctttcttgggaggtcacttagtttctctgtatcatatactttctttgcaggtctcgtagtttctccagcagttcttggaatgtgggtctcagctttgtatcgctgcagtgtgggataaacagaaataccaacgcaaaataatgtcactgttagctgtgacttatgttgaacatctaaatcaaggagaaccgtgataatgaaaggttgtattctttagcaaggattatgcaatgttcaatatgttaatttacctgtgccaacagctctctattaatgagatccaatcaggatcagtgtcctttggaatttccagcctctggttcatgaaccccacagctccgatcacctgcaggtatttcaaagtgtatgtgtgtaacagcacaattcacttgtttacacattacagtaagtataatggtgtttatgattcataccttcctaattagtacaatttatttatagtcacctgaaactagtggatttttaatagaggtttaccctgaaaccaatcttttggcatagagattcttattatttgtcagcttcattgatagagcaaaacatgtaagttttgaccaaatatgtgatttctaggaacaattgtaagtgaaaacactttcattgttctatcgctcagaaagatacctgcatcgagttgagattttcccatgggatcttctctgtggcaagctcccataatactactccaaagctataaatgtcagacctgtctcaaagaaatggagctagttagcgattgaggctagaaaaacaagtaatctgggaatttaaccaaacagaacacgagaatatacttctcatcagcagactcatttcgaagaacttctggtgccatccattgaggctacagaacaggtaagaagccaatcaagatcgtgtgagacgttgactataaatcaaatcaggattcatatcgataagcgtctagaatagtaccattccctttcccgacttgctggttaggtatgtatgatgcttaatacgcgatagaccaaagtcagctacctgttagagatgtcactgttagttgacaatgtttctagttccagtttgcagatttggggtctcacttttctagatcattcatgtaaaatgacaatgttatcagaaagctatataatcagtttgaagatggaacattatcattcataaacaaacgtttatcaagatgaacatgttaccttaacggtcaagttcttgtctaccagcagatttgatgacttcaaatcacgatggatgatggggggactacagcggtgaagataattcatgccgcgagcctgtgtgaagaattatgtaatatgctacttgagatgtaagttgactgagccaaatagagtgaacaagaagacgtaaaaacaagtaatcaaataaagcatctcatacttacaaaacgtgcaactgtcaatgatcatagaaatggaaaaatcagatgtctaatggacatataactaatactcataatgtccaaggccatattgatacgccgcctccaatcaagttttgacatatttctctgcagtagacgaaatagacttccactgccaaaattttatccaaatgattaggggaatgtataagagatatggcttaaaaggcccaaaacacaaagaaagtgagactagtaaccaaaagtgttgagactgaaccgtggaaggaactctgacactatacagagaccctgaggtaaagtcacagctcccataaacagcagaacgttaggatgtctaagtctttgcatcaacgataccttcacagtatagcaagacccatttaaaatgtcttctgcaaaaactacactccgagcaattataatggacgactagaaagtaaaaacattacctcttgtctaaaagattgtatgacctcttctgaatattcttgtttggagatcaattttacagctacatcctgtggtgacattagcaactctcaataagaccgatctctgaacttgcaaatgtttatggcaagggttcataaatcaacaaatgaatattctaaaatatcatcagaagccaaaaaaacgtacagatccaaaccaaagaccgtgatagacagttcacatgagcctgcaatatggaagttactggagcatgtcaccagaagatggactctatattacacaaaatcagtaaaatgtatgatagatgttataaagagtggagtagactggaaaacatgaatctgtttaagagattaaaccaccttgctcgatttgttctccgattgtcaaatcatcccacaaaatttcatactccaagcaattactatttgtatccaccttgttcatagtactgtgactgataattccacggctaatagcgctgtttgcatttataggggaagaccacaaaccagaagcctcattattgataggcttattactttcaaaggcatggctttcatactgaacaccagaatagcggttgatctggtgacacctctctttcttttgttcattccgcacccaaggccacacagaatgactacgccttccttccaaaccttccctttcattccctttccatggccatgataatcctttctttaccatccactcttcagcttttgaggtcagtgttttaggtacaacagagtttccatcactttcatcactggaatctctgaagggctttgtagaagctttctcatcgctacgtaagaatacaccaaaaggagattggataaaatcccccctaggtgtatcagcaccacttgttgctgcatcctccctccggtcagcgaaagcagcatcaaagaaaccctgatcagattgatgactgtccccacttccaccctcaaggtttgcagcgttattatcacctgctcgcattttcgacttgaccttgttgcccaccttagannnnnnnnnnnnnnnnnacactagtcatacgacagtttacgaaagatcagaatattgcacctaatagactaacca

SEQ ID NO: 27628 - DNA, 2648 bp, Arabidopsis thaliana landsberg
  unsure (1)..(2648): unsure at all n locations
acttgataacacagctaattaacgtccgaatctccaggatattgtcatgaatctagaaaccaatatacataaaagatacctggttgtctgtgctgaggaatgtagcattctccatgattttcagacacttcagaagcaacattaaactctgtttatgcagattatctttcttttcctggacggaaagtgcgtcgtattccacccaacgctgcatatagaatttgtattagattctctcaatgaatataacataatgcaattgcaaaccgcccgcaattaagacaattgatgcacaaaggagagtgtacatggggcagttgaagattctggaaataacctatatggttgatnnnnnnnnnnnnnnnnnnnnnnnnnntttgtgtgcaaaggagctatattatactgtatagctgagccttacaccactgtaaagaaagtcaacaagtaatctctctttcaatatacaaagaaagcaccttcacttaacccacgtttcagtaaattggattgcaaaaagaatagaccctgacaatacctaaacaatcacaaaagtagcaatctaagatgctttatacgagttatcaacctcctaggcaatcatagactacctttctatattacgaaagatatcagtgcagatgaaaaaaaaacatacagcttcacacctccataacagcgtgacaatccataacaacctcaaggactgcatcaagtcctcctagttctcgcagtttctccttgaaattccctccagtcttctttacagaaccagaagtatctggatgggggtaaacaaaagatcataatattatcaccttaattctatgctaaaataaacctagagaagcaaaataaatactggagagaacaggaacttttcatcatctataacctaatctaactgattctaagatgatctccgaaatagttagctagtcattacttccgggagaaaaggcaaaaagttctaataccatcaaaagaaattttggatacgcatgctctctccatggccaacaaagctacccattttgtacttagctcaggcctcgttgtttcagttatatagctatcattcagtctcattcctttgcaattaacaagaagttcctgaactcttgagaggatatcactggagctcggatcatccattttcactggatcccgtgctgcatcaacatccttaagtaatgataagagcttaaatcctatattgcgtggcttcccttcggagctggtgacaatgacaggtgacaacaactttatcagaaacttgatgcacttgggtgactccataaagtgctcgtcttgaccctggagtcatgaaaatgaattggtaaagttatatacggaaaatgtgaaatggtgaataagaaaccaaaaaaacgtcaatgaatcaaagattaaacatcaaaaacatacataacagcatctgcaaatcacttacatcagcagttagcgcaaagaaaagggtggctgcggcaagattgcttggtatatcatcaaggctaagaaccaaaatcgcatcaattatggattgggaaatcctgaaacaataagctcccacaaaattaggtaacttttcctgagatttcatgatacttacgactcagcatccatctaggacttcttatcgactcaaccaacgaatcaattaatgggacaaacacaaaatctccagtccttgggagagaatcagacatagtcctaaaaccttacctcgcatgcatcatgatacaaaccctattcagtaatacaccattccaatccactacaaaccagattctctaaactgtcatgccctaatcctcttcagaagtccaaatccatcacaaatctgatttacaagaaccaaaaatacagagaagagaaaacgaaaccatagagtttgttggccctaatcgtgccctaatctagaagaccggaaaacaatgaaaacccacatgccaatttggaaaatttctcatgaattgaacaaaatcaaaccccaaagagaagggggaaatcgaaaaatctaagaaaaaagagtaaagcttcttacccttgagccctcaaggagcgacgctggtgttgagatgcacaaatcgacaatagagaggacaagctagctcttctgatcctgagctggtgtcctttcctcaacccatcaagcgcaaagttaacctcatcctcatgctccatcagctcaccaaactcctgagcctcaagcaaagtggaagtaaaagcagcagcctcagcaccgttcctgactcttttcgccctccgtacaacacctccgttctgtggataatcctctctgaaatttgacctggaagaagaatgccagagagaggaagactcttgactggagaaaggaaggagagagtaatcaatgggctcgatgtccggcgacgaagaggaagagagatactcagtctgagaaacagagtcgtttagagagtccgatagggtcctcggaatccccggcttacggcggccgtaggttcgttccatcatcgccgagacgagtcgttgaatttgcaaatttttggggaagagttttaggtgagaaaatcgaaacaagggtatttcgggaagaaagacaaatatataaaagtgctcgtaagatctgcgtagctgaagaagagagcagcaaatgcgattggccg

SEQ ID NO: 27629 - DNA, 1027 bp, Arabidopsis thaliana landsberg
catctccccctttcagccgagaaacatcgatagtgggtacgattccggaatttgagtcacatggtttgctagaaggcgggacgacgtaacagtcaggtacaaacggtaaactcctctcttgtgcagaattccccattttgaatgtgcttgaatcctcacctttctccattattggtatttgaatttgagtgttgagaaatcggttaatattgtgaagggataactaaaatgaaagtgtgagtggctcctctatatataaggtttgtaggcttgtagtcgtttattgatatttcggagttatatattaaaatatgacggtcgaatactaaattattattcttcctttttggaatatctagagcatgtgtaactgtcaattgtttatcgtgtaccaataagaaactaaactttattatcaaaatgataatataatgaacatccatatgttgtacgaaatgtataagaatgtccaaattcatatatgacgagggatattaataagatgttgggatatagtaggaagtaggaacactaacatggatttaattgttaaatggagacttcgatctcattcatagtcccaactactaaaaaacaaaaagaagctttccgcaaaaaagcatcctcttgtccggatttcaagccttcataaatatgttggacacatatgtgaatgcatgtacagataaattcgatatatatgtcgtttgagttgtaacaattctgtaaaaataataatgaaattgttatatacggtcatgcgtaaggtctaggtaaaatgtattgcgccgggttccttcatgcaatgggcatttatcttcctttgggaaagacaaaaaaatgtctgatgtcacattgtcactgacattaaaatgagaattttcaatcataatttaacacaactagcaattaagaaataatattacatcgatttttcatcgaaatacaactacctagcttctagtgatatacagtattagtactatttttcgttgggtatattagttaatttataaatacgtaatac

SEQ ID NO: 27630 - DNA, 1222 bp, Arabidopsis thaliana landsberg
  unsure (1)..(1222): unsure at all n locations
cggaacaattaaaagcaggggtggcatatcctactaaccgcaatcactgtgcgaaaatactttcaagcaagtctggctggacaaattccacaaacgaactgttttatccattgatgaagagagcaaatgctgaggaaacaaataatagaaagcttgtttactcataaatcttctctaccattcaatttcttccaaatagtaccaaggaaataaagtgactaactaacctgagacttggaccaagcaaggtcaagtacatcatccacatgtccctgaaaggaacaaaagggctttttcgaaagcccgaaaagagaatctggaacaaatatgttctctaaactcaatgactttctacttatagaagttctccctcttctccttggtgacatagtagtcggttctggagacccattagtagccaaaagcaacagttccggtctatcaagtaacaactcacccttcttctcagcctcaacgacttgccagatgtgaatgatgcaatcctcaccagcactagcaagatatttaccatccaaactaaacttaatgctccaaatagaaccattatgcgcttgaatctcctgcgttttgtacaatgccgtgagctctttagatgatttcccatactgtctaaccctaactctttccggcccatgaaaagaagattcctgagaatcatcagtagcagagctcgacctccgaccacctctctctgacgatgtatctctatcatcgctgcttcgtctctctttgctatgaccagtcatgctacttgcaacactcttaatactcttaaaccaacttcctttcttcttagacttggatgcattatccttattactattcccactgtcttcgttttccttagacgtgttcttatcagaatcctcaacgttctgtcttctcataagctcctgaacaatgggagaatgtccaacacacatctcaaactcctccatcgtcatctgtgttccagttcccacttccttcaccttcttccatgtaccatcttcttgaatctcattcaccacaaactctttcccattatcaagattcttaatagtacacacttgcacttnctcattcactacactgtctctcagtacacaatcagaatcttcatctaaccgcaatgaatcagcactaactgatcctacactgcaattcacaaatggcgagctggttctactgatctctgattgtgaagaatgatgaacagaga

SEQ ID NO: 27631 - DNA, 1859 bp, Arabidopsis thaliana landsberg
accagacgtgtctgaaacacatcatactctaaagaaaaagctcctgcaaaggctcagatgcatctctcttgagtgccaccttatttatgaaaatcaaaatatattacgaaaaataaatgtgaaatctatagaccacaaacaaatataacagatgagaagaccagaggagaagtggcatcaaaagcatctctcatcatatttttaagcaaggttgatagtgaaggagacataaggatgtgtctctgagtcaccagctaaaccagccatggctcctgcatcctcctcgcttttccagtataaactgcattgttttcatacaatgagacccaaaacgctcaatttgaaatctcatcgaactacactacatcaatagatgaatctaactaaagcgacttagttctgattaatagatttagcctcaagaacgcattgcatgctaatacaagtttggttttacttggttcctgactttctcctcaaacttctgcaatttctttcgttattaaggtcataactatcagtacatttttcttcgccagatcaatatgaaggttgatgttaaacagcttccatgtatcctacacctagagcgatagataggtagagagttttaacatacctgttggtagaatcacacaagcgttcaagaatggagcgtactttcttttcacttttcacagccggagataagacacatgcctggaaagacaagagaaagtaatttggtaagggagatagtagggtagaggaattctctaaaatagcatagcttggagtcctaatttaccaagaacgccggaggtaaaccgtatctcataatgctctcagcgaatgtacgcacagcacagaaatgcatccaggagctgaaaacctacagatgtagaccgatgatcaaaacagattcaggtattgtattacaagagaatatctattcagagcaatgtgtagatacctacctctccataactggtgtagcaccactgcaaaagagagcttctcaaactttcctgatcctgaaccaactttgctagctcttgtttacgagtctcttgtgcttcaacactttgttcaaaatcacggacctagaagaggatggtgtacaatatatgatgaacaaatctttgaatctaaaccaaatttctgaacttgcaccatgaatacaatcagttcgtaggaaatttcactcctactagcatgtaatcatttttaacttctacgtaaactctagaggtaatatcaggaacttgaacagaatactcacttggaatcctttctcacgagcagcaatcctgaaattatctgcgacacgagtaaagagagtgacggtgtaaagggcatactcattatcctcaaacaatttcttcgaggacctaggaacctgaaacaagttaggataaattgattaaaatcacggtacgtcaaaccagtagtgttaccactggtctattcaataaacctagcaagtcaacaaatttaccacataatcggtcaaagtctcataacatgctagccagtctttttgggaatacttcggaacaactgcaaggagagttacgagatgttcggactcgacaatatcttctggcttaaccaagtttgagaggtcacgaacagctaagctgagacaaaaaggaggacgatcagccacaatgccacaaagatactaaacaaagctgagatatcgataaagaccaacagcaatattctggaaaataactttgtattattctaaaacgttcaagtggtaaatcatgcttcaagcaaaaattagatagatgagaaaacaaacttcaaaatttgttgttgctaaaccacccacagtttctagtgtgctcttatagtatgaatatgagaagaaa

SEQ ID NO: 27632 - DNA, 2075 bp, Arabidopsis thaliana landsberg
taaaagcttgtgtattcgggtattgaaagttggctttggtagttttggtttgttttccagagctacaccatgttctgcaagtgttagctgcttcgagttagttcatgtgtcgaatctattatttgatgttgattactcttatatttgatgttggatgtacaacttgagatacgttgcaggaatactagcattcattttgattagttatgaataatatatataggtgatctaaatgataacatagctcttgccaaagttaacttagatgatccggacattgtgctagagagctgggacactgagcgatcccacgtcaagaactctgtgcaatatctgcagcaaaccaatcacgaaatgacaaattattaaggctgacaatcatgaaataatatggatatttaaggcattttcaaggctgaaggaaagggaagagctttatgctatgctcatacctcaccaaccctagcattgattttcaatggaacaatgtcatcagctcttgtttcgcctatatttacaattgcggtcatagcaccagcctcatgagccgctctgcaaaaggtatatagaaagcttcttagtaagatgcaaactcaaaactggatgattattctcctgcatcacctgcaaaggcgaaaagcagacattgtcattaaggatgaacccaacacgaggaatgcatcgctctgttttgcaacttccattgcttgagtagctctttccttcgggatgttgtctccaaagaaaattaccttcaattcaacgagaacataataagaaacagagctaaactgattcgtctctatctgattaagtcaatcttacatcaggctttaggactcctttgcacttctcacatactggtatatgaaaaccctcttcccaaaacttttcgtcaatctcgatatcaccatcaggcctttgtttcatgccaaagctcttctctgatcctggatctccatgatcaatactttctatagcttcagcccactacagttgaaacaaaaacgttgtaactttgcgagatgatacattaatccagtttattcaggttatggtatacactggccttaggattgattgcttttagctgatcctgaaacaagtctcggggaaaagagaagccgcactctaagcacataacagtatatactgtgccatgtaattcaagtggatcgctcccagcacgatgatgcaacctaacaacttagagcttagagtcaacattcttcacatccaacagagatcctacggaagaggaactgaaggatatacctgtcaacattttgtgtgatcataaaatttattcgtccagctttttctagtgatgctaaagcagtatgagctggtcctggttgtgctgcagtgaacctcctccatccagcgtaactcctcgcccaataccgcctacgagctcggcttgatcgagtaaactcctgtgaaggaggttgtagacaatagattaatacagttatacaatagtaaaatgatccaaggtttgcattaagaactgtaaagatttcatagatcttgccttcagatcacctgatgggtaattggtttgaaaccagaactgtatgctccattgggactgcaccaaatcatcaaatggaaccacatgtaacccatgagaccatcaaaacgagaatgcaaggcatcttcagacaagactaatcgatcaaatgaattaccttctgtaatccggaattccacattctgtgctaaccccagctccagtcaagatggtgagtctcgagctgccaaaagagaagaggaaagccattagatacaacacatgtatgctcactgctggaaaaagatggtgaaggaaatatcaacctttgctcaaaaagtcgatacaacttgtggatatcttccatattggggggatcagcatctggaacaatcttttctatccctcagaaaccttggaggtgcttttgattcattccccaaagaaccaccagggatcgaaacgcgacacgttgttctcacaaaccgtctgcatcctttaaaaaaaaaaccaagtttcccccaggctgcagcggccgggacatactcgcgacggaaacaaa

SEQ ID NO: 27633 - DNA, 3216 bp, Arabidopsis thaliana landsberg
ctcgttaaccacggtgttccagaggctatggtgaaagccgccatggacaaaaccattttccacgatgagacggaggagttcgtgtttaataaagatattaatgctgatgatcacacggcttgttattcagatttgaggtaaggcagcaaaatttactatatatagtaattgattaggaatatatattgtttaaaataaagtagtaagtaatgatttgaagatgcagggagttgatgggtgaggcagagaggatagggaaggcggtgagagaaaagctaggagcaggaggaagaagccaaaaggaaggggtaggggtttgctacgtgaagaggcataatattaaaaacgaatcaaaggaagaagcaataaggatgctgctaagaggctatgacgaaagacattctctatgtctcaacttctgccatgcagagttccacgtctactccaaaagaggttgggtctccttctccccacgtcccgatgcggtggtcgtcacaatcggagatcaaggctggagcggaagattcaagggcgttgtggggaggccccttctttacaaatcagatcttcatcacaatctcatttccatatcctttctctacactagtactaccactctccacaacacaagcagaaaaattaccaaaaggacgaagaagaagaccatttccctcttccaacagctcctctttgctctctttctcacactcctcttccctttttaacttccttgatcattacatacttgttgccttgttgctccttttttcctttttttctttggaaactaaaatacaagtgggtaatgtgtatctcaatcttgtttaattttagcctttttcccaagcaatgcatggcccaatcattcagtttaaaatcccgctatatccaaataacgatatttgacccctcacccattcggttatcaatctcatgcccaatccacttgacactgcgcaagaatcacatagatatatactctgaactctgaagtaattcttacataacccgagattaattaggtggtgcaagagcacatatccaccttcgagtatttcactgcaagaaacgtaacgtgtatatatatgcacagatttgatgtatagtaatgctatgcatcgttttcacactaagtatgtaatgtaagtgtaactataatgcaatgtagacaacaagatatatagagttatgttgaatcagctacatataatagacaagaaatgtatgcatgcacgtgagcgtcctcccactttccaagttatcgcaaaagtgagtttaaaacaaccaatatatattttttcttcttcttctttttgttgggattgataatatttacaagattcaatttttaacttcattacgagtggtcttcctcgagtccatgttgttcctctcttatatgtgtggttagacaaaactcccacacacgtgacctatatatcgttgtctctgcgatccatatagttccttttacttacctccacacaattctttagcgctcttgcttttgttacttaattgtttgtatcttcacttttagctcgaatagcacatttttgtatatttgcacacttgcttatctgacttccttctataattcagatttcatgctacaaaatgtatctaattttttgcaatctctaaggaaactacattaatgagaacgcaatgacacaccaagtttacagttcattaaaaaaatgacaaaagtttagttgagatcgattagacggcagacaaaaaataaataatgtttttgtttgtatatatccccccatatatgcatgaactcaatacagagagatatataccaatttagaagagttgtattaaaggctaggatccagttgcaatgtagcacgtgaattagtggcttcattaattagtattgttgtgaaaagtaaaacaaagagtaagtaaagagctaggtcgctatagcgtgagcaagtacgtgagatggccaatgctgaaccacccaaaacaccatgaatatgtcaacataggcagcaccgcttataaataccaaagcttagcgcagacgctctaggcgtgaaaaaaagaagattggatatggcatcaaacgggagaaggaagagcgtgagcggaagcttggtgaagccgcccccgccaaaggtagggaaaaagtcactgcataggtccctgtcagacatatcgctggattatcacagagaagaagagaaaggactggggacgatagtggaggtagagaaggcaaagtgcgagtgctgcgggatgagggaggagtgcacgatggagtacatagagagggtgagggagaagttctttgggaagtggatatgcggactgtgctcagaggcggtgaaggaggagagggataagagggaagaggaagggctagaaggggccttgaaggagcacatgagcgcctgcctcaggttcaacaagctcgggagggagtatccggctctcttccaagctgatgccatgagagatatgctccggagaagcacgaggggtcagtctattatccctaagcccgccatttcccgtacttcaagctgtattcctgccatcaccagggaccttaattaatttgtctcttctaatatcttaacgtttaatttagtccctagctagctatagctactagtactctaaacactcatatatatatatactacagtactaattaataaaactgatccagatatcctggtcaagcgtaatataagttgtatttaattcctatgtattttcgtttctttcaatccaaaggaaccagatacttttttctatagaaatgaagggatcatgaactgtctatatagatttgttttttcgctataaattttcaattcagaggaatagaatggatgtgggatgggatgatcaatgatgggtccattcttgcaaatctcttattcaggtgaactcatcatatataaccgctagtttaccacccggccgagtggacgacctattcgtatatctgttatgacgacacgtgtcaacttttctttggctgtatcccctttcctttaaattctgtctccgttgaattccggatatatagatttaagttttaagtttgtgactcctcaaatttctcttctctcagttgttgtagtattagttataacactatcacatctcaaaattctaattaacctatcgtccacgtacatacaaatattaattgatgttataaggaggagactgtgaaacatatgagaa

SEQ ID NO: 27634 - DNA, 1343 bp, Arabidopsis thaliana landsberg
gcatcaaaccaccaacttcatatgctttgtcttgtgatcaagttatttcgtttgttacaatggcttctttcttttgtgtttttggcttcatcaatcaggtgaaaacaacatctccaaagaagtattttgtaagacctaacactggtgtcattcagccatgggactcttgcatcattagaggtatagtaattcctcatactctaacttctttcattagcagtttaaaacttgaacatggagatgattaagatcttcttaattatagttactctacaagcgcaacgagagtatcctccagatatgcagtgcaaagacaaatttctcctgcaaagtaccattgtacctccacacactgatgtggatgaacttcctcaagacactgtaagaaatccaagtttaaaactttttttattcagattcttcttgtttctgcagtttttggaaaacaaattgacattatatatgcaatacttgtgtgtctagttcaccaaggatagtggaaagacattaacagaatgtaagctcaaagtctcttatattaccccgtctacaacccaaagatcctctgaatccggagcaacaaatggtgatgcacaaccctcggaaaccatctctgtgagtaaaaacctaaattatttaatctgcatgtggtaatgatttacttagtatgttgacgtaccatggacttcttgcatagacagacaccttatgaatagtcccttttttgtgatacctgtctgcaagaattattattcaaagtttcaatcaaattttagactttctagtattcgcacttttggttttcaagctatagatactgtaatgacagactgagttgattggttgggacagtgagacatacgctggttttcaaagctttaattttttgtttgggttattattatacctttcttcataaggtgaacaaatgtatctcacagaacctcacaagtggccacattcatatcataatttaagaaagattaattcgtgtcttgttttaatcctctttctggacgtttataccatcaatatgtatgaacagactatacagcggctgaaggaagagcgagatgcagccgttaagcaaacacaacagctgcaacatgaattggtacgcttccatgaaccttttccttgatagtttagcattggttaatgcttgcaatcatattaccattcagacaaaatcatgtgaacataacagtgcttaataacaaaggatactgcctaaaatgtttttgaacgacattgcaggaaacggtaaggaggcggagaaaccagaggaacagcggaaatgggctatccttgaagttggcagctatggttggactcatcggagt

SEQ ID NO: 27635 - DNA, 1645 bp, Arabidopsis thaliana landsberg
gcaccattttgattctgtgtaatcatcggtgaatataattagagcttttctcgacccctctatcctcttcgatagtatttctcccgatgggcatacggatgcgtccgtgtcgatgaagactttaattccattacttagcaaggccttgacgagaggaatgacgaaaccctcgcgtaaatccgtcccacgaaaactgatgaaaacttgatgttgcggtggcagttcttctactgaggaagaggaagagaaagcggccatggcgagaagccagataacactggttctcgggtctagttgggttgtttggagacgattgcaaattgaattttctattaagccaagattgttttttttttttttttttctttggactatgttggaatatttcggcgattgagaatttctcagaagtagatcatattggaaatgaggcctctccgtcgcagattggtgactatcaatatcaacattgtttctttggattattctgatgcaacttgagtacttacggatgtattatatttgttgacttgtccgtgattggttacacgtttttatggaagttacggactttcctcgctaaattacccccaatcaagagttataataaagcgctgaattacccccaatcaagagttataacttataataaagcaacttaaatctcaaagagtcttttcccatagcatataagccagatgcagtctttgatccagtcttgctatggaactacgatcatatatgtttataatgatgatcttgtagttaaccctgaagcggttgattttctgatgtgacataaaccatataggcactaatgcatggtgattattattttttaataccaatgcatggtggttttcaaatatgaatcacaggaagagattgtcaattgacctatgtattgctagaaaatgttttatctctgcttagacaaggcattagaggaagatagtattgttggttttgatttggattggcaacttttgttcatttttttgctcttttttgtttctatataacagaagctcttgctactgcagaagaggtaaacattaagagctaatgctcgctccgatcacatagcaaataatggaatttaggcatctgtcaattagatgtaatccctcaaattttgtttaacatatataaccatcttgcttgtataatgaagatgagtgaataaaatattttgagctatattattcactgtggcaactatttgcttcgtactcaagtttccatccttctgatgtagtggatttacatttttgcaattatacatggtaaaacaatctcggtctcctaattaagcgacccaaaattttacttatactaccttgtttgacttccgctcccataggatttgcgacattgtttgcacccgaagaaccattatcagatatattaaccactagacttgtatcatcatttgcatccccaatactatcaccatttgcatcatcatttgcatccccaataccatcaccatttgcataccaacagccattgttcgattcacaaaccaaactaaaaccgcactttaatacctcacaatttgcagcctgacaagtaccatctgtgacttcaaattcaatggaagccattgtaggaatacatccattctcaaggccaagttgacatt

SEQ ID NO: 27636 - DNA, 1542 bp, Arabidopsis thaliana landsberg
agagcgagaagccataattgcatagacacatgattttgtgcatgtatcaactacgacttatacttttaagtgctttattcataagggatccggaaattaattgttacataatctttcgaaaacttccataacttttttagaacattttttttatctgtcaaagctagaaacattaatgtgttcaaaccattattcatattcttcattgccaatagccaatttatgtttatatttaaattctaaatcctgaaatgtaagctctaattctaaattccaaataaacactctgacaggccagcaaaattccaaatactttagtaaatatccacctaaaaaataaatttcaaatcggaaacaataactcccacgggccagcataattctcagtacagaatcttgtctgtctcatattgaaactttctcttaagaataagatagactaaaaagcatgactagctctgtaaatgtgattaattaataacctaagattggttgataagataaaacataaagttttaatcaaaaagtctgttagaggcgcgcctatggagcgttcaattttttcttaaaaaaaaaggttaagccggcaagaggacaaataagaataataatgtttttgaaatacgacgaaagccacatgccttgaaccaaagttaccgttgtctgaatatgaaccaaacttagaagtaaatcgttccctcatgatccaacggttatattctaaattctaatcctagccgttccttttttaaaattaaaaactcaacacttttttttattttgtttgtatcttcctcttttgcttatttcatccccttcttcagattctcttcgtttaatgctcttcttcttctactctctttgtgggtttctcttgtaataatcacaaaccaaaaaaaaaaatggttaactcatgcgagaacaaaatcttcgttaaacccacttcaacgacgattcttcaaggtagtagatgaatttgtcgagtaatatacgagaatttcgaggtgttttacagtttgcgtaggagaattctgacagaatgtgttgtgttcttttctggttttgtttagatgaaacacgaagtagaaaattcggacaagagatgaagagggagaagagaagagtgttgcgtgtgattaaccagaatctcgctggtgcaagagtttatccttgtgttgtcaacaagagaggaagcttattgtctaagtaaatttaacaaaatctctaatctctcacaagttagtgttttttttcaatctgattgtgcttatgggttttgattgatttgaatcagtaagcaagaagaagaagaaggatgtcaaaagaagaagtttgattctttgcgtccttcagttacaaggtacataaagcttgaatctttcatttcgttttttgactttaaagaaagaaagatctgagtttgtttttgaatctgcagatctggagttgaggaagagactaacaagaagctgaagccctcagttccaagtgctaacgacttcggtgattgtatatttattgatgaggaggaagctacattgg

SEQ ID NO: 27637 - DNA, 1726 bp, Arabidopsis thaliana landsberg
tgtacttacagaaacaaatcagttactcaagtgatttgcctagtaacaactaatcaaaccaggttttgtcaagcaggtgcttcctcctctttgtgctgaacttaggaatttggttatgcaaccagtgattcttcccatggttctaactatagcagagtctcaggtgctttttctaatcttaagtacttacattttgtcaatcagatcgtattctattggaggtttacagataccagtgattctatataaaatttgtttttcttattacttgtgttatatgacctatcacatgcacatatacttagacctgattatttcagttgtacatatggtgattgcacaaataaataccggcattatcaacctgtcatgtgttacttggaagttgcattgatcttggacaagaatttcttttagatctttagtcatgctttaatgatgcttgagaccttaaataacgatttgcaggataaaaatgactttgagttgacaacgctcccagcccttgttcctgtcttaagtactgctacgggtgatacattactgttgcttataaagcgtgcagagctaattattaacaaggtaaatctctaaccaatatgtatgcataactaaaagtctaaaactctgtgatgtatgcataactggaactatgtttttgaaccctgcgtatttagtgtctgctaaattctaccgatttgacacaatgggatagggtaaatgaataaaagtgcaaagtatagttacttatctatgacttatctggtgccattacttataattttaaataattggtagtcccacacatgaatccttatgctttcttacaccaataaccttcattttcttaaagctgacacatatttctctcttgacttctattgctaactgctaattgcttctttgctacaattctaaatatgcttaaaatggtatcacttttctcttattcatttattatcttactccctcggccctcatatctttactattgtgtttttgtataaatttgtagactaatgcagagcatcttgtatcacatgtcctccctttgcttctccgagcctacaatgataatgatgtccggatacaggaggaagttctgaaaagatctacatctgttgctaaacaactcgatggtcaggtaatgcttgatactttattttatattttttttggatgatttttatctgaattgatgatataagcttcaggattgatgtgtgccttacacaagcttactgtcacatgctttttaattttggctctgcaaagttattccatttgcgtatgggtgagtcagttcagttcttatttattttaacttgccattgcaggttgtaaggcaagcaattttgcctcgtgttcatggcttggctctcaaaaccacagttgctgccgtatgttagccttgatttgttcaatttttatgtcttttgagaaatacattgataaaatgaagagctcctctaaataaagttttgagtagaacgtcttgtggtgcaggtcagagtaaatgctttgctttgcttagcagagctggttcaaacacttgataaactcgctgttactgaaattctgcaaacaattcaacgctgtactgccgttgatcgttctgcaccgacccttatgtgtactcttgcaatcgcaaacgcaattctcaagcaggtaggtaaaagtagtttactttctcagtaatattagatgtttgaaaatcttaattttc

SEQ ID NO: 27638 - DNA, 954 bp, Arabidopsis thaliana landsberg
ccttattttgtagcaaaaacgttgattattcaatataagaggaaaatgttatgaaccgactctctctaatgtttgattagtgataatctgatttcattaaggatgggtcctacgttattccacgaaaatcagagccgtacgtgaaagaaaactaaaacaaaagtctaaaccgatcagaaaggtatctgatgctgattaaatgtaacaaaacaaaattaaagaatctcaaatgaagaagaaaaaatatagtaaacactttaatcatcaaattagtctagtcgatgaagtcactacagattctcaccaccaccatttcaatatctcacaaaataaaaacccataaaaaccaaataaaaaaaaagacaaaaagtaggacccaccaataaaacttgctataaataaaacaaagctccatattttcatcaaacaaagcttctctctctctctcgcctatcatctttttccagttcgctatcagacatatttgaaaccccataactcataaagcttcactcttttccacaatctcttactccaaagttttcttctttccccccaaaaaattataatggtcgacgttgatcggagaatgaccggtctcagaccagctcacgccgctggtctccgtcgtctctctgctcgcgccgccgcaccaacaacaccaacggttagaaacagtctcgtctctttctcttctctcgccgatcaagtaatctcacacttacacacttcaaggatccaagtccaaccgggtctaaccgactccgaattcgctagagcagaagcagagtttgcattcgctttcccaccggacctccgtgctgttctcaccgccggtttaccagtcggcgccggatttccagactggcgttctcccggagctcgtcttcatctcagagctatgatcgatcttcctatcgccgccgtgtcgtttcagatcgcgagaaacactct

SEQ ID NO: 27639 - DNA, 1037 bp, Arabidopsis thaliana landsberg
gtccaaatgttgaacagtcgctatttatacataaagaaagtaaaactctctatagaatcagaatatattaacctttttatagtttgtatgaaatgtgtcctcatcccgagcactagagcacactataacactggaggcatacatcattacactggttggtgacaattagatcgtaggagccaacagagagagactgggaatatcatgagatcatggatgaatgttcaggaatactccgggtttgccaattttaccgagtaagatagtatatgactagaaataaaccaacaaacgatgccacgagcgtcagcattcttcggcttgactttgtctcaaacacctgcaaggattcgattcaacatatcaaagacacagacacagacacaccaaaaaaacaaacatgtcaaagacactttgcaacacataatgaagctaggcttagggttctgagagagtatttctagtcagatataccgttttaaagcggtccatggttcctgagagaaatccccttgatgaatccatatcattgccctacatagaaaccttgcaaaatgttcagtaacaatagcgtctgtgagcaaatgataaaatataagtatcacaaatattctggtaaataccattctgtcaagcatgcggttatgagtatcgacctcttcatttatatcgccagatagctgtttcatgaaaaaagaaacaaataagaatctggttcaaacctagttgtgcatatagagtccaactacaacaacaatgttgaaccaataaaactatgttacggtttccatactaatcctatgggcagtaagtagtagatacagaaactcattagtgtacaaaatgaattgcaagtgtatgttcctattacgtttagggcttacttcatattcctaatcctactgaaaagtgctgaacacaagtttgaacatgacagaggaaccagaggcaggcttactcgttttaagagaatgactctatcttgcaatccctccaaggcacgctcattctcatgttcattgatctcatgagagtaa

SEQ ID NO: 27640 - DNA, 2066 bp, Arabidopsis thaliana landsberg
  unsure (1)..(2066): unsure at all n locations
ctcgagagatatcaaacaggggaagagattagctttgcttactttgatgtgctttctccattggaaaaacggaaagagatggctgagtcatgggggttttgttgcggatgcagtatatgcaagtttgagagtgtcttgtatgctaccaaccaggaggttagagagtttgaaatgggtttagagagaggcgtagatgcagggaacgcggtttatatggtggaggaagggatgaagagatggaaggtaaaagggaaagataaagggttgctgagagcatcttattggggagtttatgatgagatttataactcagagagacttatgaaaaggtggggaaggaagataccaacaatggaagttgtggtggatagtgtctctgatgttgttggaagtgatgagagattgatgaagatggctgtggaagggatgatgaagaagcatggaggtttcagtaacattgtggagatggagaaaatcatgaagctagggaagggggtttatggcaaagtggtatcgaaaaagaaggcaatgaagactcttcttggcatagagtaacaagttacaaatgttgaaactaattgcttgtaggatcaatagagagagtaaccattttggttttctgtaattccttgcctcatggaaggaaacatccaatgatattattacaaagacattcaaatggaaataacacttgttttgttgcaaaacatttgtagtcaaagaatgtcatatatgaaaaaagccagttctacaaaaaaattggatgagtagtgtgcataaaaagaaaacgatgattttgagtaatttattcgtcgatccaattatcctgattagcacttcctccggttctgtcttgcagcaacacatctttctcatttttcaactggttaactagcctgcggacgctaggagtctggaagcgatccttagcggatgtcttccattgagttattaaccctttcttggcactaggatacggtttaggaggtggatccttatcttgcattaccgcaagctcctttaagcgtttgtatgctttcttcatttcctttctctctgaaagatattccatctgaaaaatcatcaaaacacatactcagcaagttcgaagaataacatctcccatgttcaaagaaacggcatcaacagcagcggtactacgattcatatctattcaagtatcgtagctaatcatagactgtgaaaagaaaatacgtacattagctacagacatggcgtcaccctcactgatgccatgctccttcaattcaagtacccggcaaccatacacacgtgcttgatctggaataaatgctgatattttaggtatttgaagatgatgcaatgagagggagatagattcagaatgaaaaatggtgaaactctcccattgaatcagaatttaagagtgacacgtgcttatagtaattggttcaagacaaaattgtttgaaattaaacttctttctatagtgatgcatatcagaataagctttatgaagaactaactcataacataatcatcaaactatctttgatacaaatgcagagatataaaaagttgagaattttacttggcagggtcatcaattttggttccaggatgcttattagcgaatttacgaacgtaaggatcctcagggagaacaatcttctggatttttccattggagcgaggaaacacaggaggtggtgatctgccattaaaaccaaatcacagaacactcatttcaacaaaaccctcaaaatcctaattcacagatgccaaaatctcaactttttgtgcgattagaattcaattgcatccgaattagaaacccattaacggatgattcaataaggaagtatcaaattgatcaatcgagccaaatcatttggagaaatagaaatgggagaagagagggttacgcttccatggctttaagccaaacaggctctcgtgtagctaagccaccaacaagcctnctggttttggaaagtaaatcacctttcatccacgacattgttgctgagcttcttcacttttcttcttcgcttgatctggtattggtttaccagagacgacga

SEQ ID NO: 27641 - DNA, 2022 bp, Arabidopsis thaliana landsberg
attgaacttttctaacttccaaatttttatattttatataataatcatcagcgctatatatctagaaagtaaaaccagtaaaatctaacgtacgaaattagatggagttgttaggcacatttcatatattaaaattttaatgattttcttttaaactttatgatatttaaagcatgcacatattcttttttggttataatatatgtaaaaatttggtatgctttgtctatagttgtaaccaaattgatgcatagtttatgatatttaatagtttcgaatatattcagtaggtagaaattggggaatttttaaaaagttgacaagactgccccaaaatcgcaatgatgcatttaaaatattctgcaattttttcatataaatatagacacgtatagataagagtgcacacaaaaccacagacgacatacgcgagaaagaaaaaaaaacaaaatgaaaacttttgccggctttgcaattctgtttttattacaaagcttattgtttcctctttacagttcatgccttcatcaaacttcagatgattcatatccatttccttcttatttcctctttggctcagcttcttctgcttgccaggttccttgattttccttctttttatatccctgcaatcagtttttggagtcaatttataattttagtttttatttgatgtatttagtatgaaggtgccttcttaaccgatggaaaaggtctgaacaattgggatgtctttgcccatgaaaaccctggtatgtgtttattttggattctgtctatggttagcttggtttggaatgagtcttgaagaatgtggaaattgaactaacttggactttaagttgaatattttttttcccatccaattatgttttggcttagataagctaacaatatgatttttatgttttgaatgaatcttgtggtttagttctgggttcaattaagtttgtgtttatttgtagttatttatatatccatgcatatcatatttaaaataaattacagtttagctttctttgattggttctcgacaaagtttttttatcttataaatgccatgttgattccattgacaatattatattaaaaaaatgcagggaaaatagttgatggaagcaatggagacatagctacggaccaatatcatcgatatatggtaaaataaacaaattattataatattttgttccttttacctgaataaactatttgctttatatgtttttaattctttatcttattgacatctatctactatatatgattacaggaagatatccaatcaatgaattttcttggagtcaatagttacagattatctatttcctggtctagagtcttacctagtaagtctttatcttcttaatcatgactgtaataattaaatttggtttgaaattaaacttctaccatcaattgattggttcagatatctaaaccggaaacaatatgttaaaagtgtgtagctttcctttgatatatagataaaaataaaacaaactgttaacttatgtaataaaaatacagatggaagatttggagttattaattataagggaataaagtattacaacaatttgatcgacgctcttattaaaaaaggtaatatttactctccctacttcttaatttttaagttagtatctattgaagcattacatacagaaattttaacttcaaaagattgctatttttcatgtaaatgtttacagggattacaccatttgtgacgttgaaccatttcgactatcctcaagaactagagaaccggttcaagagttggttaagctccgagatgcagtgagttgataaattaagtctttagctattttaccataactaaaactgattcattcactgtttataaatcaggaaagatttcgggtacttagctgatatatgtttcaaacattttggagaccgagttaaacactggatcacgattaacgaaccaaaccaacatataagcttagcatatcgaagtggtttgtttccaccagcgcggtgctccatgccata

SEQ ID NO: 27642 - DNA, 3504 bp, Arabidopsis thaliana landsberg
  unsure (1)..(3504): unsure at all n locations
gaccaagagggctcaaccgttttcaagaaaccaatccaatgctcaggatcacataatagccgaaagaaaacgtagagagaagcttactcaaagattcgtagctctttccgctctagttcctggccttaaaaaggtatacataccatcagatcttccttcttgattacctttttcaaaaaaatacatgtttttgaatctataggtgtaatttttttctaattgcgtgcatagatggacaaggcttctgtgttgggagatgcattaaagcatataaagtatctccaagaaagagtgggagagttggaggaacagaagaaagaaagaagattggaatcaatggttcttgtgaagaagtctaagctgatcttggacgataataatcaatcattctcttcttcttgtgaagatggcttctcggacttggatcttcccgagatcgaggtaagattctcggatgaagatgttctaatcaagatcctttgcgagaagcaaaagggtcatcttgccaagattatggccgagattgagaaacttcatatcttgataactaattcaagtgtattgaattttggaccaactcttgatatcaccattatagctaaggtatgcaaatgtatattcaggcatacacttatacatataaatgaagaacttgttcttaattttagagtaacatcgcttgatgtttatttttcagaaggagagtgatttcgacatgacactcatggatgttgtaaagagcttaaggtctgctttgtcgaatttcatatgattgtattaactttcatgcttctcgtcaatttctactgtgggagatcttgttgaacacatggacgaaacataagtggtttgccatgaaaatgttttttttttttataagtttgattggaggttttcttatctgttaattatctataattctatatataaataagattaaattagttgaaaattcacttctctttttttctctatttggttctttccccctttatgtattatattgctgtttccaaagatgtaaagcacttccgtttatgtatttgtattatatggtttatattttgtaagtctgttcaatcttataccaaatcactaaagtttgtagtaataattttttgggaggagttagagcaagttattggtgcacaaaaatttagagcaatttatattgaatttgattgattactgtcattatgagtaagagtaatttgaattcaaagtaacatatggtaaattagcactgtcaaatacaacaaagtacccagtccaagacattctagattcagaaaatcataataaaaaaaaaaattatcacttggataatcaaggcaaggaatgcggcatgacgaccaagtctttccttccgtgttagagaacaacaaggataatcataggatactaacaaagttggacaaatcgtggattcggaaagtggataactatccttctctttctttcagctataataaaaatattatatccgcaatgcgaaaaatgaacaattatggtttcacatttcacaaaacaatagataatatgtgtacatatgcatatatacaaacactatatccaggtgcaaaacgtgttattactggatgtttaattaaatggtgccatatctgggatttggaatcctgagatacttggtggtggagccgtggaggcttcgaggcgagtggatcatttcattttttaatgtaactacaatgacaatactaaagcactctaatgaagaatttgaaatatttttaatgtgtgaaaataaatgatagtccttattgatttaaataaattgaggaaaagttatctacaatatcataagataataatttcttatgcttttttattagtgttttatattaatggcgagctgttttaatggttaactctctcgattactgaaaatataagaattttgataattactaaaaatgtaaggttttttaaagttgagaatgaaaggacatataccctcctaatcatcaaaaaatatactattgaaaagtgtacttaaaaataataatcaatcgcaaaactaccttgaaattgaggcagataatatgtgaacatttatagcaaatatagtttctagctcaaatgagctttatttagaagggaaaaaaaagaagaaaaaatggaattatttataagaaccaaaaacaattgtggagaaatagagattgccgaaaggcaaccttcaagttatatttcattgatttttcataagacatgtgattagccttgcaagaaaacctagttacatgtatgatgggatatagatggctttgtagccatgtggtgtatggatttatatatagctagggtgctctaatggagtaaatggattcttaagttctttttggaatatgaatatagtgtcataaaataaattgttcatttttctaattgactaatttgaattttgaccatgcttgttaatatgtagctttatattattatttgtctaactgtttaagattgatagagtaaagtgacccggtttcacacaatgatactgagtccactgaatttagaaattnnnnnnnnnnnnnnnnnnnnnnnnnnnnnnnnaaatagcatttccccatttttcagcatattacgtagttttgttattattcaactatatatataacggaaaaagattggttagagtaagtgatgcattatagagcgagtcgtcatgtcatatatgtcgtgtggatgtcgacctttagattatatatatataggtagatgataatgtaattaacttaactaattatagtgtttttggattggtattggatcctgaataaagtatgctatgcatttgaaagcaacatcagtcacatgcagcatgtgattgttcgtacagcgtaacatcgcaattgcgagtgttggagtcaacacaagttctgacgagaaggagagaagaataggcgttgagatacaagtaaatagatcaaccaatcgaactctaattttttatttcgtaaccaatcaaactctaattttaagttcatatatgtatagaaaaaaatattctttattaatgcaaccaataaataccattactaggtaaataactaactcctaacaacatggatgtgacgaagtttctttatggttacggtttggtattgccgtccaaaacagccatatgacaatatgactgcgtcatacaaatgttcttgtgtaattaggttgtcatcttatagccataaaagtatattgcattgaaccactctcttcaattatctttctgggttatatagtagattatataattttggttactttcaaattattgatttggattatttctaaaattataatactagctatcgtttgattatttggacctaacaaagacaaatccggctgagattataattggacacattattttaacctaattgatactgacatacacgtaccgtattctagatattaaactaaaataacgacactgcacgtcttttatttgattataataacactctatatgtcttacgtaac

SEQ ID NO: 27643 - DNA, 1331 bp, Arabidopsis thaliana landsberg
  unsure (1)..(1331): unsure at all n locations
cggagcaaatacaagatttgattatgtaatttatcataatcaagagcttgtttgttaacacttgaaaaagtaaaggaaagaagaagagctctctctgcctgaggagttgtaatttttggcagaagctggtgtcgttttaaagagaaattagaagtgaatctatgtagttgtgttggttggtaagatcgatttagttacattaaataaaaaatattcctttgagcaaaaacaattaaaaaagataggtttcgtcacaaggtggaccatttcgaagaagaattaagagacgagcccacttgaaagagacatagcgaggggaccccatgtgaatctgcaagcagagacagaggctttgaccgttctcattcatcaaccatcctccattattagccagagtcataaaccatgtgattcatcatcacaaggcttcattggactctctcatgcatattcacaatctccacttccatcttatacaattccagttcctacccgcaacaaatccaacacctgagatgatactgatgcttttgaaagtataactaggaatgagagaagtactaggatgagccatctttccagatattcatttattcactcacacagcaagagagtagttcagtgtatcatgcaacttaaaagcatacaaaatatcacgaatagagaaatattgataaaccaaatgttattgaggtctgatttctgaaagctttaatatgtccaaggaaaatcaaatgggaatgaaagtactagatcccccagcttcttcttcttctggaatgcactttatttgtcaccacaagtggtcaccttaagcccctacatcacatcaccatattactctcagagttaacatcgcaagccagaggagaagaaaagaaagtagtgagaggatttcgcatgcagagaagaaagaacatcactgtcctagagcttcacattacaaaaaataaaaacagctccaaaagattatcaataaaccaaccataaccaggacctcaatcattcctagacagggcaaaaacaaataaaacaaaccaccatccagaagcttccagtggtaaaacaaaaactaagcagaagtgcctaggataatttatcgagtacccaaaactcaggatatgattcatttctctacacagaatagcaaccaaaccaggaaccctgaagcctcaaactgacagagaagagaactaagtagtaacaaatctgcttgttgcttaagaatacttatacactagctatatccacagggcctctcttataaagctctgaaagcatatccattttcaaatttcaagaaaccannaaaacnnacaaatgaaaatcac

SEQ ID NO: 27644 - DNA, 1505 bp, Arabidopsis thaliana landsberg
  unsure (1)..(1505): unsure at all n locations
ccgacccccattgcagtggactccgagccaattacaaggagaagaagcactcatgttccatagcaaaggacggccacgatctcatatacgaacagcgagtaaagctctccggtcagactctagatctgaagtcaccgcagcgagatagaagacaaagaggaagacaacagagagacttagcttacgcttatacttcatcttcttcttcttcttcaaaaaccgtgtaaattcttcgtctccttggttccaaaaattcaataaatatatcgactttttcggatatgggtttttggaaaatttatttcggctacgcgtaaacgagtgtttgaacaaagagacttttgtgttttttggtttacaagagtttcagctctgtctttcttctctctctagagccggctaagagagagaaaatggtcataattgcagagaaaaaggaaaaaaagaaaagttactaattggaatatttcctttttgacaaaaaagttaaaagagaatcttatgtatttaatttgacagctaatttacagaaagataattaattaattataaggttatgacttatgaatactagttgtaacaattttatcagagtcaactatatttgcgttacataaatgacaataaatcactgcagtaatgttttttgtagacgtttaaacgacctctgtttttcctttcttttgtattagatcaataaattaggtctaattaaaaaattaatggtcgttatcgttttgtttcttttatgttttttttttttgcaggttgagtgtgaccaaagacatgccaggtctgtcaaatgtgtctgagctaccgttgacaaacaaagattagcctctccgacaccgtttttatttttgatataagtttgtaccatagacatttttttttttttttatgtatctgttgtatcaatttgaaaggaaggtaatagaaatggtcaacagagaacttaagaagtggtattcattttgaagatttcaattgttcaatttttaaaaatcttacatcaaattattttaatgaaagtggttggtttctcgtgactattaacaaacattcttcccaacccgaaacctaacctcacctaactttcaagatcaaatacaagtagatgatgactaatacaagctgattttctcccaacaccttctataattcactcttaacctcttcttcatggctatgaccatgttcgtccaaataagaaacggccatagctgcgtgaagagcagccccaacaggaagagcttcttcatcaacaaagaagtaaggcgagtgaagcggcttaccagcgcctagcgtctcattctttatccccagcacgaaaatcgcagccttagtcttttgagtgaagaagctgaaatcctctcctcccattgtcaccgggaaatcatggaagttattctttccaatcatcgcttccgctactttnttaccgtgctcgtataagccctcgtcgttattcattaccgggtgaagcgacggctttttctcttcga

SEQ ID NO: 27645 - DNA, 795 bp, Arabidopsis thaliana landsberg
agacagagaggcagaaaaagaaagcatgctttttttttaaaaatcacacacctcacccaccaatatactaatatttactttcctagctagatctacaacactaataatactactttttctaaatctaaagactaaaaatatttgttatgttttcctagaactgaaatctcacacgtttgattcggatcaatttctatttccttattactattctcgacttgaaacacacctatatatatagagaaacactttataccatttctcattcaaatcctaaatcaaaaaaagaaagaacaatacttgtaacttataacaaatacaatcttttctttctcaaaatgaagaacactcaacgtcagttatcttcatctttcatgaaattcttagaggagaagaacagagacttagaggctgtgtttgcttacatggatgcaaacagagacggtagaatctctgcagaggagcttaagaagagttttaagacgttgggagagcaaatgtctgatgaagaagccgaggctgcggttaaactctctgatatagacggtgatgggatgttggatattaatgagtttgctctgcttatcaaagggaatgatgaattcactgaggaagaaaagaagaggaagataatggaagcttttagaatgtacattgctgatggagaagattgcattactccggggagcttgaagatgatgctaatgaagcttggtgagtctagaaccactgatgattgcaaagttatgattcaagcttttgatctcaatgcttgaggagttctaagctttgatg

SEQ ID NO: 27646 - DNA, 1306 bp, Arabidopsis thaliana landsberg
tttaaacttcaatggcggtctttaatggcgtataaaatcagacacagaaactagacatgaattaattctctcgtccaaatatcttctgggcagaaaccaacatttatccttatccgattcttctagggtttcggaagatctaaccagaaccttcgcaacaaggtaagcattcaagcaatttactgaggatttaagaaaaccctgtttcttctaaatcgtggattgaacgagaaaccttagtttccatcgctggttacattttttgagaaggactcttctgattttgtgttgcttttcagatggataagtatcagagagttgagaagccgaaggcggatacgccgattgctgagaatgagattcgtatcaccagtatgggtagggcacgaaactacatcacctatgcgatggctcttcttcaggtattgtacgacgatgatctggtattcatagctctatgaattggtgcagggaagcgatttgggacagcgtagattatatatgatataattgtaagttcaaaaaatgcggtttcataatccagttgcatttatgttatctggatgcatcttggtgatttagatcaatttcttacgtttcgtgtcggatttagtagaaaacttgtacatgaatttgctttctcaaaagtgcaagttattgattaactgttttctttaattactttctcgctgcttgctattcaaacttttttagtacttagtcatgtgattagttgacttttgacatagaaattttgcttttgcttcttcttgaaacttttgtttttgtaacggaagttgttttgttatcttataggaaaacaaatcgaatgaagttatcttcaaggctatgggaagagctatcaacaaaagtgtgaccatagttgagctgattaaggtattttctggttgtagtctgtttcctgatctcagagttgtagttctcttgtgtatctgaagattatattgttatccttgatgcagagaaggattccgggtcttcatcagatcacatctattggatcaacggacattacagatacctgggaacctacggaggaaggccttcaaacgtatgtggtcactagactttagttcaagtttattgttttaagtgtaccggaacacatgtaaccatgttgtattcttaattttgttactttgacctgctatttattaaacctcatctttttctcctgaagaattgagaccacgaggcatgtgtcgatgatgaccataacactttccaaggagccgttgaacacatcctcagttgggtgagtttctagggcaggttgttgcgttat

SEQ ID NO: 27647 - DNA, 1551 bp, Arabidopsis thaliana landsberg
ataagttctattaaatttaatattattgatagtagttttagaaagtagtatatggattaaatgtgtggcaaaagaatagtaaattaatattaataccaaatagaaaaacttaagaaaattgttggattgactcatcatcataaaaaaaaaactagctcttatttagtaccggttttttttgagggggtagtcttacaaaacaaacaatacgagggcaaaggaagaaagatcaataaataaaagggacttgagtgaaataaaagggacattatcgagttcccgaagttagggctcatcttctgttcatcaagacatcaacgtacgcacaaggcgatgagtgaatttgaaggtaagattcgaaattcgtttccctaaaagttagggtttattatatatactctctcccgatcaattccaatgatatgtctcaggctggattaagtggctcgaaccagggtatttgctgtggaaacctgaggatcctggctacgagagacctgcgtacagggattggaccgaggaggaagatgagcctaagtactcaccggagcaagaacttgctttactcgacaaacaaatccttgccagcgatgtatgacattttttttctccatgatttttatttttggtttaataatggagctctataaataaatttgtggttttgattgttatgtgaaacaacaggggtttgatatcgacttcacacacttccgttgtgtattcaattaccatcttgcttatctcgattcacatgaattcgttgatgagccagaaaccactagagatttactcgagaggctttctaggaaggcccttgatgactacaatcaagaatcagtgagaactaacctttatatgtgccttgtgctttcatcacatttacacccattgattcttttcttctctctttgtaaaaaaagcagagaacacaatttgagtttgtcaaggttgtgaaagcaaactttcacttttgttgtgcgattatgtttctcataacattcgaagttgttgacccttatgataacttgatcaaactcttccaaacaagggttcgccacgctgaagatatcgtgactgagtacgtcttttgcaggccgaaacccaatcaaggaggtatctctaatcttgttttgttttccatctctagttacgttgttgttgttttttatgaattcgttgtggaatatatatttgcctctttcacccaccatggaagatggattaagctttcgtgcttccttctttatatattttcgtgactatttctttagtagatttatagtatttggatttgtttgatagtggaatgcattggtgtgaagaacaatgatgggaaagatgtccaaacaaatgtcaaggaacaagaggtaatcgaaagatttaactgcaagagttttttttttttcctttgatgtcaagattccttgtatgtatggatggtttttaagagtaatcaccatcaccttcactttacagattggagtaggagcttctatatgccacaaggagtgagaaccgggagatgcttttgtgttaatatacattttc

SEQ ID NO: 27648 - DNA, 1527 bp, Arabidopsis thaliana landsberg
tgcgatcacggtttttgtcaagcaaggttttgttagagattagatgcgtatggaaagtgaagcttggctcaaatttggaggtattgattactgaccttgattttgaaagctcttttgaaaccgctagcgaaaaatcctccaaaaggtgctatgattgaagcaaacagaccgaggcataaagcatgccactgaacagggaggattgtcatttccttccaaggaaactgcacaaatgaagtagaaagttgagaaacctcatgcattattctattcaaacagaaagactaaccgcactactatttgttaggtaacaagagctaactgagtaacccccataaaatggctagaatccaaaccaatttcagaaactaataaaacggccaggatccgaaactatctaagaatacactatgaaataagttataatctgagggacttcgcctacattcacttacacattcctagaaatataccaagtacaaacgccaaaatatatagtaccgataagtttcttctacgcgatgcgagatgataccaaagcttacccattctggagtccatgcaggtaaagcaaaaggttcaggtttgaacaatggatcagcgtcacactgtagccagccagtggacaaatcctgcatcatgattcaaagatttactataaactccctaaaagatcgtctgcaagattagtgttattctttgtgctcaatgactaacctgtcgtgggcatgtcaaccaagggaaacgacccaaaatatttgccagctgaaacattacgcatacaaaacatttcagaagcatggtgaagaagaagatgatgaaatgatgtaagcatttcgatgtgccatgtggtggcaaaggtaacatatactcacaacaaatgcagagatgatagttgtcacagaggctccaatgaagccctcccatgttttctttggagacagctttattaaaggcgttcttccaaagaagaaaccgaaaatgtaggcaaagatgtcgttgattataattaaggatgctggaagtagaaacctgcattggaaaccatcaaaagtagacaatttacattacagcgaggaaaaatgatttcttagcaaacttaatatatgtaaagacagaaaagtataaacttcatatggtgacattaaatgtgtccagaagatcccttcaaatatgttggcaacagtgaacgacgattgagtaaacacgactatcaaaatcatgtgggtccatgcatactggccaaactggtacttgtacatcttcttctttaatgtgagaatgaaccacatgaaacctgaaatttgttacatcgaggcatattccataagcattaaacgtaaggtgaatcaactaagccaagcatcaagacctattttcaccgatgctagaaaatcaaattccacaaagaggacagaacggcgaagcaagactgacctataatatacaataagtaacagattgccatatggtaattgattaagccgctgactagccgataaaagaactgatctgcagtcatggtat

SEQ ID NO: 27649 - DNA, 1250 bp, Arabidopsis thaliana landsberg
ttggctgtatatttaatgacaggatctggagaattcaaagtcaacatttgagaagagccgtttcaatttagtatgcacactctactaacataagcctttgctatttactttcaatatacctacttttaagtaaatttttgcattggttgaagagtgcaggtgaattcactgatgactattgaagcgaaaaagaagtatgagtttttagaatctattagcgcaattatggatgcccatctgagatatttcaaacttgtaagggctctaatttcacatttgaagtacttaccatgtaagaccaactaagtttgagatttgtgtcatgttgtgatccttaatttggcctctttatgtttcagggatatgacttgttgaatcaactggaaccatttatccatcaggtacaaacttgtagtcaacttgatgtctcaatattttagatgtgcaaaacaaatatgagcttctatagttcccacagggactttaaacgtgcaaatggggaagtaataattaggttagaaggactgaggtcttgaagagactttttaggcttttggaagcccaaagtcatctaattcatcgatttaagttttaatgtttacatttccttacataaaatttgaaagataactttttgtttaaaatcaaagaagactttcccaatcttttagttccaaaaacttggtttatctggatttaaaaagaacacccataggtaaaagcctctcctgtccaagatttagtttttgctctagtaaaatgtgatgtgaaatagccaaagtttcatgatctctaatgaaatccactgatgctgacttgtgattgttcttcttatagatattaacatatgctcagcaatcaaaagaacagtctaagattgaacaagatcgactagcaagacgcattcaagaattcaggacccagtctgaattagacagccaacagctggtcgctaatgcagagtcgtctggtgctaacgggaaccgtgttggtgggaatatcccttacaaaaataccgaaacaagtttaacagcagacaaggaagtaagcgtttctgatttcattcttgcaagaattgcgagcaattcacgttttaccttttggttccgtagctcttaaatctggcttattactgttttttactacctgcaacacaattattttaagccactcattgttgtacatctgttgatacattttagattatgtcaatttcctgatagcccctacaaaattactcctagcatctt

SEQ ID NO: 27650 - DNA, 3232 bp, Arabidopsis thaliana landsberg
  unsure (1)..(3232): unsure at all n locations
tttcagcataacctttctcgagatctttcgatgtggacagcttttattttcaacctctcgatctccgcctgaaagcataggcaggtcagaatcatcatatcatcgctaaaacatatacaaacaagtcacactcgctgtcagctcctggatgagggtcttcccttcttagagctcgctcgccgaaggaaccttgctcaaacgttgctcatagagagcgaccagcttgtttgtggcagctatcgcctgccataggcaaaacaaaagttagaattaacataagaatagaattggaaggaggcagttatcgattattacctggccctccttcgccatcatgtcagcataagccgccgcctcggccatgttcttcaatccgggaattaggcagttcctccccttgatgtggggaagcgggttcgccaacccagcctcgtcctcaacgatcgggtgatcacggtcatgagtgtaagaccagtggaaaggcctgcttcccgcagatcctccgccggagttggacgtctgcctcacttcttgagaccggtttgaagacttgcccccacctctggagcctcgtcctccgccatgggacctgcccgaggatcgcctatccgcagacgcagctgcctccggagtagcagccgtaggttccatcctctcttctctaggagaggcgaccctctggtcgctcacgaccaactcagccgctggattcacctccggctgggtccaagctctcttctgagaggacggtgcgccgtcagaacgaacaactgcagatgactcatatacctgagcgacctgattgttacccggttgacctgctgcagctaaggtcccgatgttgccctcaggaagcgagggatgagatgctgaggcacatgcgctggatacagctagagtgtttcgagccgtggtctccgcggcagacagatcaccagtccgagcagcagccccggcgttggctcgttgcactcctaggcatgtgcgcctcattcttctgatgagcgggagttctgaagtgaagctggaatcaggaggacctgatcaaatagagcatgacatttgttagttagccattcgagttgctcagttgtctcaattactcgtacatttctagcacccaaataatatattacggaacttgtgcttatagtaagattagcctcggggctcggttcaatccgcgggacctcttcgatcggatctagctgtgctgcaggaaggacgattacatgaactgctagagctacgggaactgctggaactacggcaagagcagttatgatgcgatctctgctaaaagtggcccagttagtctgatcacatcggagaagggttaacagctcgagttccgtctctaagagagtaacttccttggtccttgctgcaaaccataaaaaaaaaacattagtttcagtactaactttcagcaaaagcaatcaaggattcgacacaaacaacaaaaaaaaaaactcaagaggctcaggtctctatctgacccaggttggtagaccaggtcctcgttatcctcgcaggatcaaagctgccgattgaatgacgatctactctgacgaagaagtacttggatcgccaattggtgtctcgacaagccttcaaaccgccgaggaccagagatccgggacgtgcactgatgtagtacgtgccttggtcactcctagcattggtcttnnnnnnnnnnnnnnnnnnnnnnncatgacagctgaattctctgtgtacttcccgagcccgggtgaataacgccaacacatggcggacgaagttcggacacatctcggaaaaggcgaggctgagacagtagagcatctcgagaattcacgccggaattgggaaaaataggccgcatttctcgaagaaattggcataagcgcagcaccacccgaccggcacgttctcaggatgcagcggtggccttgggaggatcatatgtacctccgccggaacctggcatctcctccggaggtcgaccaggtcgtcgttcgtcatcggcgtgcctccccttgcttggcagcctttttcttctttggcttgtcagctctggttgacggcggacgaattggacccattccgcctagggttatggcgtgtctctgtactcgcggcggtgaccgcgtactcttgtctcggatgaactcgaatcatcgccgtaactgtggttgctcttgttctgagaatcttcgaagtcgctcatctttgggtttcgacggagaaggacgagagagatgaaagaaaagagcaatgaaggcagatcgagaaagagggaataacagagaaacgaaggagatagcaaaaaaaacaaaaacgtgatttttctacttctacaaaccaaagcgcagtaaataataaaggaggagagaagttaccttgagagttgtgtgagttgacactgcgtcaagtggagaggtgggaagttatttaaagccatcatcaccataattttcgagattatagagatctcttctccgcgtccgatttggaccgtcagatgccgtgcgctgaagagacgctccatctcagccgtccaaatctgtagcgactcatctcgcgtatctcctcgaaatctttcggttggggggaatctgaaattaaatctaaattgttgagtttatccttaaaaccgactgatcttgtcacattgatcttctcatcaagaatattttcgcaatcttacccgacctatatgtccgctcatcgagttcgcctactcattcaatgggctggggggcaaatgttggagctcgattcccctccaggaatccacctgcgaaaataccaagtcagcccacaaaagcccactaagtagaggacctacgcagctgacgagcccacatacgcgaataggtatttgggctagataagcccagtcacctgatgcagggagagaagcgaacaatgacctaggaattgacgaggagatattcgcggagcagacctgatatctcgaaactgacctgccgaatatccaggaggatctccgcagatcccggacggagctaccacgtgcgtagacctatataagggagcaaggacgacttggaagagacatttcattcttagctaccattgatacacacacttttacacttgtaatctcttttcacattgtaaaagctttgtcaaaatcaatacaaaagtccattgttcttagcaatataactctcaaggtttcagtgaagatctagccctcctttctcataatcttaaatacataatc

SEQ ID NO: 27651 - DNA, 1169 bp, Arabidopsis thaliana landsberg
atgttagctatttaactaattaattatgcacctctccatcgttatccattaaacgtcaaagacaaaaaatacttggacacacgtaagagagagacacctatatctctgctcaaatgagtcattacaccttattttattatactttttcttaactgtctcgttcctttttttagtcttcaaattatcaactttgtttcttttatcagctttgtcatcttgaaattatcaacgttttgactaaatttaaagaacagttgtgttcgttcgtgccattcttttgaatggttatacttacatatttcttcttgaaaagactttgaatccaagaacccgtgaggaagtaatcctagtgaagagaagacgacaaagaaaaaggttaggcacattttcccataatttttctcaaagaggagacattatttatctttgtatgggttttcttgataaagattagatattgaaggaatctttttttcattttctgtcttttaggagcctataaagatccaaagcttcccttgtctttagttctcatcaaaaactttgaaaaacgtttggagttattgagagagagagagatagagaaagatgttgggaaggcaaagcaatggtggaagattcagacatgccagtgaagatgcagatgcaagctatggcattttcttttcaagctcttgacctttttgatgtctttgactgtaaatccattgctggtcacatcaagaaggtattagtaattattttcttcaattctatttataagtcataaatacatcattatcatctatatataactacttggttaattttgtttgttctataatgaattttcaggagtttgatgagagatatgggagtggatggcaatgtgtggtgggatcaaattttgggtgtttcttcacacattctaaagggacttttatctattttcaattggagacacttaagttcctcatctttaaaggcgcttctactccttaattaccctaatcatggggatgtttttttttttcctttttcttttgcttctatgaaaatctgagaaaaaaaaatcttgctaagactatcaagatctttagctttgtttgaattctaagtttgtaaataggcccaagctaagagaggaagttgatttcatgatgtcagattttcatttttacagtgtttgc

SEQ ID NO: 27652 - DNA, 874 bp, Arabidopsis thaliana landsberg
  unsure (1)..(874): unsure at all n locations
caagtataaatctgttgtagggttttgcttcaaataatctatatggatccttttagaatgcatattgtgttgataccaattttgagacagaatgtgtcagcgaaactgatcttgtttattagtacaaatgcaggatgttagagagttagctaataacatatacaacaaaatcacaaaaccggtgaagcaatgtaaaatgtcacaatcacaagatgtttttttcaaaaacaggggaaaaagcagagttaatgagagagaagctgacgagcacgaaccctaacctgcaagcgagcaagagcatgcatacaatgtaaagcaattcgtgcttgtctcctcacaagcactcctctagccaccgcctgtaacttcaccagactcttcaatgctttaaacgctcttcttgcctgcaaaacactttaatggttttaccaattttgttttttcaggttttcaaaatctacagagatagaaaatgtaaattaccaggtgccctctgaaaaaggcttggattttaacggcggcaatctcttctcgagttgtttctggagctgaagagcgaatgattgtgattctgctttgagatcgtcggagaagtttccttcttacaacaccaaacaaacgtttggagttggccatgtttatgggtggatcttgtcttcttttggttttggttttggttttaaaagaggacgtctaaggaaacgtaaaatgtgaataaaaagtgaagacggtggctttaagggatatatggaacatgatgtgctctcctcatttctaactaacgaacgtgctcgcatgctcctctctttacacttggtttcgttntgtttattagtagttttcaagacacacgagtctttgtcttttttacatt

SEQ ID NO: 27653 - DNA, 872 bp, Arabidopsis thaliana landsberg
cgatcttgccttcctccctcttgttctgagtcttcttctcatacacgcaagaggcaccccgagcctatcacatgatttcatctctttcctattttgagattgtgttatctttctaatttttaccttagttttaattttatctttttttttggcaaggttcaatattttcttgatcttatttatctgtaacaccaaaacttttatatattgaaatttacctttaagcaaaaaaaaacgtgcatagcttgagaagtcatagaaagcttcttttattagtgaaaagtttttacaatgaagataaaaaatgagaaataaatctgttttatcttcttcactctagatctactatttcttcttctttgttagcaaacttttcccctttttaaattatctttcaaaccctttagaatctaaagcttgtggtgagatcttcaacaatcaaaatcaaagagggtagatggtgtaagcaagcctgcatcttttgccttcagcatgcgtcactatagctttatctgttttgctcacccatatcgtcaaaattcctttcctcaccttttgcttcgactctcgactatcaccatcaattgccaaccttaatttcaccggagatgatagcttcaccgtaaaatctctcaccatctccgtacggcggccaccacgcacttgtgcaccttttccttttccctgccaacgtgaaattaggccctcccaataaggcctttacagcccaaatgtacaaggtgcaatccaaaccattctctgctaaagtccatatctgcttctattttattttggttcatatctagtcaatctttgtgtgcattatcggaaccttttgttcatggactgcaattggtaagatatgtctcatt

SEQ ID NO: 27654 - DNA, 2054 bp, Arabidopsis thaliana landsberg
tcacaagacatgcacgttagatgtccacaacttcagcatcaagacaagacaaacataagaccttttttccagagacagtgaagacgaaaggatgaaatgtcaaaacctcaaagctggcaggttatgagaagctactgctgtcagtataaagaccatgcacgagatacaacaggggcttttcagatcccttaaaatgtccactaaagacttgaattatcccattcacataaaaaaccatgtcaaccatatatgtttcccgcaacaagaagcacaaactgcaatcactataaactcactgaacaaattaacaagacttaaaaaagttcagatgtttaccttaaaatgcgacaatggcttaatctctcccaaccaaacagcataatcatcaggcaaccttggaataaaaaggatagatttcccacttccaatgtccttccaatatcgaaagtgactcaatgtcattggttaagcaacaatcaacatatatagaatgaaaatggtgaacgggtcatatgttcttaagaaatggagatatagctagcaaaactcacaatagctccatagaaatctggctctctgactccaaacaagtaagcaaaataactctcttgcctacaagtcagttcaatatcatcttatttccactcaatacattgaacagattgaaagagaagaaacctcgagataaaatttcaaatcaatacctgaagagctcggtgtgatcagtacagtatcgatttttctcctcgccaccctatcgtccagaatcaagaaaattacaaactaaacacaatgaaagcgagcccggaatcggatcatcgatacgtgttggaaattatgtatataagagctaatcaagggtacctgtagaagaacaaatccatcgagagaacgattggaactagataactgacggcgtattgattctagtaactttttccggttaccggcgtggagttccattggaatcggtgtagtagacagagacgacatgacgacgatgagctagttttttgtttttccggcaaggcctaatagtaaagccaaatatccaaaatgctgtcgtttttatagaactcgagtaaaacgaatatatacgacgtcgttctaagagtgtgaaagaaacgacatcgttccaatcgaaacgcatattacgccgtcgttctaacataaagaagagaagtattacgcagttgttgttgaaccagtggcccgaaatctcgaaacgactcatctctcagctcaccggtgctgcattatcaaaactgcaggaaggtacggcgagtttctggtctgaccgatgtttctcaattgggtcgaggcttttgctcctgcttctcttgtatatgctatgctttgtggtttgacttttagatctatatctgtgatctcttcttgcttcgataacgatttgttcgttctaggagtgactgatttgtaattttgatttgcttgattgattcacactgtagtttgttcgatctatcgttatggaatataggatttggggttttaggctttttaagtctttaagcttgatttgtgtgaattcactgaaacgtctcttgtttgctgtagtagggaaatttacaaaattttcaatgtcaaaatttgattaatttaaattttatgattcaaagaatctctttttgtatttgaaggatttggttgtgaagatggcatcgaagttgatacaagttcaatcaaaggcatgtgaggcttcaaagtttgtggctaagcatggaacttcctactacagacagctgttggagaagaacaagcagtatatccaggaacctgccactgttgagaagtgccaagagttgtttaagcagttgctctacacccgtcttgctaggtcgatatctctcttttccttctatatgaacatttccctggtcatagttaccttatctagattctggttagaaagagacttttgtcaataaagcatcttctctgaggtataagatagccagggaatgctgagatcatacaaaacttggctgttcatggaactgtaaatggcatactatgagtccttcagtctatcc

SEQ ID NO: 27655 - DNA, 1305 bp, Arabidopsis thaliana landsberg
  unsure (1)..(1305): unsure at all n locations
ccaaataaaagaaaacgcaatcaaggcccaagcaattgtcctctgtatttcttcatttaaaactttatttacttttcaacaaggtctctatcggttggattataaatatgtttagattataattttaaataattaattttacttttatactgtaatttaagatagcaaattaatatttactgttgttaaaataattgttcaaaagctatatttttaatcatgtaaactcaattaatattcagggttgcttacacagatataatttttttttttcaaatataattttctataaaactaaaaatataattaccattttcaatcttggttgatgattatatgattaatatccatgtattttctttatataaaatttaaaaaatgaaagatggataaatgtccaattaaataaaagtaaatagctctttttgtgttaaaaactattaatctgtttttagaattctttttcacggtattttttcgtaaattattgtgtcaaaatccaaaactggttacatacaaacaaaaacaaataaagaaacaattgtcaaagttcattagacgtgatgttggcgtattaaatagtggattttggtgtgaatagaaaggtactcaagagaaagatctcaaaaaaaaattgattaccattgaaaacttgagtcatcgattatcacttgaattcataaatggtactgtaggagatggtgaaaatgagttcaggcgcatcataaaccatagtaatagtagtaaaaacgagaagaaaacatcgcaatgcaaatggagacagaaaccaataaaacaaagtgaaggagtaacccctaaggttcaagnnnnnnnnnnnnnnnnnnaattctacaaacaccaacacaagattcaaacaattttattactaacttggagattttccagaaaagttattattccaaacgtttgcaaattgagattatttttactactctaaagattcaaacatttttacttcttgtagaactcagcataattctttattcaccaatcattttcaattatctttatgttttgttttatattccattttttatttgaatatctttcttactatatttatccttatgtaataactttttcaagaacacaaagaaattgtacaatctttggagtaccatgtccttcaccctagctcacaaattagttagtttttgaaacttttatatataaacagcatatttcatcaaacaagatatatagtccactttttatgaagatatagttttaaaatcaataaatgagtgaaattagaatattaaatggtcatagaaaaagtaaaaa

SEQ ID NO: 27656 - DNA, 1791 bp, Arabidopsis thaliana landsberg
  unsure (1)..(1791): unsure at all n locations
agtgcctttccagctcgagaacgtagaaaaattgatcaacctggatttcaattggctaataccgggttagtgcacttaggctatatatatctgctttactactgaaatggacattttggatgttgatggcggttttgtatatcaggacatggaagaagagtacatttcaaagatggagacgagaaggcgaagaatctggaagcacttgttcagaagcacagagagaaacaacttgtttcctttagcaaatccgggaaagcttaagatatgtatgctgattctaaaccggttaatcaaactaaaccagaccgaatgtctctacggcctgactggtctatgtgtcagttagttcccacgcgagtgatgtatttatttctacgtaacattgtgaacctgcttaaacgcttactagattgaaacgaagaccgtgagtaataaagtctcctctttcctagtgcaagtatgtcagctaaagagaagctgtgtttttttacgatatttttcatgttattcggaatgtcttaagtcacaaaaaaattggacttttgactagcatcggatgcatagctgtttatttgatgagggtatctcccatagctagttaaaaatgttatttaatatattcgttttggtaccatatgttacaataaatcatattatgcagagatcatcgaataacatcacataaggtaagaaagttcatgtaaaaagaaaatgcactaataatcattcacaaacttagcagtagattagcgatcgaaaattgatgtcaccaaatttaacaatctttaaaatgacatcttttaattaacgacgttcattcggagacaaaatgaatttcatcaaaaatgagtcactaaactatttttcaaccactccactaaaaaagttaaacctcattcaaaaactgccacgaaacattcccaccaacaaaagataacaaataatatagactccctcgccttgttgcttcccactacaaaagtaacaagaaaaattgttacaataactaagcatagtattaacgttatgctatatatacaaatctctcgtcggaccaaatattcgcattcatagatttcattacaaattaacgaactattcacaaaaagaaataaaacgagatgggaagtggcatgataaggacattggttattctagcaatagctttattcatgatcggttccgacaacgtccacgtggcaaaagcccaggtctgtggagctaacttgtcgggactgatgaacgaatgtcaacgctacgtcagcaacgccggaccaaattctcagccgccgtctcggtcttgttgtgctctaatccgtcccattgacgtaccttgtgcttgccgctacgtttcaagggatgttacgaactatattgatatggacaaagtggtttacgttgctcgttcttgcggcaagaagattccctccggttataaatgtggaagtaagtatctttcttgcttttcttattatagtttcgtaattgttaagcatataataatttggatttgaatctgttataggttacaccattccggcggcttaaaaaggaacgaaaccaacagaatttggatttgctataaaaattaataaaacgtattagtatctgaataatgatgatgatggatgttatcaggattttaggtcttgtagtataagcaaaatggggttgatggtcggaagatataattaatgaaaatatgtttgtgtttttttattttgaacacctaaagtaaacatcttgactagcanaacgagcaattaaacatctgaccacataaataat

SEQ ID NO: 27657 - DNA, 1833 bp, Arabidopsis thaliana landsberg
  unsure (1)..(1833): unsure at all n locations
actttccgctgtgttcatccatttgcatttttcttctgtcttcttaacagtgaaaaagtatacttgtgtccatagtcttccttctctggagagtctgttttcttattgtagctgctgtaatactttgttccttttcaaccgcaaaagtgaagagtggttgatcattcttagatgtcacacgaaatagagcctgaacagttgaagattttccatttctcgacagaaaggatgacgaagatggttgacttgaaggtgcttcctttagtgatggctcaggagatctacatgagtggcttgattttggttttattaaaggatcgagtaaccttctcaatggactagacctgcctctgtttgctgcactggttttatcaaaagaagagctgtcactgaaagaagaggcagatggattgtctaaaccagctcgtgatgaaataagtgctgtgcttaagtgtggaggagtcttagcatcttcggtgttggagtttttactggactttccaatgctgaagctgagtcggcgaaatggtgaaatgctcctagctctttctgataagactttagctggtttctgatctgactgtttaggtaatgtttctgttgaccttctatctagagtcctgcttctagagggactagattcagcctttcttgatcgtggagctgaacatgatctttctgataagaagctgatacgttttaagaatggcttacttcctccnnnnnnnnnnnnnnnnnnnnnnnntacatcagagtcaagaactgcagttttcccatgcgctaacctctctgggaacccctttcggttactttccgccaatcgctcagctagtaacactttcgaatcatagaacttggacaaaccaataaactgtttctgagaaacaatccctggtacaaatacagcagcaggcttttcttttccaaagagatcatgaacacgaggatttcggattctctcttccaacttctctcctttcttcttaaaatcctcggctagattctttgatattatccttgtgcaagaaggactatctggcttcgatggactaaagagagttcttgtctttggaacaatcttaacatcagtatctttcttctcattctgttggaccgcagttgcacgaggggtctgatgaaactgcccatctcttctatgactgtgagaagtatcaccgttatcttgaggtggctccaaatcttgaaaattatctccaggcttagaagacatgagataatactgcaaaggagggtgattgatctttttacgaaaaggagaagcacaaagacctctactggaatcagtcgatgactcatcagtccagagagaagacgatgtacttgtattagacaaggaagacctcgtatgcttatccatcagtttatcaatcccttgcatattccttagctcctgtgaaccaataacaccaccagctttaacactcttgtcttcaactttatcacatttctttatataactcggcacataagacttgtacttcacaagatctctttctcctgaagcagttctacctatccttgacttcaaacgattctccaagcgtttaggacatacatcttcaacttttttcgtgatctcgcggtggaaatcggagtaagataacccgcgtttatcgtctctaaacttatccggtgtaaatgcctttgagctttccttagttaataccttcttctcagcagctacaaatggtggtctatcacaagaacctttcttcaactccaaacgacactccatctgtttccaaagttccaaacgtttcactcaaatgactccttagtctcccattaaactgcagaagcttgaaacgctca

SEQ ID NO: 27658 - DNA, 2268 bp, Arabidopsis thaliana landsberg
atatttgggtaaaaaaatatttaaaccatcgataacacatatatgaaaatggggagtatattaattgtttggggaataaatattttgtttcgttgggttgccattatttacagcattttataaaagtatcgatttttaatgagggagttgtttcatcaaatactatcgactgtattttaggggttacatttaagattatcaaattttcgacttaaattcaaacgtctaatataaaattttatgtgaagttgtttaatggtccgattaatagcgcaagacggtaagagctttgtaactgtacaaaatagtgataaaaatggtggtatggttgaatatggtaaaaatgataagagatgaaaaatggtacgataagaagtcgttagaccaaaaaactagctgcatattgaattagttcgaatgaataataggattgctttttctacatagttctgaggttacttctctttcggtagttcgtggatccatcggatcatgttcgtcatttgataaagtcgtcggtgaattttacgaaatggttagtggttattgatcattgtttaaccacaatttctaacactctcacttgtacgattaatgttaatggaattgtgtttttcttatccttttaaaatttgagacaatctttcaatagacccagaaaacaaaaggtggcgagaaaaggtaacttcgaaactccaagcgctaaaataatgttcggataatcatgattcatgagataagtcacactaattacattaacatagaaaaagtttctttaaaacttcttgattagttttaaagaagacactttaactaatttgagtaatttagggctttatctcatgatgtaatgacataaagtctctttattaaaattgaattttaattacaaatcatgtcaaagttgttagcccgtccattgcacttgtggcatagaactaaacatgtcacatcaaagtataaatagtaattaattatgataaaatacatttctaggggaattaatgaggttataccttacggacttagattgaagtcattatcaaagcagttaattgtctacgtactcaccaatattttactccacatagatctaaacaaagaagttagttattacattataaatagcttagtgtatgtaaaagtgttaatcagaataaacattagtcaaaagttgacggcagtgatcggcaactaatccacacccaactttaactcacagtgactcccacgttcaagagaacacaaatattattctctcctttttagtaccactgatgtttttattttcgtttctttcgtttatataaaaccagatttattagttaatttctatttcttaggttttgttatatattgtaattgtatatttagttctgaaaccaagaagtactaatacatataactattttagatccttgacatagcttttttctatacggtatgtaaaagtagtctatatcatctattattttcgaaagttgtaacatataaacttattaattacaagaaaaacaaaagttagaaattaaacaacgtatgtgaaatgaaatctctaaacattacttattacgaacatatctagaactataatcgaggtttttgttaagtaagcgaaaattcaataacgctgaataaatcttttaaagttatagcggctttaagtcaaaagaaatgtatgcatgcgtatgacattgtacaatgtacacttcaacttttcaagtcacgaaaattgatgtcaaatcgacgtgcaatttgataaaataccgaatctgcagactcctttttctattgtataaattgaagatttcaacataaaacttacgctaatctttaaaacatgtcttagattagattactgtcagttcgttactttggttgattccaatattagtacgaaaccatttactttttctttaagagacatcccatttgaatgaaatacattattcaccaaggttaccatacatccataatggcccgcccatgcagtagcacacagaattatggccctatgtgtgccaacatgggctaagttggtttctttatttcgcgacctaaggctttggcattgccttaacacatcagtgaaataagactcgccgacacaaatagaaccggcgacgcccagcgtcgattaacagctccaccagactcagcttcctattatcttctgatgctgctcctgtctttgtcctacgtggtcctaacaggagccgcatatgcaatctccgccgttatcaccggcgtgcgtttcctacttactac

SEQ ID NO: 27659 - DNA, 1303 bp, Arabidopsis thaliana landsberg
gtaggatcttgattttctgattaagtaccatagcggggatatctggagtcgatttcttttgttgatcaggaatgtttacagtttccttggcattagaaccatcatgaatgatatcagtcttgggagtttctttagctctccatctagagctttgtccaagagattccccacctgctccaactgaagctcctttactgaaaatcttaacgaagtcactcacttttcctttgactccatctttgccaacttctggtgctgctgatgaacttgcgaagctggatttatcgggtatcgggctactatccaaagaacttttagtgccttgtgatttcttcttggttcttgaatcttcggtaaaacttcgagtgttcttcgctttgcttttaccttttctcacttctctctctgatactattttctcatctgcaatgacaaagaaccaaatgcacagtcaacaaaaggaagttaacccaaccaaatgtaacaaatatacatgtctgcagaaaccaaccttgtctctcatcttcttcatgaaaaattgaatgaagaggcgtcacagtagtagcttcatgtgcttttgacacaccagagaaggcctgttcagactcaactgaatcaagaggcttcacattagcctcacgtgcttttgagacaccaaagaaggcttgttcagacttcaaatctgtttctgttttctcttcttttgtctggacaccaggacgctttagcgaggtcttcttcacatctttcaaaccagataaaccactttttccatctccttcttcatttttacccaatttctcaacaactgaagtttttcgataatcactcaatggtacaggtgttgtctcctcagctttagacatagaactcaatctagagcttccccaaataacaacaggaactcctttattaggccacttgtagatagagaaatgaaattgccttcctttcccagtaacaaaaacttgtggaggatcatcacaatcatctgaatatgatttagcagtagagaccacatctgctttgcttgaagttcttgacaaaggagagctcgaaacagtttctttgttcttgttcaaactacgagtagctgctaaattaaatgttggaatctctgttgcttttgcaggaagactgagtaacaaagtcaacaattatacaaattagcaacgaaacttatctcttcgtttaaattagttcaaagaaaacagacctgaattgggatggagacgaagaccctgaagaaaattcgggtttgtgagccgggctaaggatccgagaacccggaagtaatatgatc

SEQ ID NO: 27660 - DNA, 2054 bp, Arabidopsis thaliana landsberg
  unsure (1)..(2054): unsure at all n locations
agagctcaaaactttgtgaggcctacgaagctcaaatgctaatcttatagctttagtgtattccgcatctaacactgcgttttccagctcttgacctctcaagattgcttcttcgtacacatcggaagtgtttcaaaaatgatggtcggactaaagatcaagcacacatgactgctccacagaaaccagactattagaaattatctaatcagtgaactgacagacctcttttcggaaatcgtcttctttatctgaagcggttgaatcatgccataaattaatatctgcatcacctccaccagttgcaatcatttctgtcttctttccaacagctaaagcccatacctgtaaaagttgaactgttatttgtctgaacagaatagcaagaggtctctgcgactaatggcaatgaacatattccatcaaaaggctaaaaataaatacttccaatacaaatacaggcaagccgaagttcataatcctataaatgatagcatcaaaggcagaccaagatacatcaaaaaccaaggacagtttatgtcaccttgtcctcgtgctggtcatatgtggcaatgcactcgctagtgttcacattccaaagtttcaacaaaccatcggcacctacaagtgcatggttagaatgttaaaactaaaaatgaagaagaaatgacatcagtgtagtgagtgattagtgaaacttaccacatgagacaaattgggttccatcagttataaatgaggccctaagtacacttgaggtatgaccttcaaatgttttgaggcaggaaccatcagatatagcccatatctttactgtcttatctcctgaagctgtcattacgcactgatcaacagttgagaactcaacagaaaaaatccgcctcttgtgtcctttaagtgtaacaacatgtaccaagtctggtagtctccatatgctagctgtacgatcctgtaagacagaaaccaacagtcagataagaacgtgaagcatgtctccatcagagcccagtgcatcttcattcaataggagagaaaggaagacaaatttctcaattcatctgtattagaaaaaagttcaatagaatgaattaccataaacttaaacaacaaatgtttgctcatcatattgtcttacctcagaaccagtgcaaactaagctatcgttacgagcaacagccacggaattgatgtctttatcatgggcagcgacaacacttcttagttttcagattaatgggctcctgtgagtcatataaaataccatcaaggctccagaccgtcagtgtacgatccctaatccaaaggaacgtaattaagagattaaaaaaatatatccctacagtttggtaggagatataacaatagatacatgtctctatgttaacaatcaagacagattgtacactttctgcatttatgcacacaaattagttacagccagaatatttcactgagaaatgaaggtaacagaagtcaaaaattctcgaccacacagtctctatactactaatctgatagaaaaatttattttccagtataaggcctaacagtaaacagccttatgctgggtggctgggtaattgatcctttcttataattcctcagttgggtggctgggtaaagaaagaacagagtcctaatcaggatttcctcattgttataaacaatatatgcataaactagaagcatcatgcttcacttatatcaaaataaaaggtatatgcaatcatttatgtagcacgtacccacttccactgacaaagaaactgaaggacttcttcgcaaaagcaaccgctaagatatcgccattatggccagtaccaactccgatacaagatttgcttgatgcgttccatagccttacctgtaaagtaatcaaatacaagttaaccgagtccacagatcactctagcagaaaagggttttttgtaggtgatgttgtggggaatgatgtgcatgnaaaagcaatgacataagctacaaacaacccttacgaaatcttgaaccaattaattccatcctactaatctagctttcgtggtacgtaacataat

SEQ ID NO: 27661 - DNA, 1733 bp, Arabidopsis thaliana landsberg
aaaagtagcaaaatcgaaaataaaaaagctagaagcgaccgaccgaacccgcccactcatttagttccaaattttttctccgggatctctctgctctcgaaatctcccgagttttttttttaaatttttgtttctcaccggcggcgagagaatatggtggtgattcacgaagtgtctcttactccacgcttcactcttccttctcgacctctcaacactggctttaatgccggcaattccaccctctctttcttcttcaaaaagcaccctctctctcgtacgcctctttctctttctcttaatttgctgtgctctgtgacgccattgttgtaactgactgtaataattgatgattagcgagttcattcgtctattggactagcttcatgaactgtactgtcttttctttcgctggggaatacctcttgattagatccatgtctgtagggaagatctttgctgggaaacaatctgcggagtttgattcttcgtcacaagctatctctgcttctgagaaagtcttagtacctgataatcttgatgatgatcccagaggtttttcacaggtggatatcttttgtcatctctgctctttaatcagtgagttatatacaatgcataggcaaattgttagaggttgaaccttatgtgcattacatgaaaatatataaaaaaacaataatctcttctttttgtagatatttgatctagaaagtcaaacaatggaatatactgaggcagtaagaacagaagaccaaacaatgaacgttgtcaaggagagaggggtgaaaccaagaatagttcccccaccgggtgatggcaagaaaatttatgagatagaccccatgttacgaacttacaacaatcatcttgattaccggtaagaatctttgtttcaagttgtttcgttattactatacctgcttgagacttattatgtaagcctctgagtcttatttattcaaggactattcttacaattgatgtacaagtttgtagcaaggcgagatgttgttttttacttttgattccggttatgtatcctgcatttttgttggctgcagttatggacagtataaaagattgcgtgaggaaatagacaagtatgagggtggtcttgaggcattctctcgtggctatgaaaagttaggattttcgcgcaggtaactatttgctaccacctatatagttctccagtagaataccaagtttaggctgtagtgtcacactgttttcatttcatcactagcatattatatgttttcctaatggtagttacattgctattacagtgatgccggtataacttatagagagtgggcgcctggagctaaggtttgtttcttttagttttccactagaaagttataagttcgttctagtaattccttcattcacgactgtagatagaatctttgcatttgctttatgctcacaaagtaaatattggtcatataacaagggtaggatattgtcctacagtcactatgtggtcgaaatactgtagcacctgtctcatgtaagagtagtgattggttttgcttatttaatactgaatgtaggaggtttagcatgttagtcgaatctttatggcaacctttatttcttgactgtatgtgtgtgcatattttacaactagtttggttgttttgctaacttctgccgaagtttgggctgtttgctaacttctgccctcgcctgtttcaggctgcatcacttatcggagattcaac

SEQ ID NO: 27662 - DNA, 1102 bp, Arabidopsis thaliana landsberg
gttagctcaatgatgagaagcatgttctttgaccaaaatattttcttctttcgttcccttgtaatcgttttcagtttccttttgtcagggaaacaaagtcgacaaactaaggtctgctcgaaagctcctccaagcaaaagaccattttggggtaacacatttttttaatctaaatgatttcttgcagcatctggtcagatcttgccaaaaaacagtatgcaaatgctccatgcatatattagttttttttccctctggcttttgtaatctaatggttatatggacgattttgttgcaggtaatagtgcatcaggttacaatcttgggcatgtgaagagcaacatcatgaagaaggcaaaaatagatctgttgaagaggtacacttcaaagttgcacaatcaccagtcttacttataaggtttatagcaacaatctatttcttaattcaaatcttctgatggttttgattacagtcaagaagtgaaaaatcttactgcgattaaaaggaacaccattcagaagagtttcaggtatcatctccccagcatctatttagctatatcaacccacattcgttatcccccaaacctgatcggtttgattgatcatgtcttgtctagtatttctactccaaagaaaactggcttatctgcgaattcgccttcaacttcaagaagcattccttatggtggacgaaatcttactgaaactaaaaagaacacgattcagaagagtttcaggtaacatgtcctcagtatctatatatctatatggatccacttctttatcccccaaacttgatcggtttgacggatcatgtcttgtatagtatatctgctccaaagaggactggcttatccgctaatgcgccttcaacttcaagaagcgttccttctggtggacaaaagctacctccaaggaggatcaacggccttcctgggactgctccttcaacttcaaaaaatgcagccaccagacaaaaacatgtaatgtaacttatatagcttttttacagatcattttttcttcgagtgtatcatttacatggctacttcaagtttcaagaactccgagttttgaaactctggcttgatgatatcct

SEQ ID NO: 27663 - DNA, 1780 bp, Arabidopsis thaliana landsberg
atagaagttctgcttagactcattaatatttaatatgttaacccattataagtttacaactcaactcattgaatcgatcaaatcatttgacctaataactcatttggttgtaagcttctatagttattcttatataagtctgaaaaaatattatagttgtatttttggatatctaaagaattaagaaaattgataatgtctcacctctacgataattccttttcatctttccgttttgtttttgtattatcgatttatgttctttaattgttattattttaaaaaaacttctccagtcatctttttatttatcagttacattatcgtaaatattcaggcttcttacatgaaaaatcgaaatattttaatgtgatctccactagttcatgaagaaaatgcaaagttatgacttacttttatggattggctgcttaaacaaaaagttaccaacagactttgactttgactttgcgtaatgcaaaaataacggcagcatgaaaagaggttcccttcgcctcataatctgcctaagttactggtcaacaagcactactatatatatatatatatttgtgtcattttcttttatttgtgttgttttatatatagtaatttataaacatatcaattattccttctttccttagaaatgatgcatggtgagaaatgtaaaaatattcatatacaaaaaagagagggaaagtaatattatcagttcgataaatatgtattggtttttatgaaaataatagttttattcaaaatattagctaaaaaatactctcacacagttggtttgtttcatagttatagaatttattatgtgacacaaaaaattcaaagaatattaaaaatacttgaaatattatgcaaataaacaaatattttgcaattatattatttacataacacaatcttatgatatttattttagaatatgtttacattattttatccatatatatgtgtcaaatacgatatcatttttggacatttacatttgttgtaaattaaattgtatagagttaataaaaaaaatcaacagataattttgattaaggtttgtgaataatttagtcaattcaatgcaaaattcaagatttatttgtctaatccactaattgagagtttctttagtcataaataaataaattgaaaatcttcaaatcacgaaatatttttttaaagatttaatttacacaaaatctcaattctcattacaaaattcgttaaaatcaaaatttgcaccaactaaaaaaaatcgattatcatttttgtcataaacttcatctacaacttttgtcactacataatcaattattttcttgtccaaaaaaaaacataatcaatgattttcttaatgtaatagtaatgatgaattttgatgcgggtaaagtaaatattaaatctacttacacaacttcctttttaaaagtatttatttcagatttgagatttgtcagatatttttctcaacgtgaaagagagaaaagagaatctctcagaaggtgagcctccaacaaagcgtgaatctctctttctctctctatctctctatctctctgtctccgagatcgcatcaccggaaatctccttactacggtggtggtggtgacagttgaccagagatggcggcggagaatgagagaaaatctccttcagcagtctccgatatgggagcttgggcaatgaatgtgataagctccgttggaatcatcatggcgaataaacaacttatgtcatcttcagaattcgcatttagtttcggttcgtcttctcc

SEQ ID NO: 27664 - DNA, 1185 bp, Arabidopsis thaliana landsberg
gagaaggaatcaaaggtcataaaaaaaggcgtcaggaggggagcggttaagtaggtatgcggctggattcacagaccctaacaaaaaaggtgcttgggtagggctagccaaatcaccacgatcacaccaccatccagacttgctagacgcaaaaaagtcatcgtgagtttcatcatcgatctaaaatctaaaacctttcacttctataaggcggaaccaccatcttttaagcttaacaaccataacaaacctcttacattatcggcaaaaaaatgctagtgaccgatccaaattaaatatagaagattaaaaactaaattaaaattgaaaattaaaaaaaccgcgtttcactttaaaaaaaaccctaagtgctcgtctccttcgctttcctctgttctctcggatttaaaactcaaaaaaatcgtatttctccataagagtaacatatcactggacgtttcccaattatctcctcctacgctcccgactagcgtttatcctattccggtcgccgccggagaccttgtatctccatataatggtgtcgccgaaagatttagtggcgatagtacactcttcgctgctcggaacatcccggccaactccaacgcagcgtatcgaactcactcatgccattcgcaactcatttccctctcttcagaacctcctctctttcccggtacttgctcaatttccttgtactcgatgatgcgtccttctgttttctggatacagtaacgaattttgttttaatctctggcagcctccgaagccgtcggacagagcgcaagttcagtccaaagaaattcgactcccggattcgctgccaatatctttggatgaccaagatatcgctattgtaagtgtttgggagacgagtgtgtttgtttctccttagatttctagatgaacattctttggtctagtgaaggattagattttaaaatttagatatgagaacaactgacaccggctaaagcaagttttgattcaatttgtggatgcattgattcagagaaaggtgcctttaacgactctctgttcattgatatctaacagcctatgatcttcttgtattgttattgattgtagagcttgaaactgagtgatgagcttcacctaaatgagatagattctgtttgtctgcttgtatcttcgaatcaggaggtgcgattcctttcattt

SEQ ID NO: 27665 - DNA, 1254 bp, Arabidopsis thaliana landsberg
  unsure (1)..(1254): unsure at all n locations
cattgtttttactgataatacaaatgaagagtacaaatgatgatgtttaagatgccagatgtttctaagagatgaatacatacgggaaaattgattgaatacaaaaagttctggttcgtaataaaattatcccatttatctctcttctcctttgcttataatcaagctcacaatccatatcctctctgcgatcttctggtggccaccgatcttagtcaatccgaaccgcgatttcgaacttattcacccttcattatggacttcattgggcatgtcatttgacttttcctgtgtcgagtttagtgacacacccaacaccaatagtgtctattttacaaaataagttacgaagactgtatatcttggtacatataaaaacgagaatggaaattggaatcaatattggctctacaccaataggatcagattttgttaatcttcgcattaaaatcgaagacgccttaataaagcaagtcagggaactccagtgcctgcatatagaaacaatcaggcacactaccataaacaaacaaacaaaaacaaccagttactagtgcaataagttcgatgttatgtttgttaattaccacaaaactgtgtacaagtgatagtccagtggtatatccttactacgagtcaagttctcaacgtctcttggaactggataagttctactttcatccatatctgtgtacgtactctctatatacattgtgtcctcaccaaaccccatggctagagctagtttaggaacgtcaaggtagaaccacgcaagcgaacttggataatttactagagtatatatgcctggagtttcacttttcctaactacacccaccacttccacatgcatagccctagagacttggtcctgctaaaaaatattccaataacacttaactatgatatcaaatcatgcaatgaatgattgagtactcattaagtttatgaaatgaagaccaacctcaacannnnnnnnnnnnnnnnnnnnnnnnnnnnnnttcgacaagagactttgttgagaggagagaagtttattagcttttcttgactcttttgcagcagcaacaagaccaccagtacctagagattctagagaattttctttccaatccgaaggaacccatccgcgatttactagaataggggacttcatactagtgacaaaaggaagaagaaaaagatagctagaccatgtttggttgcttgtttgttctggtgcatttgtatgcaaccttatttgtaagagacaca

SEQ ID NO: 27666 - DNA, 836 bp, Arabidopsis thaliana landsberg
cagtgaatccggttggggcatgccactcgtcccgcgattctctagatgtagaactgcatagtctagcacaatatgaggtgtcatgatccagagaaggcagcagtaaattcatgttcacaaatagagaggatagtccagacaagtaggctataacagctatcgaagtgaattgtcgtttggaagccccaaagcataagaaattctgacctgtacgagttgatagtacacagcatcatggcaaaatacggtctgcgcttgaggcaaggagccctcagtctctgtttcttccagttcatcctcaagattcatggctaatatgcgagtttcactgataaagctaacaacaagaaatgtatcgaaggcttcatcaattgaagatttcaacgaccacattcctttgataccttgaagttccacagacgcctgtaatagagcggagttttaagatatagaaaccatatgagaaaattgtgcatacaagacaatgagatttcgcgcataaatcaaacctgttcattgattcctattccattgcgaactacgcggagggaaccatccttaaatgctccagaacaagttacaacctgaccttgcccctgtctctcgaggtcaactacacaaaagtcgacaataggccccaagttgatatacctttccaagacttctacatatgagccttttgcatcagggtgtagattcagctttactagctgcaattagaaaaccaaacatggaaacactcagatggtcgatttaacttttcttagaagccagagagaaggaaataaaattatcttttgaatttctggctatgaacgataaaaataaacaaattc

SEQ ID NO: 27667 - DNA, 2224 bp, Arabidopsis thaliana landsberg
aacctaacataatctgaagatgtccatagtgttaaagctaaagaatgctacctcttgcactctttttttttccagacccaaggctttccttaagttttcttcacgtcggtcaaccgtcgacaatgcatacagatgtgatgactgttcccttttaaggatttcttgagcttcttggaatgcctgatttagttgtgcgtgctttgaaaccaactctttgttctacataagaagaagccccatattgtgctgatagccatataactgcacagaagaaccaattctgagaggttaaagcctgtatatttgtacttatcaaaagccataacaaagagtcaaaacactcatttcaactttcagacagctaaacgttaccaattgcatcataacccatgagagcagaatattcaaattgttgataaaggttacctctttttcaagtgtagagatcttttcaagaagagcttcttgatctttcttccccattgaagcctcattcaacaaacccacttccctaaaccttctccaatcacccatatccatatcatcagtgtgacctcgagaaacgccttgtccggtcagtgttccaatcggaggcggaggaagagtcggtattactaggtcatcactgaaagcaaccgcctttccttttctatcagcgtttctagggttagtaacaccgccgattttatgcgtctcgcttctcggcgtcattgccggtgacatccattgttttctctgtggcgtgaacattagttcgaaaaaattggaaccctaatttcccaaaatgagaaatctatctctttcttctctctctgacaacacaacggcttcaagaattttgaagtccccgattaaaaaaagtaaatcgccgacgagtgaggtaaaaaggtaattacatttgttttgggcctaaaacagttaaatatgcgcaaaagcccaatgtaatatctggcccgttagagctacaagataattaagaagagggctaagaagatgtctagaatattaaatgttagtcgtcacttgaccgctgatgtgaaagtgaacatttgtttttcttgttgatctttttgttacaccatcttaaaatatcttatctgttagtaaagctaactttaaatttataaacataggaataaataccgttgtcccatatgcatcattattggcaaagcgataatgactaatattaaattacataagactcaatttgctcatacatgacatgaaatggtgtttgaatagtcaatcgcgcagccatgataatgagagtaggtaagacgtatttgctgcgaagatgtgtgactataataatgacgcgaacatattgtgataatatataactaaaaataatatatctgatcataagcatgtaaatcatgttactaactaaatgaatctgaaatgtacaacaatcttatatacaaggaaaaagatgagttgaacaagcttataactatggttaaagctctttaaattatgactatttgtagatctaaggaaaattatgaatggaaacatattttatttgtttgaagaattaccaacaagaatatgcaaaataacctaattttatttgtcattgagctcaagttgggcaaaggagctagatgacatattcttcttttgccaaacttgaatattatttatgtagatgaatccgcattatcgaactggcaatacatgatgaggtggaaattaattttcacatgtgtttgttaaaaagcgtgtctgtgtcagagaagataatttaatcaggagatcgagccagagagcctggcggagatcactggaaatcaattattttagtttgataatataataatagtaatagtactaatccttacattagaaatttagaaccaaacaatcaattaaaaaatataattattaattcactaatcattacagtaaatagtaattacttgctagttgccagttcccactctgttgactattcttctatgtcacaacaagttgtcaaaagagataaatatgtaaccatcaccggcttcgtcttcctcttcgtcttagtccacggctgtttcacattcgtagatcgttcctctattattgctagaacaacacaatgaaaggtttattcttagataaaagttttacagagatttctatacattttaagagtctagccccctgttacattccattcaaaatttcttttataaaataaactaatattctaatacgattgcctttccatttt

SEQ ID NO: 27668 - DNA, 1085 bp, Arabidopsis thaliana landsberg
agaggggaaacatcttaaaggtgactaccttgtttctgactcttatatataattgttgcctctttctaatcaacttttgattatgcagatggatcgccataaatacgtgaaagtagcttaccatgggtttagggagctctctaaggaagataaagttgaaatctatgggagcagcctagtacgagattcttttgatgaacccgactacgctctcatagatactctcttttcactggccgaagcctatttgttcgctcaacttgttgactttaaagataataaccctgaaaaagttcccaaggacgttgagtaagacagcttcccacattttactacttcagtttatgtttcctaatggttgtagttatattaacttatacctggcatgaatgttttctcttaattttgcttatgattgaaactcttttagcttgaatactctattgtttgtacttttcacaaattgatttcctccaatgatatgctttagttatgctcggatgtataaagatgttcgtgctgctgttgatttgtgccaccgtgacggaactttaaagcagatggtggcaaaagaacctaataggtaaggctggtggtatgttcaccactgtcttttgtaagttggataagcacaactctgccatgcctctctattggaaatgtctattttgcttaagatttttcttaacttgccatatgttcaggtatatcaatgaggataccacgatagtaccccttattaaaatgatcagagattctggacgttctacattcttagtaaccaataggtaatgctgacgatatttctaaaaacttcaaagtgttcccccaaagttagcagatatttcttttgtagctgtgcagatagatataggtaaaaaaaattgaaaatagttatatactcgacaatataacttaagcaacttcaaccattgtaacctgttccctcgcccttgttactgatatatggaactaacgaagatacaaaagcatttgtgaatatcctgttgttgggagacaaatgttcaacattattgatttattctgtttttatataatcaatttttctcatattggtgagagac

SEQ ID NO: 27669 - DNA, 3103 bp, Arabidopsis thaliana landsberg
atacatattcttttcaccattggaatatgtgctggtcaatattaattactgatttacataaaatataatatcgggcatggatccaccatctccaacgtgagcccgatcatgtggtgattaattggtcatttttctatagattcctcagaagatattttatgaaatacatgatcataatattgagttgtatacgacaattgagggggtagctagctcttacgatggaccaatcatctctcaagaaaactatatatataattaaagtaaaccaattaattacgattactaaatactaacaaacaaaaccatatatatagggaacgcgaaaaaaatattagatatatatttgattggtttaactttgaatttttaattataacccaaaaaatactcatagttaatttcttttttggtgatatctgtttactttttactctacttcacgtttttttttttcttttactctacttcacgttaagttagacaaactcttgttccatttttcattttatacaaaataatataattacattactaatatatgtatcgttatgctgctatgttactcaaaatgtaaacaaaaaaaagagactcggactggtctttacgccagatctaaatagggtcaaccatcgtgctatgcactctgctcaatctgttaaaaaatacagtctacatacaccgacaataaggtttgtataatatatattatctcaaaaatcaaaaacaggaaaattgggcaaaatctttgaaattttaattatgtatcgttcctacaagtttttttttttaaatggattcaatatgtaacatgttagtcgagttttaaaaaaacatcatataggtaacagggaaacgatgtaacgataatcggttccacaaattatataagtttcagctaagttaaataaatcattatgccttttcataattactttatttagtttctgattctaaaagcaacttcattaggggtgtgagaaaggatatctaattctcaaaacaaataaaaattggtttttactaaacaagtttaagaaccatctttcacttgggagattttcagaatcattgagtctcttccttattggttctaattttttattaatcaaaaaatattacttttgttttagctaaaattactattatattgtttagatacttaaccaatggatgctcaaaattagatgagtttctcaatttaatttaaactaaacataatattattctagtaattatacttagtgggtatctaaactaataaagatgctctaatatactatatactaaaacaatatcgacttctacaaacattgatcccataattcaactataaataatgtacagtaatttcttgaccaaacagtatagtgtacctctagaatattgctcaagcatctctgcatatataatattactaatcgccatttagtgtcttcgtaagacccaatgtacacccttaattaattatatagcaaacaaaaatacaactcacaggcaacccaaactgtataataacaattcttcaataccacttctttaactttgtctttttaacaactaatcaaattttaattacttatttataaaattacaaaacttaaaactaaattatgtgagtcaattaattcagatatgctaattttcttctccatcataaatttgcctagaatataagataaaatttactatatataatatagaaattgcataaaataattagaaatgaattaattcattagataattgatacttttgttgaaactaaattctataaaaactactatttaaactctatatttagtctctattacaaactctatatttagtcattatgttaaaatattatattacatatacaatatatatagactttatttctttgtttggttgaatcacctaatacaactattaactacaatttatggtctaaatcaatattttcatttacgaatagttatcaaattttgctataaataagtaagtaacacagatgcaacgaccattgaaacacatcaataacaaaagaaaacaaatcctctcaaagaagaagtagtgatgcatatcacaaaaccacacgccgccatgttttccagtcccggaatgggccatgtcctcccggtgatcgagctagctaagcgtctctccgctaaccacggcttccacgtcaccgtcttcgtccttgaaactgacgcagcctccgttcagtccaagctccttaactcaaccggtgttgacatcgtcaaccttccatcgcccgacatttctggcttggtagaccccaacgcccatgtggtgaccaagatcggagtcattatgcgtgaagctgtcccaaccctccgatccaagatcgttgccatgcatcaaaacccaacggctctgatcattgacttgtttggcacagatgcgttatgtcttgcagcggagttaaacatgttgacttatgtctttatcgcttccaacgcgcgttatctcggagtttcaatatattatccaactttggacgaagttatcaaagaagagacacagtgcaacgaaaaccgctcactataccggggtgtgaaccggttagatttgaagatattatggatgcatatctggttccggacgaaccggtgtaccacgatttggttcgtcactgtctggcctacccaaaagcggatggaatcttggtgaatacatgggaagagatggagcccaaatcattaaagtcccttcaagacccgaaacttttgggccgggtcgctcgtgtaccggtttatccggttggtccgttatgcagaccgatacaatcatccacgaccgatcacccggtttttgattggttaaacaaacaaccaaacgagtcggttctctacatttccttcgggagtggtggttctctaacggctcaacagttaaccgaattggcgtgggggctcgaggagagctagcaacggtttatatgggtggttcgaccgcccgttgacggctcgtcttgcagtgattatttctcggctaaaggcggtgtaccaaagacaacacgccagagtatcttacagaagggttcgtgactcgtacttgcgatagaggtttcatgatccatcatgggcacgcaagctga

SEQ ID NO: 27670 - DNA, 4175 bp, Arabidopsis thaliana landsberg
ctcaaatcctccttttctctctctctctatagagtttgagtatttattagaatgtaataatgagagagtaaatacagatactgttcttatctactacatgagtttcattgccctgttcaactccttttgtcagagaagaacaaaaacaataatatgattatgcagaaattgctataagaagaaacctaaactctctcccatttattaaaagagagacgtttgtattggtagatctattcttatttttccttttgggatttttttatttggttcgtaattgtgagattgaaagagagatgaacaatctgagttatcttgaaccagattactctgagtttgttgaagttgatcctactggaagatatggaagagtaatgtttcctcctatcaatcaatcaatctcaattattttgtttgatcttttgttgacttcattgttcttgttgttgcagtacaatgaagttcttggtaaaggagcttcaaagactgtgtgagaatctctcccttcttctcttctttttctgcttcatgtttctctcaaagtttgcagcttttttttcttctggatctggtgatgatttaagcctaatctgttgttctttcttcataaagtttgaaactttttgttttcccagtcaaaacccatttgtgatccaacaaatttgtccttacgatttttgtgtgttttggattcatgattgaatcaaatcctttaaaagaggaaataaaaaagttgagcttttgtttttttttgcttcattgaatcacttctagtttggtcattaattccccacaagagaaatttccaacaactttgctttttttggatctctttattgctttgacttatacgaaattcagattctgcaaacaaaaaaacttctttgctcatacatacattaatcttctttctttcttttgattttgtagttatagagcatttgatgaatatgaaggcatagaagtagcatggaaccaagttaagctatatgatttcctacaaagccctgaggatcttgagaggctttactgtgagattcatcttctcaagactctaaaacataagaacatcatgaaattctacacttcttgggtcgataccgccaatcgaaatatcaatttcgtcactgaattgttcacttctggcaccttaagacagtaagattctcttgtaaacatacttttctgtcgttggttttagtttatctttaacgataacttcatttatggatacagatatagactcagacataagagagtgaacataagagctatgaagcattggtgcagacaaatcttgagaggcttacattatcttcacagccatgatcctcctgtgatccacagggatctcaaatgtgacaacattttttttttcgggaatcaaggagaggtcaagattggagatcttggccttgctgctattttaagaaagtcccatgctgctcactgcgtcggtactatatgcaaatccaaatcatatcctttctgctttttagctgagtttctttgtttctgattgtgtaaagttttgatcttttgttagggactcctgagttcatggcacctgaagtttactaagaagcatataacgaattggttgatatatactcgttcggtatgtgtattttggagatggttacgtttgattacccgtacagtgagtgtactcatcctgctcagatctacaagaaagttatgtccgtgagactcttccgttactaaaaacacttagataaaaaagctttaatctcttttctgttcaaaaggcttaaagttccggtttcagggcaagaaaccggatgcattgtacaaggtaaaagaccccaaggttaaattgtttcattgagaaatgcttggccaccgtatcgcatagagtctctgctcgtgagttactagatgacccttttctccgtataggcgatggtaagtttgatttaagatcagttgatatggaagattcggtcagccactctataggcaggcggcaccatcttcctgactactacaattacccgtcgaatagtagctctttgaatcgtcagtactcaaatggcaactacccgtcgaatagtagctcattgaatcgtcagtactcaaatggttataatagtcatcacgagtatcagaatggatgggcgtataatccagctgagacagaggagactcacggcatcgagctctttgaatctcgaaacaatgatgatcaagaagaagaaaagaaatctggtaatgttgacataaccatcaaagggaagaggagagatgatggtggcttgttcttgcgtcttaggatcgctgacaaagaaggtaacaatattctctttatcttttccttgtttcataacctatgaagaagagtggaaaaaatgcagtttctttcatttgattcatggactggtttgttgcaggacgtgtccgaaacatttacttcccatttgacattgagacggacaccgcattgagcgttgcaacagagatggtagcggaactggatatggacgatcatggagtcacaaaaatagccaacatgattgacggtgagatatcttctcttgtacctagttggagaccgggacctgaattcgaagaatgtcttgcggctgcggcggcggcaaatgctgcgagcatttgcaacaactgcgtatcaaaccgcacctcaatgggctcggtgatggatttcctgagaaccaatcctggggcaaatgtgatacaatgttgcagaaacgggtgcggtgagactcatggtcggtttgaagagatcacgatcagagaaaccgaggttcgtcttagagagctatggaagctgcagcaacagcaagaaagccgcgagctaagctcgatagattcaggccataaccattccgaagaagaggaggaagaagaggtgctatacgaagaccccgaaaacatgttttcttgcgaggcaggtaacgagataaaccatatatcgggttctggatcgttctcgtttatgccatctaaatactgcgatgagccatccgaaaaaaacgaaaatcaggtccaacaagagttgagatggcttaaagccaaatgccaaattgagcttagagatattcaggatgaacaactaaaaacccggtggccggaatccggagaagaggtggaaatttctccgaaagacgggttcttgggttcggtttccgggttaggaagagaagaagatacggtgaaagagatgtttggagaaagattggtaccaaagtgtctgaaaagaacaacttcacttcctgttgatgccattgattcttgattacattgtgtttcttcatgtatacatacatattgtttcctattataaagacttttacagtgtaacaagaacaacacacaagtatacttaagagatcctcttcaaattcttttggggttatttgtacaataatacccttcaatctaataacttcaaaatgcaatacgattataattttttttattactgattacttgaaaattttcgtttctagcaagttgttttaaaatcttttcagcattgacatactatagcaaatgataataattgatgacaagcaataatgatagcaaattattgagcgatgtgaagtcagcaatcagtttcggaataaaacttcggacaataaaattactcaaaagtacatttaataactttaataaagaaaaaccaaaaaaaacaaatgaattagtgtctactatgttcttaaaacactttggataatgcaaagagaaatcgaatgagaaaaataaaaaaggaaaaaagtgacaaaaatagtcaattataagagtaaccccacatcagcacaacgccatgttccattgccgaccaatcaactagaaatttgggttcatccacatgcctttgtatttatttttcatcaaaaatatgagatatatattgtattaaatattaacatggttggtttgtcgttactatgtgattattataggaaatggttggacattttcaatatgacctttttttttcttccatatactagaaaacgattcttcaaatagagacagaaaatattatctcaagctttatgacaaaaatattattatcaacccatcttttgctgaactttgcctatatatatatatatatatatatatcatacaccaaaatggaaaataaaaatatcacacgcatctatatttcttacaatcacgtgtga

SEQ ID NO: 27671 - DNA, 993 bp, Arabidopsis thaliana landsberg
taagttaatttgtcaatgaaatgttaatagtatttcattttatttttgcataaagagagacccgtagcaaggcaaaatttgagttggcgttttttattcataataaagttttttaggcggcaaaaaactattacataatgagattttatcacttattcatctaataatatttaattaaattacatatgtgtttttttctagctatgtcatttatttttacaatttatataaaattttgatatgtttccatgtatatatatattttaatgaatgaaaactcaatccagaaaacataaattttgattttattttaaattatatgtttttatttataatttgttatctcttttataaattaaggtgtttttgcaataatacagtcttaatttaaaaaaattacaattaagccctaaactttgtatatattccaaattaggaaggaaataaagaaaggagacaacttaaggttctcttattaaatgccattccctttctttcttacaagtcacaacctctctctctctctctctctctgcgtctttctctttctctctgtctgaagttgagaacacgaaccactgaaaaacccgcgaaagactcgagcacgaaccaacaatggcggaacccaaaaccaagtatgatcgtcagctaaggtgcactctttctcctcccaactctctttctcttcttcaacttctctgtctctttcatcattcttattaatttcgctcaaattgtgatgattggggataaattcataggatttggggagaattaggtcaatcagctcttgaaaccgcgagcatatgtttgctcaattgtggtccaactggctctgaggctctaaagaatcttgttattggtggaatcggaagtatcaccattgtcgacggatctaaagtagaaattggcgaccttggaaacaatttcatgggtataattctctctttttcatctttcttaagcaatgcgtttcttctattcgctgtatat

SEQ ID NO: 27672 - DNA, 3735 bp, Arabidopsis thaliana landsberg
agtgccatacaggtccggattccaaagctttttattcactcgatttcagaatgccaattgggatccgtatagttatgcgggaagctcctagaggttgccacgtcagcgaatagcgaaatatctgccgaaaaagagccaactacgttccgtcccgactctcgtgcaccacaactgcgtgccgtcttacacttcaggattcgaatacgtgtcgtcttagtctagagttcaaaatactgcactcatgtaaaactcgcacaggctatacaacaacaaacaaacatgcaatgataacactggagaccaaaggtaagaaaaacagaagaatccttaaaccgaaatgtgtaaactttacaacaagtttcttgaaagactctcttaatcatttcaatagagatattacatttgtaaaactctcctttctcctttctcctcaatcaattagctctgaatctgaatatgaatctttgataatcaactttgatggtcttggacctcttggttacaatactaaccggatctaaatctcttctggttagctttcccatcagatttcaaagttccactagattcaccttctgatgaagcatccactgatcttgcaaaagaatgagagagatcaccataaaggctagctactcttctgatattgttgttgagctctttgatcaaccccacgtttcgacccaagttatctggttgtttcgattcatggttctgattgatctcgttgatcaataatcggttttggtccaaaatgtcttgaacatccacaaagctcttctggaaactctgcaacaatttcccatccatattgtgtctgtctccaaatcctgacaacacatctccttccattatcggctattctaacaagatcaaactcttgattgatcctttattcctgtttcaatacaatcatgtcaaaaacatggaaacaaagccaagaaagggattcaatttaacagaaaacgttgactagaaaagtagttacaataacacaatttattctctatgcgttgacctgaccctatcttgattttagagctctaatccttaaagctcacataagattccattagtacagacatttccagtaataatccaatcttaaaacactcaaattcagacaagaacccaacacgattcagctgaatagtcatgaatcgtacaaagtagggaagaggattttgttcttatgaacccaagagggaaagagatctataaagggacaagtaaaagctgttccacaaatagctttaaaacatcacaatagtagtagacacagattcagataagattcgcaatccttaacaatgcaataagacccagaaaccctaagcaaatacacagtacagaattcaaaagagttccgatccagtttccttaccttcggaagtagaaagctccgatgacagataggagatggaaatcgaggatattttctcgggaaacaaacaaagaatccttctttttcaccgattatttatatgattacaaattattggatactgtaaaaaaaaggaatctacttgtcttttgagacagagatatttgagcgaagctaatatgttctaaaaaatgccatttataaaaacgatatatttttctgtatttactctgaatcacgctttttgcagagagagatacggaggttagagaagccagacatctggatcgaacaaacccgacccgcaaaagattcgtgttgtttgtgcctaattcgcataaacagcatgtcgtttcgattggaagtaaaaacggcccgtagtttagaagcgtgaggaatcaatgttttaacttgctgacgtatggccattctcgtcacttactttgtctcaccccctaattaaattacctcgtaattatttcgcagttccttgagatcgatcccgtcaccaagaactcgaatatctctttctcttcgatcgtttcctcttctgatcccgccatcttcgcctaactcccaaatctatataaattattccgacacctctccggcgagaatttccggttaatcggctgactaactaatttatcggcggaagattttccgttgacctaaacctaaccgagtaccttttggatgatgagaaatggattcgattgtatgcacagcactggaggaaatctgttgtcaaggaaatacagggatcccactcgtttctctctggtcaaggctctctcctcctcctctttctccttccgtcaaggctcatgtctggagaaatcttctcgccgtccctcagctccagttcaaggcgaaaaacactgtgtacgaaccatctgatgcttcgattcaacagctggaagaggcactaagactcgatttgaggatcttcgcgaatgagaagctccgaggtaacttcgttggcttgtacgatgctcagtccaataacacgactatttccgctattcagcgtcgcgttctcgagcggcttgctgttgctcggtaagtgcaaattctgtattctcttctagctactcttaagagttcgagctcgtataatattatgttgtatgtgtttgatgcagagccaatggagttgcacaaaatctgcttgctaaagagtttggtatcgaaggtagaaacttcttctatattgtgaagcaccttgagtctcgaggtttagttgttaaacaaccagcgatagtgagaacaaaggaagttgatggtgaaggggattccaaaaccacctcatgcattagcaccaatatgatatatttaagtcgttacgccaagcctttgggttcccagcagagatttgagatttgcaaagaggactctttattggagcaagaggctactcccgccggagatagtttacaatcagaaagtacaaaagaggatacgctcattaaagattttctaccagcaatgcaggcaatttgtgataagcttgaagaaactaatgagaaggttagtaagtgcaaatcatttctttctttttttatcaagctggagcattctttctctatactcatttgttgtagtgcaggttctagtcgtctcggacattaagcaagacctcggttatctgggatcacattcaaggcatagagcttggagaagtgtaagtatatatttcttttttctcttatagagcaagaggaaagagactttcaacactttgccaatttctttttggtagatatatctttgaaaaattaatacgtgtgcattttggatacatcagggttgtcgccggttgacagattctcatgtagtagaggagtttgatgctgtggtgaacaataaggtgaactataatctgcatcacattccatcatgcgaatacatttcaccacatatggtggccaattgcctttatttagcatttctgatctgttttatttggctataaaatatttggattgtcttttctgcaggttgaacgatgcctccgtttgttaaaaagattttcagcaaaagattttaactactctgggaaaaagcaactcctaaaattcggaaggagtattcaaaaaacagaacaaactttggagcttccaatagataatcaaatttatgatatggttgatgctgaaggatctaaaggcttggctgtgatggaggtattcatttgatgggtttgcctttcagtttttggtattaccttgtatttggctgaatttttttgaaaaggcattaaatattatttccaccaggtatgtgaaagacttggaattgacaagaagaagagctactctccttggtatagtatttgtttaaaagtgggg

SEQ ID NO: 27673 - DNA, 1466 bp, Arabidopsis thaliana landsberg
aaagcgcaaccaaagaacaaaaaaaaaaaaagccttaaaccctccgaatctacataacacaacactactctcttctctctctgtccggcgccatattatcctccaaagaaaccataaaccaaatctaatcctctctctctcggtctcctccattacctaaacaaaccctttccaacacatacatatcgagagagagagagagagaccgaagtttccgagtctcgtaaccagatcggatccgaaagttccatactttaaaaagatgcagacaccaaacaacagcggttcaacagattcagtgttaccaccaacatcagccggaacaacaccaccaccaccgttgcagcaatcaacaccaccaccgcagcagcaacaacaacaacagtggcaacaacaacaacaatggatggctgcgatgcaccaataccctgcagctgctatggctatgatgcaacaacaacagatgatgatgtatcctcaccctcaatacgctccttacaatcaagctgcttatcaacagcatcctcagtttcaatacgctgcttatcaacagcagcagcagcaacatcaccagagtcagcagcagccacgcggtggatctggtggtgatgatgtcaagactctttgggttggtgatcttcttcattggatggatgagacttatctccatacctgtttctctcacaccaatgaggtatctctttcttcttaattttttcttattgttgtattgattcttgatttgatgatatttgtaattcagatctttacttgttgttgttgtttcaattatgatgtttttagtgagtggaatcttttgttttttgtgttctgacatggaaagtgattgatgtatcactagtgtatagatccgtgacttttttttggttattggaaaagattcgttactgtgaattcaatgtaaatttggcaagttttgaactttttgatttggtttgagatctaaattgtgtagaagccaaaatgtttgacatttagggtaatggagaactatgttgacctgaaaaaggacatacttttaaagttcatttcataaggcaagtaaagtacattgccacgtttagagaacctttctggttataggaacaaaaagaactccaaacattgtcacaagatctgttctgttttatcataaatttgtgtttttattttcccttttagcttattctttcttgttttgttgttttgtgatgtgtaggtttcttctgtgaaagttatacgcaacaagcaaacttgtcaatctgaaggatatgggtttgttgagtttctttcacgttcagcagctgaggaagctcttcagagctttaacggtgtaacaatgccgaacgcggaacagcctttccgtttaaactgggcatctttcagtactggtgagaaaagagcatcagagaatggtccaaacctatccatatttgttggagatttggctccaaatgtgagtgatg

SEQ ID NO: 27674 - DNA, 987 bp, Arabidopsis thaliana landsberg
tcttcttccccttcaccaacatcgccaccactaacattcccagtttattttgctccaattattgaacctatcacactcccaaccgccactttccaacggctcaactttcctcctccgttgccaccattcacctccgtcgatgatgccaccactccaccactactaccaccaccttcatgatcatctttttgagcttctgtcttcatcacgagagcgtaatgcccttgtcttgtacctttacacacatacggcgagacttgctcgctaaacgttgtgttactgttgcttgtaaaacacgcacacaagactgacgagttcttcttcgtagggttagggctagtgttattagttgccttgttgatcaagaaatcgattaagattgggttttgatcggtacctacaacattaacctcgtaagggttcctggccacaccgtcagggttagcattataagccaacaaaccaagaaccggtgacacgagcttgtaattgtaaccggataagttataaccagtagagtagattgaagaccaattcgaaccaaagttttgtctaattagcatgactctctccggacatggctccaccgtaaggcctgaaccgatgtgaaactctccaatttttgcgccatatcttctcaaactcccacaccttaacttgaccgtgtcaatatcgataccagagaaattagaagggagatagattttctgagtgacgcctgtgttgaaattgagcttaaagtttctaatggtgtaatctctgatcatgagatcaagaagatgtgtagattgaatcaattgagacttagattggtggaatgataagagaagtatcatgatgatgatacaaaaagagaatgaatccataagaggaacaagagaatctagggtttacaagaggaagtgaagataagagccaagacccaaagttttgatggtgtttttacttatgtgaaagatgtgtgttttgggacacaaacattataac

SEQ ID NO: 27675 - DNA, 2321 bp, Arabidopsis thaliana landsberg
ttctcgaaactctcctgatggctttcctctttttgtagtaaaatccgtgaccttatgggagggagacctaccaacttgttcatcactcattcaactactgccttgattacttttttctattacagaactaaaggagcagacatttggcagtgcgtctcatgattcatcaaggcatatttgatcctacatggcttaggaataatggctctacaaaccgctaaagcttttgtgttgtgccacatcattttgtgcaacacaccgctacggagtgcaaggattgtacttgagcgcgatcatggcgtgggagaaaacaggaaacgcgactatacttgatcaaacagttgaagaattgatcttgcaggcacaagagcttgtaccgaacgctacgtgcaaagcaagaacagtgaaaggtttctcaagcagatggagagtgatcatttcaagattagagaagataccgacatgtggatcggatttgtctagccatccttgcttctctaagcacactctatgcaaagagcaacttcaagcagtcttagaaactttgaaagaaaccatcgagctcgcgaatgtttgcgtaagtgagaagcaagaggggaaattgaagatgcagagtgatctagattctctatctgcgaagattgatcttagcttgaaagattgtggattgctaatgaaaacaggtgttcttggagaagttacgaaacctttatcttcttcgactcaagacttggaaacgttcagcgttagagaattgcttgctcggcttcagataggtcacttggagtctaaacgcaaagcgcttgagcagctcgtcgaggtaatgaaagaagacgaaaaggcggttataaccgctctaggccgtaccaacgtcgcgtctttggtgcagcttttgacggctacctcgcctagcgtaagggaaaacgcggtgactgtgatctgctctctagcggaatcaggcggatgcgaaaactggcttatctctgagaacgcattggccttcattgataaggctactagaatcaggaagtattgttgctaaggagaaagcgagttatttcgttgcagagaatgtctatttcatcagagacatcgcgttcaattgttggtcacggcggggttggtccgttgatcgagatttgcaaaacaggggactctgtttctcaatccgcttctgcttgtactttgaagaacatttccgctgtgcctgaagtaagacagaatctagcggaagaaggaatcgtgaaagtgatgattaacatacttaactgcggaatcctattgggatctaaagaatacgcagcggaatgtcttcagaatctcacttcaagcaacgaaactcttcgaagatcggttatatcagagaacggaatacaaactctgctcgcttacttagacggtcctcttcctcaagaatcaggagttgcagcaattaggaatcttgttggctctgtttctgtagagacttacttcaagataatcccaagtttagtccatgttcttaaatcaggttcaatcggagctcagcaagcggctgcgtcaactatttgcaggattgctacctcaaatgagacaaagagaatgatcggtgaatcaggttgtatcccgttgttgataagaatgttggaggcgaaagcgagtggagctagagaggttgctgctcaagctatagcgagtctggttacggttccaaggaattgcagagaagtgaagagagatgagaaaagtgtgacgagtcttgtgatgttgcttgagccgagtccgggtaactcggcaaagaagtatgcggtttcgggtttggcggctttgtgttcgagcagaaagtgtaagaagctgatggtctcacatggagctgttggttatttgaagaagttgtcggagttggaggttcctggttcgaagaagcttcttgaaaggattgagaaagggaaattaaaaagtttctttagtaggaagtagaagaaaatgaagcaacgtggtatatatataatgtacttgatatgtttcataatctgtatgaaacttagccaatgatatcttgtttggtgaccgtatccgtatgtataataatgtattttgtaatgctttcaaatgatcggatgcactaatcatccaaaaatagttcaagcgtatcagactatcagtcttcaggtgtggtcatacaaaaccatcaagaaaattagaaggtaaatgctagtattaacttcaaatatccgtcaaaaccttcccttattttcagtgttctcataatctaagaccttaatgttacaacaacaaaacaaccagaaagaaagaaaagaccagacatcgaccctcaattt

SEQ ID NO: 27676 - DNA, 1290 bp, Arabidopsis thaliana landsberg
  unsure (1)..(1290): unsure at all n locations
ggcagagtataatttgtcattgcctctgtcatcacatatgcacattggtcactcaagtgtgcagtatagccatttgcatcttcttgaatatcccatcatttcgatctatggtggtgacatatgagccactaccccttgagagatcttgcatgattgtcttggctttggctccagtatggagtaagccacgctcgagcaaggaaataagcaatgtcgagaactcatgggtatcctgttgacccccatatccaagctccaacgtcttgacaaaagcatcagaatcaacaaaagacttttggctagcatgcaactgtgcaaaaagccgagcaatctgatccaagactggattctgcttcaagacatgaacctcaacagaaaaaactccttctcggaaagcagtattcatgtacaaacactgaagtatactgttggcataacaagtagcacccaaattagtcagaccagcgggtgtagattcagaatcacgacggtccaaggtcggatctggaccaagagactgaataatctccgacgttttctgccacaaaccagatttccggcttccattaagcggtggaaccaagccacaaaagcagttaggattgtcacgagtgtttacacgacaaccttgacaaactggcttccaaatcatgaaaagttggttaatgtcatcatcagttacatcattagcctcgtgaattttcctgcaaaaagaacacattttttaaacaaaaagatgctagctttgtgaaaagctaatattcaagaaggtgggtttttgtttatcgtaccggagaatctgagaagaagaatcaacagcgtctggtctttgtctcttgtttttgtttcgggtgttaggtctactcattgtgtcaccaccaccagaaatttccccagtaacaatcgaaaaccctagaaataacgaaaacacagcaacattgttaacacaattttgattccgattaacgaaaatatttggaacaagaacaagaaattaacaagaaaaaaaaaacctaatcgaaaatgccaactcaaggagatgaaatcgaatctagggttaaacaattcagcatcgaaacccagatcgagaaaggaacagtgataaaattaccgaagaaattacaacaaaacggagaataaaaaagagagaaagagcgaagaagagagaaagtacctgagagaatntacaaagaaaagctcagcaagtagagagagcttcacaagctcacctttcgtttttttttactcttgcttcttttcttccagcgaaatctttttttttttttcctt

SEQ ID NO: 27677 - DNA, 822 bp, Arabidopsis thaliana landsberg
gaaatctgctccaagtgtggcctctcatctgcttatcgattctccttttgtgaaggtagtttttcttaccgtttctactgtttgattggttttggtatttttttttatggtaacaatcacatagctgtttaccttctaagcttttattctttatataaattccattgaagcatattatcggtttctttaaaaactatatttgttcgtctttcatgatactatcattgcttgaggttgtaatattcactgtatacagcttttatggcctcattgaaatgtgatgttgctcctgagcttgcaatagatgattccctcttgttttgcatgtaactggataatatttaacagtgtcacaagttaccttacctttgaatgtctaataaaatgcaacatcattgtaatcgaaaaggctttggtaacaccatgactcttagatgtaacatcattcttttcttgtacttactgcaggctacttggataacgcaatgcccactggttctgcttgacacaagaatgccatatgggagtttatccgtgggctgtgaggagcgtttggatccagctggtacaggctcattatacaatgaaggagaagcagatattgtggttaatcacgtcatttctttgatatacgcaggtgagccatctattttcagttgaatgaccgggatataacacaaaaaatttaccggagcttgaagaatctaaacttcatgcatattaattgtgttcctgaatataagctcgataccctaataaaaaacttgttggacatgattgtaggtgttagtccaatggctattgctgttcaatccccatatg

SEQ ID NO: 27678 - DNA, 2141 bp, Arabidopsis thaliana landsberg
cctcttgattcgatcctctttgcgtctgcaactcgaacaactaatgctttccatcaactaagaaccctgtaagcaacaataagtaatagtagtcaagatttaatcagtatatatcagactgggtctggagaacagataattaagggtaagctactatagttaatagtatataccattgagatatcttttagcctgtttgactcttcacagttagagaagcacacaaagccgaatcctttacttctgccattctcatgacacatcactttagctgaaactatttgcccatagcatccaaagatttctcgcagtcttgtttcattcattgattcactcaagttcttcacgtacagattggaccatctcatgttaggctttgcaataaagttgtcactgaatttctgtttcagcatctccctcctttcatctttcttgagtgccttaccaacaaacaatttcttcgatcctgcaggttgtcaaaggaatgtttttaaatcaggaactatggtctaatgacaagatactaaataataggttcagacaaagaagttgaattaccaagttgtagtccacagagagattccatagctttcttagcattttctggattgcagaagttaacaaatccgaaacctctagatcttcccataccatccctcataaccacaacactagagacagttccatattgagaaaacagtgtatgtagacaatcatctgtaacagtttcgatcagattcttcacataaacgtttgtagagtcttgatttcctgccatagctgctctttcatccttgttgatgaacttggcaacaaacctaaagtcaaaaatagaccaagtaaataaacaaccatttcatcatcattaccttcagttactaagaatcatgtatgcttacagtttcttgccataaaccatagagccgtggagagcagaacgagcagatacagcagattgctctgtatcaaactgaacaaagccaaaacctttactttggccattctcttcaacgactttgcaagaaagtatggaaccaaaggggcaaaacattcgctctaagcaactgctagtaatcgagctattcagattctttacgtatagatttgcaaaaccagtacgagtacgacgacggtacgcaagatccctctgagaccacattattcgcatagcctttcccttcaaatcactatggtttaagcgagtcatagcattcgatgctaatccacagaatcaacaataaagaaacaaagatctgtcagaattagtgacctaaatcggttaatcgcaagacaatcttagagaaaaacaacgaaatttccagggttttaacaagaattgaaagagtccaaaatcaaaaaccgtaaacgttgaaaccaaaatcggagactggaaacgaagaaagagtaaaaaagtcgaaagtcttgtttaccgctgaaaggtgaatcgaagttgatgtaagcgtaatttatggattttccggtgacagagttacggcaaagatgaacggacactaccggaacattcaaagagaacttatcaatgagatctttctccgtcacgtctgggctaagatcaccgacgtaaagcgaaccaaaccttgaagaatgctggtggtttcctaacgcctgcgtttccgttttcacgagcgccattgttgttctctcacaaatccttatctctctctcgttctgtagaaatgtagaatcaatgagaaagaacaatttctttttccgaaaaactctgcagagaaaaaagagtaaatggagaagacgagagaaagcagagaggtcttattttgtcttggagtgtgtatatatagatgtatgtatcgttctgttataaccgtaatcatagcgcgcacagagacggcggtacgatatttcgtacggaactccacgcgccgcgagtatggcttagtggttaaactcgcgttaatttgctcatacccgaaattttaaaattatccaaatatggaagtgagcccattccaaataattttgggcttatttgagttttagattaataaggctagtattctatttttgggtttgtttagtatgtagtttttataaggcccatcatgtaattgcataggttatgctgtattttgattttgcatttaccatgtcaatgccaactc

SEQ ID NO: 27679 - DNA, 1710 bp, Arabidopsis thaliana landsberg
ttcatgagagtaaatcagtaaataaatacaaatgttcttctaatctacacaatattactctaattatagactctaattactcttatcacccgccgcaatggtggtcccaaagagtcacgcgcactctagcagctaaatgtctcacgcgcactctagcagctacaaacttcgaatgtttgtaacaaacttatctagggtttgtaccagaagagctgggagatttcaattgggaaatgctgaaactagggtttcggttagcgattggcattcaacatcatcgcctcttccgtattccatggttagtttataattttagttcaattcgtaatacaaaatcgccgaaatcaaactaaaatcccataaatctgtttttttttcttcttcgttgaaatcttcattgtattgtcacatttgaattttacatatgcttcaaagttttatctctttgagagaatttaattatttggctgttgaggaagttctaagtggctatcttcttcacttttgttactgattgttttgtatttgttatgtgatcttctactttcatggtgattgttttaatcctaagagtttcacttctgacattgtgtagggcgaagagacactctgtacctagaatcttgtgatctgagtagcgggattactgttcatcaggtctgacaaagtatgttcctaagaagtctcgacggattactgaagatttgacatctcagcaatttgatgttactagagtggatcatagtgtgttgggatttcaagttaagggtaacagcaaagaggctagagatggctcatttttggatctgcaagaggaaaatgatactggaagttacacgaatgtgtcttgtgatgactctgatgaaggttttatgagtttggacaagggtatatatgctagtagattggatcatagtgtattggggtctaaagtgaaggctaacatcaaagagactggagaggatactgattttcatctgcgggataaaaatgatgctgatatgtactctgatgtttcttgtgatgactctaatgatgaaagcagcaacgaagttagatctacaggctataagtcgacgagacaacacaaacaagcttatgataaaatcaaactacatttggaagctgaacaggccaagagtagcaaagaagcctgcaaaaccacgcaagatgcagagcacatggctattcgctatctcggtttaaggtttgcttgcaactttgagtttttgtagcttctgttataatgttgcagaatggtttagttgtttcatcttcactcttctctgtgtgtatgatttcatatcatcttattctgctcggcattgctccagagcatattcagcagctgacctgaagaagaagctcataggaaagaaatatcctattgaagtcgttgacaaagtgatcgatgatttccagattcggtaaggttcctcttgatttcttttcaatcaagatccatggcatcatgtgtttgtattccttgatgcatcaggcagggtctaagttacttttattgtaacattatccgctttaccactgatataaaaaccgagtaagaaaatgtctcactttcaactttttgttcgtgtgtttcaaaagttttgtcaatgatagcttgtacgcagagtcattcactcgatctagatgggcttccttaagatggggaccaaggcggatcaaacaagttaaaattgccattcacat

SEQ ID NO: 27680 - DNA, 3914 bp, Arabidopsis thaliana landsberg
tgggggagacgtgatggccaccagagggaaaaagcagtgatcgcagctctgcctatgacttcaagtagactatgattcgtatagccgtatccgccagagcggctctcaacgtgagatatcctctgccagaaccactcacgatacaagaggcggtgcggtacttattactacactgcggaaaacgtgtggggcctctgctctgcattgctgcttgtgagctcgagggtggcgaccaggctactgtgatgtccggcggttgcgcacacgagatgatccacacgagctcgctaattcatgacgacctcccgtgcatggacgatgccgacctccgtataggctagcacaccaaccataaaggatgttgttaaatcatatggagactaattgctcacgagatttgaatcatttattgatgttagtatttgctcactagtgaagaactattttttggtcaaacaaggaatttggagaagacatggcggttttggcgggtgatgcactccttgctttagcgtttgagcacatgacgtttgtgtcaagtgggttggttgcccctgagaggatgatccgtgctgtaattgagctggcaaaggccatagggacaaaagggctagtggctgggcaagtgactgacttatgtagccaaggattgaatccagacgacgtcggattggagcgtctagagttcatccacctccacaaaacggccgccttgttggaggcagcggcggttttaggagccataatgggaggtggaacagaggaagagatcgaaaagctaagaaagtatgctaggtgtattggactactgtttcaggtggttgatgacattctcgacgtaacaaaatctactgaggaattgggaaagactgcaggaaaagacgtaatggctggaaagctgacgtatccaaggctgataggtttggagagatcaaaggaagttgcagagaaactgaggagagaagcagaggaacaacttctagggtttgatccaagtaaggcggcgcctctggtggctcttgctagctacatcgcttgcagacacaactgaatggactgatcatatcctcaatgcatcaatctcctaacaagtccttttacttagatctatggtcttgtttcttataaatcatcaatgctgtgtgatcatctctctcatgtgttttcaagttgtattatgtttttgaatcttaataatgtaatgttggaaaaatatcaatacggtttgctcataggaactaaatcttagcgtaaggattcggacaaatcagaactaaaatgtgagcgcaggttatctttatttaaaaccagagtttgaaagatctcctactatagtaaacaatgtacttcaaccaaaaacagagaatatagatttgtattttttggttactgaagcttcgcaagaacgaatttcggaacccaaaaagccagctcatgttgaaagtgtgcctcagccttcgtatgtaccggaccaaaaccacagttgacccgatgtggttcttgttgcagagcagaccttgatactcacaaacactgctttgtcgtaacttggaaagaatttaatgcaattatgagatagagatagagattgaacattgattgcttggattctcaatcaattcaatcatattaaatgattgtctaacattctcaacataattcaatcatattaaatatgattgtctaacattctcaactaattcaatcatatgtgcgcctgtgaatgcttttaatgttcactcacatatgtgtccagcccaaacaaaataaaacagagtagtttgcaatggaaatcaaacattagaaacagagtacacctctaaatatcaatatcatatgtatgttttcggcaatagcaatgtggaagcaagcaacaattgcgagttttttgcacatgggaagtaaattaacatgatagcttggattccaagccatttaaccaaattcaatgaacatctgacatttctctccctatgtttcacaaatgtgtccaatcaaacagagtaatttgaaatagacatcaaacattaagaacagagtttctctaaatattacttcttctctaaacagagttaagagtaacaacatggacgcaacaagaacgttttttggtcttcctaacgttcacaacgttcctctctgtctcacgtccaacctctctctctttcctcagcgtttgcttcaaaagcacactcttcccctgaaaccggtaaagagacaccacttggtatgtgtaaggtctacaaagagtagtgatgatcttgagggtagtcgtccttcaacgtacttttctccctctctttggggagatcactttctctctgtttccctcgaccgcggtgtaagtgcattcatatgaacttcttttctttctcgaatcttgtagcagaaaacatgtttcttgaccagccaattttgtcttcaatttctaggaatttgatgaactagaaagagagattgaaactatgaagccactggtgaaagacatgctcatgtcttctcaaagcagcgacaaggagaagattcgtctcatccatttgctcgttagcctcgggagctcttatcattttgataaggagattcaagatatccttaaacacagtttcacaaagttggatgacataatagttggggaagatgatttggaaacaatctccatcatgtttgaggtctttagactatacggtcacaagatgtcttgtggtaagaatatcattttccttgattcgcatgcatggatgcatgcagcatattcataaaaggacatatgtatttaattacttaacagtatataatttggctatacggttttattgtagatgcctttgatagattcagaggtaatgatgggaggttcaaggagagtctagtcagagattttagaggaatgctacagttgttcgaagttgcgcatctcggaacaccctgtgaagttataatggacgaagcactgagtttcacgcggaatcacttggagtctttgacaagtggtaacgcatccactgctagtccccatctcttgaagcatatacaaaactcattatacatacctcgatactgtaacatagaagtactagtggcaagagaatatatatcttactacgaacaagaagaaggtcacgaccagatcctgctcaagtttgcgaagcttaacttcaacttttgccagtttcattacgtccaagaactcaaaacgctcaccaagtgacatactcatattcaatctagttgatgacactggtctctgtttcaattaatattctcaattcattttttatttttttatggttgcagatggtggagggacttagatcttgcatctaaactaccttacattagggatagacttgtagagagccatctcgtggctctgggaccgtacttcgagccacactattctcttggaaggatcatagtggctaaaatcaacatgatcatggttgttgtggatgatacatatgacgcatatgcaacccttcccgaagttaaagctcttacggaatgtttgcagaggtactcagcgcgctctccctctctctttctctatactcagctcatcactcactcactcgtgggaagaaaaatttggtatgaccaggtggagtattgaggtcagtgataaactaccagactatttacgaatcgtcctcggaagtttgtttgatgtcatgggagagattgaacgagaaatgagaccattaggaagattgtaccgtgtgaaacaagtggtagagaaggtaatctagccaaacaaacaaaatttggaaccagtatgtatgtatatataatgttagtgatgaagcggaagctcatagttagtggattttaattagttcttccatacacagatcaagatcattacaaaagcgtacctagagatagcaaagtgggcacggacgggtcatgtatcaacc

SEQ ID NO: 27681 - DNA, 865 bp, Arabidopsis thaliana landsberg
  unsure (1)..(865): unsure at all n locations
atgatacccacataatctctcaacgttagactaaaaacaccaaaatggggatggagagtagaacctgtgcctctcgcggcatctctttctgctcaatcctattccactctctctggacaactattatcggaatcctcttcttccgtctcgcaaccaccaatggccacaagtccggttccatccacttctttgccatttgcggaacagtactcattaccttaccttggatcatccaacttctcatctccacgaccgtaatacttctgcacaagaccaaaggttacaacttcatgtggattgttcagtcaccaaaatccaaagagaatcatcatcacacgattgtcgcaacaactactaccactgcttcttcttgttcatctcctctttcgtctctccaggttctgaagaaaggtgatgtagatgagtacgagattaggattgtgattggtgctgatggtcctaaaagtccaaaggatggatcttctgcaaagcctttggagatgctcaaggagattgaacaaggaagaaataacaccaaacttctcacnnnnnnnnnnnnnnnnnnnnnnnnnnnnnnnnnnctgttctatgttcggtttttttggggttggggttttttcaattccggcgggattgaatctggaagggctacaaatttttctttgaccgttccattagctaaaaatgaagttgattgcagtcacacataaccctttatattgtttcaatcacagattcacattatattgtttcaatacagacgttactcaaccaatatacacagatgatgtttctgtctggagataacatttactctgttttaaattaaaccatagtacattgtggaactaagttcttaaatttt

SEQ ID NO: 27682 - DNA, 986 bp, Arabidopsis thaliana landsberg
aaaccccccaaggggtttttttcttttcgggctccgttttttcattttcatttatcagatacctgtcgcctggcaatggtcaagtcggcggagcaggcaaagtaatcattttttgctggattcttttacattttatattaaattaatagatattaatattttgtccacagcttaaaacatttttatataatagtagaagatcattcattaaatcccactatacatataaggcaaacacattttaatggcagcgacgccgattgcatatcatacatcattgtcgagaagatcaccgatggcatagttagcgataaacattaaccagggctgagaaatgttgtggcggcgtagctagcgataacaatgaaattctcgaggctgatgctacccccatatatttcattaactactgaggctatgagtacgccgcccggtggatagataaagcatgagttagtcggaagatttactttaatgtcgcacttacttggattatcaaaactcgtgttggcgggattgaacacaagggtaaatacaccaacctgattggtcactgcttgagcgagggttgagtttgagcctggacattcaatatagactgtggcattggagacaggtggtgcgcttggatctccgtcaaggctacaatacacgacaccacgaatgctgactcggtcgattgtgtaggaccagagtttaaaggcgtgggatatgtagaagagtgaagccatgagaagtatggagaggaggaaaacattagatttttccatattttttttatttttttggttatcagctgttttgatttcgttttaaagatgttttaactgaacgtgttgtgtggcaaataaagcgtaaggggagtagtatttatatgagtatatgtatgagatatttgatttgctaattggataaatcatggactggcaaaattaattccaaaattcgatgatagttgtgtttgcttgccaaaatccttttaggaa

SEQ ID NO: 27683 - DNA, 785 bp, Arabidopsis thaliana landsberg
tgtaagcaaacaattgatctgactatttattgcattaattggtatggtcacgttaatatatcttattacattgcgattgacgttaacgtatgatgttactgctaacaagaattcaaatcaaatttacaagagaaaggttcaattcaagccaccatttttgcttttctttttttcgcttcacaaaaagttggattagtgaagcatactacaacactctctttagggatcggacccctctatgcactgttatgtcggctagtgtccgcacaccctacgcagtattatttattgatacttacatatagaatattttttgccaacatttttagtaccttggaatatagtatataccgttgctcaaatagtttcactaataatttggttaaaaacagacgatatttgatacaatgtactttctctgtttcatttaactcttatattcacattgtttttctctttcaaaataagtgatgtatgcaaaattacctcattgtcccaatttatccttattgtttttcatactatatctgtattttttaaaaactttttttttgaagaaactatttgtaattattgcattgcttgtaacatagagataattatttgttttgcatgttttcctaataattgtgcatttatccaaaatatatttattttggaaaagtagagtaatattctctccgtttaacaaaaaaaaaaatagacttatttaaacgtaagaatgataaagaaaaatagtttttatttccatttcaagcgtataaggttatagcaaaatgaaacag

SEQ ID NO: 27684 - DNA, 1135 bp, Arabidopsis thaliana landsberg
ctctagtatctttgcctaatcacatcaaccaaaccaaaagaacaataataagcgaatacttgtaaaactgtacgtaaacacaaaaagaaatatattatatatgaataaagaaaaagaggatctcgagttgtcactcaattttgtctctttatgtgtgtacacacctgtagaacaaagagggaggcccaagcgagtgttgcaaagattaggaggatggagcctttgaggaattccttatcacttgatgagttcttagacgacgtcgtattagcatgtgaagagtcttgaatatgcatatatttggtccaaaatagctcaacgatgggtcctttgtaaattgtcattagcatcgctcccgccactgtcactaccgttccggctattttcgcctgacaccacagtttcttcaggtccaacatctccatcctattatcaaaattaatagaagaatttattaccatttaaaaccatttgtaacgtttagaaaacaataatcgtattttagttgaaagccacataatttagatttgcacatttatttacgtaccggaatagtacagccaagataaaggtcatggccggaagcatgttactcatggcgcatgagaacgttggggacgtatatttcagccccatgtagtagaagttttgatcgatcactggcctgtaaatttgtttatagaaagaaaaaaatgttaactctctttctaatttgcttttgcaaagacaaggtagtcaaatagagacagtgattaagtaacaacccaagaaggccgagaatgaatagttgcatgaaaatggagaacgttattttcggctgagccttcctgtaaaacggaatatacgtagttagaatccattaacaatctatcgattattggcgaataaaattcaaagaatgtaatgaaaataattaaatggatataacctttcgaagaagagagcaaagggtgcaataacggcagtggcaattgcatggcggtagacgacaaggacatagtggctcataccggtgttgagggatattttggtaattatattcataccggcggagccaaactggagagatatatggcgaagtatggttagagcttgtgagaagctctccagctctaatctctccatcgacatatgt

SEQ ID NO: 27685 - DNA, 1632 bp, Arabidopsis thaliana landsberg
  unsure (1)..(1632): unsure at all n locations
tattatttgaagttactcaaatggtactacttttgactacttttttatatacctaaagtttagggtatgcttgggtttgttataagttttgtaaatcaatacatacaatatattattttaatttaggaaaattttctaactgctcatcaaaccatgcatgacacatgaatacatatcaggctctcaagagagtggaaactatattaagcaaaattggacggagaaaccttcttgttgtttgatcatgccattgccatacatgcttatttcggtgaatgttatgtgtcaaataagctaacttgtcataccatgaatatcagtgttatgttccatctgtcaaaagcactatgcagccgatggcctcagctattcgacaatggggtctacgaacatgtattctctatgaataccaattcagttcatatatatctagtaaaagaggatgagttggtggacttaagtnccactctcacacccacacacacacatctatgatacttaaaagatctaaacctgatcatattaaaggttctctctctctctctattatgttcacctctatatgcaaagtcattgtgcaaattgtagtaagtgcctcttaaaaaaactcttttttgttccaacaaaactaatccttaattctagctatctactaagcgcactaaaaagcagtttaatcctgaccctttctaaaattttaccatatttttctccccaaaagttttagctacagtatatgaccatatgcatgatgagtgttggagagtctacaagactaatcctcatttctcctttcaaaaatatcttcacttactactgtttccagtccacactcgcatcccccttcaatcaaaatgcatactattcttgagagctttttctgttctcagcaagaaaggttactcaatgtgctcctcttccaaagaataagtcacagtaacgcaccaatcctgctagcccgtggagagagagttatttacacccattggccaaattgttccccttttatccactaagatccatcaaacctgatgtttagcaataacactaagtcaaaaactcagtgagattattgtgtgaaaacataacaataacgttcaagattcaaattaggcatgatgcatattgaaccgaaaccctaaactagaaaattgacatgtgtaaggcgtagatcacgtgataaataatgattactctatggttagagcttttacccaattcctgagtgtttccgtatctcgtaaaagtgtatagtgctaggtgattgtggtgtatattttatgtgtaagatcttggtatttgcgatgagtttggctgttgtgaattaaaaaatatatggaatgtgattagaatttccctgagttcttaatgtaagagatataaaagaacccttctcttttatatctcttacacttgatgcgtttccatgtacattagcaaaatgtttcgtggtgcgaacgagcattgttttaataactacatctactgtcataatctcatttttctttagatcaaataaaccacagatatagaataagcaaatgatgtcttagaaataagagataacacaagagctttgctaagaaacagagtactccggagctttgtcaagaaatgacttggagatgtcct

SEQ ID NO: 27686 - DNA, 1311 bp, Arabidopsis thaliana landsberg
atagacactaagacacagatccaatcagttgtatcttaatctatacacagatagcacccagtatttgagtttactttaaaagcatatagttacatgttgttatcaatttttataaactaaaatgaaacagaacttcttgctttaaaaatttgaagcagaaaaactgaaaatatactactgtttgacagaaaaaaaagaactaataaattgaaaaaacccaacaacaaaaagcccatgtgtacttatctcatttatgtttattattggactaataaatatacaaagcacaaaatgttattaacaaaaaatatccagaggataagttcaattttattttcctagtttgaatagtttgaaaatttaagtctgcatatcatttttggacccgaatcatgacatattttatttaattagataaatatattttctccattcagagctcatatcatatgttaaaatctatgatcagttacattcatcttactacgcttagatatgtataaaggatttggcaatgcagcttattataaacttccctaggactaatatgcctcaaacattgtcaaatagccgcagtgccccctaacacaacatattctataatacattgtataacaaaagtattttcttattcccaacctgatataccaacaggatctaacctatagatcattacaatatattatgtttttaaatggacctttcgatacaccaatgtcgactatattttattcccaacattacacacatatattaatactttccactgaaagtatctagaaataatattgcctttggccctttgtaatgtttgggatgacaataaaacaagtaatgtattttacttttggtaccatgtaggatgtttgtccccatgattcatgaagtcacgaatgtttatctttttttattgatcctacgtgggaaaagtgataaaaccggtcaagaaatttgcctttgtgatgtagaaaaagtgctgatagtagtattattctaagtttgagaaagggtggttattgaagtaaaccgacccttgcctcttcccaagagcccacctcctgtctacgtggcttgttgatcctcatccactctcaagccctcttgtctatccacttgtcattctctcatttatccatttctgccactggcctttgttaattgtggtttaagaatgcctgaacatcataggatgttgaagaacttatcgaagaatgaaataaatttcgccgcatatattacacgtggcaaatctggtagtctaggccaatatggcagtcaagcttaaccattaaaatcatgacacgtgtcaaa

SEQ ID NO: 27687 - DNA, 641 bp, Arabidopsis thaliana landsberg
atgtggtatgcaattataaataatagtatagatattccgtttatttaattactaataacgaaatgtaagagtattggatgatatatcaaaacttacatctcatggatctcgttagactcgggaatatcaggatctggaaagacggttgatatcgggcctgcggtgcaaacacgtatgttctttggaccatcaaaataacggtcaatcttccaccaaccaagaacagcgacaataactccaccaccatatcgacgataattatgatcaaagtcaagagcttgcttcttagtagctagacattccaaaacacggtttctaaacataaaatcaaaaatattatgagaatagtataatttagataattcgaattaaactatcaaagaaggaaacttactcattgtcacttattttgaatgttagcgtcaaatcatcgacgttgttttgcttaggtcttgtgttaatcaattctccaacatcatagatcgctcccaccaagtctcgaaaaatatacatagattaattaacataaatcagagtcatatatataaaattgatattgaaaatgacaaaactaatgaacactaagacgcacgacacaaaacaaggaaccacacaaacgcataaaaacctcaccgactaaa

SEQ ID NO: 27688 - DNA, 952 bp, Arabidopsis thaliana landsberg
tccttcaccttaatctctcatcctttcttcatcggtcaacattttctcaaactctctctaatccataaaaatggaagcagtaacggcgattaagccacttatcagagtcgctgctctctctggttctctccggaaaacctccttccatactggtctcctccgcgctggtataattccttcttgctcaattctcgtcaattttcgaagttccgttttgataaagtttttttgttggcagcgattgatttgacgaaagaatcggttccgggattgcaaattgagtatatagatatatcaccgttaccgttaattaacacggatcttgaagtcaacggtacttatcctccagttgttgaagctttccgacagaagattcttgaagctgatagtatcttgtttgcttctcctgagtataacttctctgtttcaggtttgtgtaataaagattcttcttattgcaaagttctttagtgagtttcacttttattgtttggtcttaagaggtttcttgatttgctacaagaacatatgtcttaagatgtctgaggattatgattttggtttatcaagtatcattagttggatttgatgatcattatcaaaaccaagctgattataaccattgattttgtggagagctgtgacagttcttatgttaattcaaatttcttatcgattttatggacaccattgattagggttatttagtatgactcatgggaccagaccagcttaaggctcaaactgaaacactctcacatgttctgttgctcggattttatgctttttgactgtctgatggctcttgaaacttggatttgcggcaagttttgtatacttttgcttaatgttggaaaacaagaatgtgttggtggatgaccttactcgttattgtaccagctccacttaagaatgctattgactgggcttcaagaccacctaatgtttgggc

SEQ ID NO: 27689 - DNA, 1636 bp, Arabidopsis thaliana landsberg
atggtggagaatatgcctggacctaatttagatgatagagaggttaggaatggttatgagaatcagagtagtcattttcagtttaatgaagaggatgatgaagaagaagaggaagaggaaagatctgggatatatcggaagaagtctggttctggtaaagtagttgaggagatggagcctaagacgccggagaaagttgaagaagaagaggaggaagatgaggaagaggatgaggaagaggaagaggaggaggaagaagaagtggtggtggaggtaaagaagaagaagaaagggaaagctaagattgagcattcgagtactgctccaccggagtttcggcgtgcggttgctaagactagtgctgctgcatcatcaagtgtgaatttgatgaagattcttgatgagattgatgatagattccttaaggcttcagaatgtgctcaagaggtttctaagatgcttgaagctacaaggttacattaccactcgaattttgcagataaccgaggtattgaaactcttgtgattgaagcatttgtgtgtgtgttttcttgctatttggtgaatcttattggtgtggtctagtctatgatcaaagtatttatgtgtgtttttcttgcaatgtggtgaatcttattgagtgtcactgtcaagacacgaatttgatgtgccctagccaatcatcaaattcaaagcttattctattgtagtttgtctttgcttttctcagagttgtcttaccaaaacttaggttgctgctttttaaagtgattcataatgtgtctgtgattggattgtttagaaagtttgagtctttgtttctcttattgaaacaagcaaaaaaaagaaaaccagaagagacagttttttcttttgtagattacatcagggtttagtgtatgcaaatattcttaaagtatgagtctttgatgcactttttggtctgtgatttaacttttatgagaatctaagatgaaccttaaacttaatagatttggtggttttcttatttgccctttttccgtttaaagccattaaaaaaagttcttgatttgactaactaacactttaacctctttttacttgctattccctaccattatcttacctaatctgtttctattgattatgttgaatgtttcttggacaattgttgctttcttgctaatgaaattttttgcttcgcaggatatgttgatcattcagctagagtaatgctttttatattttggaataaatcgttaagaggcgtttcgggtggagaaggtggaaaagatgatcaagaatcagatgagcatgaaactcatgctacggagttggataaattgttagcatgggagaagaaactctatgatgaagtgaaggtacttttaacttttaagctgatcattgctatcagaagtgaatgatgtctagttgagtgcattgttgtggtggtgtagcatggtgagcttatgaagatagagtatcagaagaaggtatctttactcaacaggcataagaaacgaggtgcgagtgcagagaccgtggagaaaacaaaggcggctgtaagtcatctacacacaagatatattgttgacatgcaatccatggattcaacgggttctgaagtaaaccgtttaatggatgatcaatt

SEQ ID NO: 27690 - DNA, 785 bp, Arabidopsis thaliana landsberg
  unsure (1)..(785): unsure at all n locations
ttctagaatgcatatcgggttctaaaaatgctacaaacccgaccaaatcatgaaattctttttgagctcaacgttctgtcttcaaccaccaggtgactcatacacacgtcgctccacttttgactccatcttagcaggttgtataccagttttctttcatccgggatcagcttatgcgcaatacatttggcatttaccgaaagatattgcgaaatactctgtttttattccggagaaaaatgtgaaagaaggtaaagtgagtatagagaatgttttgagtagaataccgaggacaaaagttttcgctatgagagaacaagtgataagactgataccgaggttaatgtattttcacccgtcgagtaagagtgaagacacgggaagnnnnnnnnnnnnnnnnnnnnnnnnnnnngaaggagttttggaaagagtggaggggttaaggaagaggatagaggaaggcaaggaggagatttttgattttccggagcagtattcttggaaatataatgtgtttgggaatgttgagaggcatgagtgggatccttacttcgatcggccttaattgtttgtgtgttttttttttttttattgggagacaagtgaatgtagttgtgattgtcatcgtagaaagaagtcacgaggccttattttcttaaattggttttgtttgagatttaaaggttttgtaagttagaaaaccaaattttcatcaaaaatgtacaaaactaacacggtggaaaaattgtaactatattgtttatttttcacatggtcgtaaatat

SEQ ID NO: 27691 - DNA, 1206 bp, Arabidopsis thaliana landsberg
tctgtatatttagtagcttatggatacggaggccaccagccaacgctggctactttcggtgcagaccagcttgatgatgacaaaaactccaaagctgcgtttttcagctacttctactttgctctcaacgtgggagctctcttttcaaacacaatccttgtttattttgaggataaagggttgtggactgaaggtttcttggtgtcactaggctccgctattgtcgcattggtggcttttttggccccaacaagacaatatcgttatgtcaagccgtgtggtaacccgttgcctcgtgtggcgcaagtatttgtggccactgctcgtaagtggagtgttgttcgaccaggagatccgcatgagttgtacgaacttgaaggtcctgaatccgccattaaaggaagtcgaaagatatttcatagtaccaaatttctcttcttggatagagcagcagtgattacagagaatgataggtaaaccatatataaacaacattatattattcgttttcattttgttatcatgcaagttttattccaaatatatacttcatatagttgtcatcttttaacttatgaaatttcggtatgactgtatccaggaatgggacaaggagcaatgcatggaggttgtgcagtgtaactcaagtagaggaggcaaaatgtgtgatgaagttgcttccaatatggctatgcactataatctactcagtgatcttcacacaaatggcgtcattgtttgtggagcaaggtgatgtgatgaatgcatacgtagggaaattccacatccccgcagcgagcatgtcggtcttcgacatattcagcgtctttgtatcaacaggaatctaccgccacatcatatttccatacgtgagacccacggaacttatgcggatggggatagggctgatcatagggataatggcaatggtagctgcaggattaacagagatccaacggctgaaacgagtagtcccggggcaaaaggagagtgagctcaccattttatggcaaattccacagtacgtgcttgtgggagcaagtgaggtgttcatgtacgttggacagttagagttcttcaacggacaagcaccagacgggttaaagaacttaggaagctcgttgtgtatggcttcgatggctttaggtaactacgtgagcagtttgatggttaatattgttatggccataaccaaaagaggtgaga

SEQ ID NO: 27692 - DNA, 1438 bp, Arabidopsis thaliana landsberg
ctttttgttctgttcttgtttcttttggcaaaatgcagattttacttttatgcaagctctgttccaagagtttctggatgggggagcacttggtggtcacatgaagtctcacttggtctcatctcagtcttcagctcggaagaaactaggtgactcggtctattcttcttcttcctcttcctccgatggtaaagcgctcgcctacgggttacgagagaacccgaggaagagtttccgggtctttaatccggatcctgagtcatccaccgtttacaacagtgagacagagaccgaacctgaatccggagacccggttaagaaacgggtcagaggagatgtttcaaagaagaagaagaagaaggcaaagagtaagagagtgtttgagaactcgaagaagcaaaagacagttcacgagtcaccagaaccagcgagttctgtctctgatggttctcctgaacaagatttagctatgtgcttgatgatgctgtcaagagattcaagggagctcgagattaaactgaaaaaaccggaggaagagaggaagccggaaaaaagacatttccctgagctccgtcgctgtatgatagatctgaatcttcctccgccgcaagaagctgaagctgtcaccgtcgtttcagccatataaaggtttcagagtctagagtaacatcaaaaaaaatcaaagaatcttgatgatttggtttgtcttcaagattattattctttattagagaaaaccgtttattggttttggaatctttgggatcatattatcaaaacaatgtacttttgatgtaagacaacaacaacaaaaaccaaagaaaccaaaggaactagctctgtttctagttttcttaacaatttgagctttcttgattataaattgttggatctttgttatgtcgttttgatatttggaattcttgagatgattcttttgcatgatctttggatcttggatctttgattttagtaatgtgtttttaatggaactatttaatttcaactacatttttttatgacacaactcacacaagtgtgtgctatatgtaaattgtaaatattattctatcacaagtcacaactagaatctatagacactgtggtgatacataaaaccatccaaaatatgattagatcataaacattcaaaaatatctcgataagtgaaatatctaaactcaaaaatgctgagatatttctccaaaaatgcaatgaatactattcgttgaatagtgttgtaattctcttcttgaacctctgacaaactagctacgaataattatatgaatcagagatcgtatatcataaattttttgatatatcggtttatatctaccttatggagtactactttttcttaaaacaataaaaagacaattacttattgacaaaaataagagaggatagttacttaattggtagtttaattctattt

SEQ ID NO: 27693 - DNA, 1289 bp, Arabidopsis thaliana landsberg
tgacttttttgagcagcaagtgcttttaagttgttcccagtacctagcaacaacaagctcctcataagctgcttttgttctttggggctgctagttttggctgtagcttcttcaaaagcatgcaagtcgttgggagtgagacacgggagcgaaacaaaacctgctagcatcaaatcaacaagatcaaaaaaaccaaggcaaaattcatttacaacaggtaaaaggactcaaccatgaatgcttctgattgaaactcacctggcgaggagctgggtctctgtcagagagatagataaatatttcacggcatatattaactaaatcagggctgttaatggcattggactccatgcccaagccacgaatgactgccgagaacatatcttttgaaacaaattctcggagctccacgttatttgttagtttagctagaagaacaacaacaccacaaaagtaacagactttggtggtcgcttctccatctgtccaggtaaaagtttctaaacagatctgcagtgctggtagagctacgcttttgtgattcaagaggaaactgcaatccaatttgttttttcccattattatctattttatccaaacaacttttaatctgaaatatagatgtagtatacttaccccaccatagagttggatctgaacgcatgcaaatccgtgagagtggacatgtccacacgaccaacatgtcctgaatgttccaaaactggaactcctgtgtttagtccaggagaagccattgttgaaaagagagtcgcaatctcccgagttagatctcttaacagtttttcctccatcacttcaagtttcatgtctgatccactttgtatgccaaacaagtccggaacctttgctctgccctcttgtagaagacctggccaggcggagctgagagcttgttgacagtgtataaacaatgggtgcagaagcactcccagccatgactcccacatatccgccggacaagatttgactatataagttataaaggtatgaataaacagccgaatgtgcctgaattccatcgactgcaaattttccatgagtgccattgcaacatagttagcatctaagcatttaaagaatgtctctccgatggttgttgataggcccaacacgttgtatctaaacatgtaaacaaacacttatgagtttagataaatgagagaaaaatcaaatgatcaatgcaaggcttgctcaaaggaggatacaacaaacttacccacaatctcggatacctttcaaccaatttcgtatatcagattcacttgcct

SEQ ID NO: 27694 - DNA, 5748 bp, Arabidopsis thaliana landsberg
  unsure (1)..(5748): unsure at all n locations
attccttttttcctgcaggataataaagagatccattaggagtaaattatctgacaagagaatacaatgggcattttcattttagttgaattagggatttgggctcgtcatggctcctggaggcagtgctttgaaagaagtcatggaatctaattcaacgggaatggattacgaggttaaaacggcaaaagtggaagttaataataacaaacctacaaagccagggagtgcagggattggaaaatatgggatccattcgaacaatggtgtttacgagcttcttgaatgtcccgtctgtacaaatttaatgtaccctccaattcatcaggtcagtagtatatgagcttgaacagatttgtaattgactaattgcaatgtttcatgttctaaatgttatttaattctacagtgtccgaatggccacacattatgttcaaactgcaaactgagagtgcagaacacatgccctacatgccgctacgagcttggtaacataagatgcttagctcttgagaaagttgcagagtctttggaagttccatgccggtaccaaaatttggggtgtcatgacattttcccttactacagcaagcttaagcacgagcagcattgcaggtttaggccttacacttgcccttatgctggttctgagtgttcggttacaggtgatatccctacacttgtcgttcatctcaaagatgatcataaagtcgatatgcatgacggatgcaccttcaaccaccgttatgtaaagtcaaatccacatgaggtcgaaaatgctacatggatgcttacggtaaaactttctttcgatatgttttcttctttttatcaaaggtttctaatttaaagtctgattcatgttatttcttcagatgaaatttttatgcaggttgtgattttatatcatcatatgactaagcttttacattcaccttctttcgctgttatcctcaaccatgaaatattcctggctttagctcttttctacaaaatacagattggattctttagaaggaactataggaatctctggctctgctcttttatgctatttttggatttctattttgcctattaaattttgaccttgaacaatccggtgccaaactcccttactagctgctattccggttcccgctttgctcttctttgttagtccaattttacggtctccttaagtacctaccatagggtctcttagtcccactttaatcctcacacttaaacttgaatctcagttactaaaattttgtttccaggtgttcaactgttttgggagacagttctgtttacacttcgaggcgttccagctgggaatggctccagtgtacatggcattccttcgttttatgggagatgagaacgaggcgaagaagttcagttacagcttggaagtaggagctcatggacggaaattaacatggcaagggatccctagaagcatccgtgacagtcacaggaaagtccgggacagtcaagacggactcatcatcccaaggaacctcgcactctacttctctggaggtgataggcaagaactcaagttgagagtgactggacgaatctggaaagaggagtaaacgaaaaacgaaaaacgaagaaaagaaggaatcgattgaaaaatgttgtacataagaagaagcctcgtggaagagctaatgatcatatggaagatttgaagtttgttgtctggttttagtgtggtataatggattcttctccaatgggaatgaagatgagatgatgataatgacaaatcttctatgatgaatcagtttggaggagccattgttactattttgtggctgcaagaactatattatctctgtattttttgttttttttgttgggatttcttttgtggtttcagagaatgtaggaaaaagtaagacatggttttggctatgttcttgttgtaaaaccaagttcaaaacagattggtgcactttttatcttttcacaatggtgattttcattcagtttagacttgatatagcaagctcgatgtttaggcattacagcatgatgtcaacacgacaacgccttacccacatagacacacttttactcatttgagagaaggtaactaacaaatatgaaatccaagcaaaattttctatatctacaacgtaaatatcttttccttctgtttttcgtttttgttgaatcaactcttttttctattgcaaagtttgatattttgattctccatttgttattcacctgttcattctctttttggtgcacgatctcttggctctcagagtttgtagttagtcgtagttgtgcaatcatagtaagtggtctcatcatatcttgttgcagagagaatttagactttgtgttcttcttcttaatgtttttgactttgtgtatgattttgtctggtgtatatatagttactaaaactcgtacgaatagtttctttttcacattgtgtttcttgtatgtcgccatacaaagctagatatatggattggtttatatgggaactgcatatgtttattggctaaatgcttctgttttcctgaagattcacagcacacggagacggagtacatattgttcagcgcaagtgaaagcaagagcctttttgtctattgatgggtgaagagatatctagcactgtgaacctggatttgaatctgggtcctgatcctgagttaggtctcgagccagcgacgaattatgctcggtctgattggggtaatggacttgctgctagggaatccgaatctctgagaaggtttagaagtcggtaccggtcacgtttcagacggattgatatgcttccggttcttgctgagacacatagcccggcgatggaattgagtcagttgttgatcacttctggaaatgtagttgctttgcctgctggtgagggaagcatggctagtggagaaagggtcatcgaggactccaaaaagtgcgagaatgggagcaaagtgatggcagaagacaatgtaacagaggagaaaagagatgttgagaagagcgttggcagcgatgggagctttttcgattgttatatatgtttggatttgtccaaggatccagttgttactaattgtggccacctttactgttggtcttgcctttaccagtggctacaggtttcagaggcaaaagaatgcccggtttgtaaaggggaggtatccgtgaaaacagtgactccaatctatggacgtgggatacagaaaagagaatctgaggaggtttcaaacaccaagatcccttcgagaccccaagcacgacgcacagagagtttgaggactacacttaacaggtcaggtcatataccaacggaaatatttagacatttgcaggataggcttgaaagggaatctagtacaggagaaagacgcgccagaccatctcttaaccggtttatgacttcgaggggagttagagcagaggagaaccagtctagtgaagcactggttgaaccttcatcagatgagattaacgatattgatctgatcttaaataatgcccctgaaaatgaagaggaaaacgaaaacctaagctcgtcacgtgctttggcaacccagagacgatgggcacagatgtatgggagggtgtcgtcgtttactttgagctctgctgaaagattagcggatacttatttgataacacatgcattggggaggaaccaagaacaaaacagcagtcctcctgttggtgttgaagacagggattcgttctcaagcatagtaggtgtgataaactcggagagtcaagttgaaacggcggctgagattaattcaatgttgactgtatcgacttcttcgtctgttagaagacatgagaacagttcaagggtctctgatgttgacagtgcagattctcgtccactgaggagaagaaggagattagcttagaagagaatggaggagaagaaagaggaagctagagtaataatctgtagtagaaagcagtgattttattggttttttcagtttgttttttatatgggattttggatttttgttgtttcagtttttatgctaaaagactaataaataaatacatcaataggatatatggttttttcaattcttttgatctggtgaatgaattcggttgttggcagttgttgacttgttgcggcagagttttgacttgtgatagaatataaaagtttttgttgttgactggacaaaacgtcgctttggccgagtggttaaggcgtttgcctgctaagtaaatggggtttccccgcgagagttcgaatctctcaggcgacgaattctattttacatttttatcgacgcggggtttgtaaattgtaaccaacctgtgtccctctgttcatgcaggagctagatagccaattgaagatagaagcaaaacgtaaatttttttataaatagattgaaaaatctgatctaaaaagtttgttaatcaaaatactatctgaaatctagtaagaataaatatttgaaggttgaataagggaaaaaatgagcaaaaaaggaaacgaacttggtgaatctggaacaaacgtcaataacttgtcctacctccttgtttaatttcctatcttggtaaatccgcgtttctttgattaatagaaatccgcgtttctcttcttttccaatttcttcattgattcttcttctcgtgtcgatcaatacaataccaagccaaaataaaccatgctcgctcgctggcgtctttcttcccaggtggtttcctccctctccctctctttgattttttcttcatctttgggtgttttgtttgttctccntcgggcttctccgcgcgctccggctctgcggtntnttttggtttgtgttctatctttctgatctaaatcgcaagacgaatattgtgacgattcttatgatttgcgagtaatactacttgttgattggtgattgatcttgcttttgctttgaatctctctgcagaggaaataaactctctagatcagtagcttatatgcgttactgataatggataatcacggtcctcgttatccatacccttacggtcagtacccatacccttacccatacccagctccttatagacctcccagttcagagccatacccacctcctccaaccaatcaatacagtgctccttattacccttacccaccacctccatacgcaacaccaccaccatatgcatcaccaccaccgcctcatcagcacacttcgggttcgcattctggaccattagactatagccacaacccacaaccatcatctctcgcggctcctcctccagagtatcacagacattcttttgactaccaaccttctccttacccttatcagccccaaggtaactttggtgcttatggtcctccgcctcctcactattcgtatcaagagccagctcaataccctccacctgaaactaaaccgcaagagcctctgcctcctccgcagcaaactcaaggttttcaagaatatcgtaggcaagattgtctcagtaccgggggaacaggtcatgataatgtaagcaattctggatcttcttatcctcctgtggatgaacttctaggtggtctgcatatttctactaaccaaccaggtccctcagttccacaactatcctcccttccttcgaactcttggcaaagccgccctggggacttgtatggttaccctaacagctcgtttccaagtaactctcatttgccacagttagggagagtagattcctcaagttcttattatgcatctaccgaatcgccacatagtgcggatatgcagatgacactgtttg

SEQ ID NO: 27695 - DNA, 1477 bp, Arabidopsis thaliana landsberg
cagactctatactcacattatgttcagcagagagctgaagggcaataacctcacctgtcgccttcatagcccttccaagaactgcacgggaatccccaacattagctatgtaaagcatccctccgcatataacacccaccaagcagcaagacccaaccgctgcaatctgtggcttagttggccactgctttgtcacaacccctaaaaaaccttcttctgtcgcctcatacgcctttttaattacatccaccgacatagaggcctgctctgcagcaaatcctgaaaattcaaacaagattttagtttccgcacggttggtttgtaacctggtatgcatatatcattcagtttcctcactctttagatgctgaaaaaggtgatcattaacaaatcgcgacgtctcaggcccgccatggccatcatagattccaataaaagttccataaggaccagagttaagagtactcaaaggcccagactcaacttggctctgatcctcaagcaagttgttggcttgaacaacagccatggagaattcaccaacgaggtgctgaccaaagtctttgtaccaaagcaatccatcttgttttccagttgaatcagaggacttgcccgaggaagaagacggccacagacaagcactcaagagtttcattaacgttgataacatccctcatttcatcaagacacccctttttcctccacatccgtcaaagcgatgcacagaaacaatcaaagtcgaaaaaagatttaagcttttaagaatctgcaattcaaaacagaattaaaagtaaggatctgaacaaaacaacaattttataagcttaatagaatctgaaaactctcgacttggctgagcaaaaatgatatcaaaaacccaactttaaactaaaaaaactgcaaacccaattggttaatggatcagataagcaagagggaatagtttattcaacaaggatcagatcaaaatccaaactttttcaaactctgagaaaattagtacctgagagattatggagtagctgatgtgtaaacaggaagaagtcactcgcagacttttcacaagtcaactgatacacatcaaagcaatcgcagtcagagaagcaatcttataatccaaaaaaaggatttgagggtttagtgattgagagaaaaggtcgacaaatacaggtatacgaaaaaaagatgaagctctgagaaaccaaattgatgtagagaaagagagagtgatggatccgaatcagatccagaagaaagaagtaagaagaagaagtagcgtcgaccttctctcggagaggaagaaggcaaaggagaaaagagagaagagagaaaggaaagggctccactgcttctaaccagacaatccaatctctcaattactaactggatcagattttctaaacctaacccttcttaaaatcctaaagattgacttttctttcctctttttatttacccaaacggtcctggatctttg

SEQ ID NO: 27696 - DNA, 1969 bp, Arabidopsis thaliana landsberg
tgatttatttatgttcttgaattttcaaaatagtttccttgattttgtccaaatttttgttgatatttttcagacaaaaccaaaggacttacgagacataacccctgaccgatcaaaacccatcgaaccgttaggttccttcaaagaagacacgtgtacagagcggatatcttctatttcatcccgttacgggaaacccgacttgaaaccaactcggtcgagaaacgggtcaagggtcaaaccttttgacccggtaattgggatatcgatcattatattgacgttgatgattatgttagtgtggggtcgactctgtgcgatcctctgtacatccgcttggtgttacgtcctacctcgtgtcagagacgcagccgcgttggccaaacgcaaacgcaacggttctgcttctgtgccggatttgaattcggagtcgtataaaagaaaagtcgttttggacgggtttcttggacggcaaaatcgcgtttcgttgtcatgacgatctttttttcctttgttttctatattataatggtttggtcatatttttttgtttatttttaagcagggataaacagtgtttccgtttaaaaacaatgatcgatcgattatgaatggatgcactacagtataatttataattgtgttttctttaagcagcctattgttgtaaacttggaattttcttggttttaccaagtttggattggtttgtttgggatatgtatattcagtgatgtcacgtgtatacatcaaggaacacgtgcatgagtttctctttctgggtccatttcttttgttataaatatttgtctccatgtaagaatgtagaactagtcgataaagtttaggaatttggaattccaatagaagtcgaaagatcaacttcggacaagaatagttgaagactttgaattagagccgtgtttgttactttggtttattgtaatggaatacttaggaaaagtcaaaaacacttttatcttcattcctttttatagtaatggtcaggtaatacaatacaattatacaaatgcaaacgaaagaaacacgatcaaacttcttggttgatatctcttcttcaataggtatatccacacaaagtttgtatattgatataaaccatctttaattttatttttaacgaacaaatatcttactcatcgtactgacatctgcagtcagttaataaattaatatttctatataaatattttactcgtaaatcttgagaaaccaaattctgtaacgtattttatgatccaatatttttgaatctgacgacaatttaatctacagtaattttgatcatctcaccaattaaattacagcaatattcggtatttcggtgcagcatgaataacgttctcgttttaaaaatatacattttcttcgaacacctatctgactttacgatggtgacatattcagacaaatactactataaaatgaattttaatctaataccagtgagaaaatggaaattaataatttgacgttaactttaagctgctagcaaaaatggaaaatctaatgataattttaagctatcagttaaaaaaagaaaatcactggcgttaagtttcaatttacaattcgcttttgttttttctcatcacaattcatttttttttaacggcccaactaaataaaattgggctttagctcatgagaagcccatatagaagttggaaaaaggattacggagaaaaggccacatatttaattattttggaataaaaaatgaaaaaaataatgatctgctcataacgtatatgaacaagtgaaggtagaggaaaaaaatcggcgaccagagtaaacaagtttctctgttgggtcatctttccggcgaaaattatcacctttttgccctaaatctcaccgtcactcttcaagtttctgtctttctcaaccgattcaactccttcctctcactcgtgacggtgaagcccttgctgtctccattctcttg

SEQ ID NO: 27697 - DNA, 1943 bp, Arabidopsis thaliana landsberg
tctgatacaactattaaatgcttaatatatgaataatacgtggtttagagtaactaacaaacgtaaataaaataacaatatttctccctactcgtggcaacataagctgaacagagccaagtacaaacaagttgactttctgctacaaactttgactatcccgacaagaaaaaaccttaagattgatcaggaaggatctcatcggttcttctatcttgtctctgaccattcttcttcttcttcttctcaacaacacttctgataatttaacattgcatctcctactcattctcatcgtcttcgtcttcaatcttctacacgaatgtcgcagtgaaattttttgactctttcagcttcttctcgccatctctaatggcgatcccttccttcctctctccaaatttacacttttacccttctaccaaactcgatccgagtcgactcactctttcctcatcctccttcgtttgttgtttatcagtagaccgccaaattaaccattcctccgtctccaacgaaacctccggcttacgagttgtcatatccgccggaggcaccgccggacacatctcttcagccttagcgatcggagacgagctaaaatcagccgacccacttgctcgaatcctcttcatcggattcccaaacagtatggagagcacgacggttccatccgccggattcgatttctcaacaatctccaccgtcggatcatcatcgtcccgaccattcctctgtttcacctctttcctcaaattccctctccgcttgatccaatccaccttcgaatcctacaaaattctccgtgaactaaaaccacaaatcgtcattggcaccggaggacacgcctctttcccggtctgtttcgccgccgtgatctcaagaaccaaattcgtaatccaagaacaagattcaatccctggaaccactaattggattctctctttcttcgccgatacaattttcgctcctttcaattgtacagtcactaacctccctaaacgagtcgccgcgaagtgtgttgtctacggaaacccgataagacaaacgcttagacggtattcgtcgaaaggagcggcgcgtgtgagcttcttcggacagtgggctggagctgtgtcggaagcgaaagttgtgcttttgcttggtgggtctttaggagccaatgctattaacatagctttgcttaactgttactcgcagttgttgtctgaacatgagaactggttctttgtttggcaaactggtgttgaagctttcgatgaaatggatagtcttgttagaagtcatcctcgtctctttctatctccgtgagttatacaacaacatttttaactgtttagctgcttttgtattgactaataactcaaaatgtgttttattatgtggtataaggtttttgaggtcgataggtgtggcgtatgcggctgcagatttgttatctcgagagctggtgcaatgacttgctcagagattatggctttaggcaaaccttctattctggtatttgaaatctttaagctgattcatctaatttgcttgtggagtgtgttctttcttgtcttgaagcagtgaatgttctttttgtttttgttagataccatcaccacatagcgatgaaggggatcaagtaaggaatgcttctttaatggcggacattgttggatcaaagttaataacagaagaggagctagatacgatcactcttagagctgccatggaagatattctaggtgactaaaaactctacaaagtagaaaacactcacaaatttcaactctcattatctcattgagttggttccaaatgatagggaatgaagaactgatgatggaaatgagcgagcgggcattcaaagctgcgaaaccggacgctgcatcagatgttgctaaacacattatttctattatcaaatccaaagataagtaggtatgttgtatgaaccg

SEQ ID NO: 27698 - DNA, 1292 bp, Arabidopsis thaliana landsberg
gatttttgtgttacattctggcctcgtggctgctttctcatccgtttatctgatcggctaaaagcacttcctttcttgcaataccattcgctctcctagcaacttattagccctgttacaattgttcatacttggcttgcctaccaaaacataaaatctgcatatgctctactttccttttccggcaacaaatgaaatcaatccataattgtatagacaaatttgtacaacaactaatcttcctaatgccaacttttctgactatagtactatattaaaattgtgtgcattcgaaaatcagagtttgtttgcctaaattataaatattcaaatggaagtcgccgtcttttctcatagattcgacctggaatatgagacatattttgtaatttagtttttcaatgcaaataaatatttttgattacgagaaagcttaaaagacctctatataaatatgtatctgtcaaacaccaaagttacatagagagaaaacaaaagaagagtagacttcccatcatcctccgctataatgcgccactctccgcgttatctataatacgccagtatgccgtgcccgctataatgcgcaagtctccgtctcagcctctcttcgccgtctgatgtctgatcttctaggtcacctccacaaattcgaacaagaatttgtctttatgtgcaaaaccaaaatgggagtcaatgcttcagagccaaaacgaacacgatcgcgaccaagtcaatcgcaggggaggcatccgtcgacgagacgatctccgtcaacgagcaacaccggcacaacaacaaccacgacgacatcgaattctaacaaaactggtgcctcctcttcctcctccggtgcggcttcttcctcagtcgctagtcgaacatctctcgctagtctccgagaatccttaccggaaaatcctcacatatacaacgtctccgagattcgtgccgctaccaacaatttcctcgctaatcgcttatcttcctcttcctctaaagcctcgtggcgttgcaatttaagagggaaagaagtcgtcgtgtttcagagaaagtttaggcgaaggatcgacacggatgagcttagagatcgtctttcagatatctgccggagccaccacggaagcataattaatctactcggcgcttctgtttccggcggtggaagagtaggaggaggaggaggaggaggtgatcacatctacttggtctacgaatacgtcaacggagcatctctagctgattgcttgagaaaccctaagaacccgaattttacagttctatgaagggac

SEQ ID NO: 27699 - DNA, 1591 bp, Arabidopsis thaliana landsberg
cgaggatgattcaaattcaaaaggaaagaaaatgggggcagcaaaggcgaggatgttcgattttaggaagaaagtgggagagaagtttgaagagaataaacgtcacgttgaggaaaaagttgacagattgttgaaaagatgataggaccttgacacaataacaaggagaagaagcttctttctttctttttcatgtttcagacgaacacaaaactgatagacagaagagagtcaatagattagagtataggtattggtacttgtattcatgtttggtaaaaagatatcgagcattgcgaaatcgttctttattttttattattacaacataagagtagcataagaaaaaaagtatctatgcaagtgatctcatcatacagacaaagagagcttgaacaacgaacaaaagcagtggtgacatgaggaaagttccatctagtaatcttcaggggccaagggctggtgtacaccatgtgcgtggtgggtaggtggttcggtgggtatgaccatgtactcatatataagggcggctaaagcactaccgatgaatggtccgacccaatagatccagtggtcatgccatctccatcccaccaacgctggaccaaaagctctagctggattcatcgaagcaccagaaaatggtccacctactaagatgtttgccccaactatgagtccgattgcaagcggtgctatgatcccgaggcttccacgttttggatcaatcaaagtggaatacactacgtagactaagccaaatgttaaaatgatctctaatacaagtccattaaccgctccaacacctgatgctagacggaaaccaactggtctctgcatgaacacaaactctttttaagtcatataccctatattaatatggtaggttccatcttaaaaagcattgcaacactaagtactagctagatatatatgaagttgactagtgttaccatgccgtttgttgtgagccttaacaagagacaagcgaggatggctccaagaagctgagcgatccagtagtagatggcgcggatcgctgtaactctgcctccaacaagagcaccaaaagtgactgccgggttaacgtgtccgccggagacattaatggctgctgaaacagcagcaaacagagcaaacgcatgagccaacgctactaaaatcagccctcctggtgtgtttgtccccgcatgagccgcatgttcccaatacaacttatctaaggagaagaaaaaaaaagtcagaagtctgaagtcatatcacatatgcaaagactcaagtattagagtcagaacggtgcttgtacgaaccgagagagaggatagagccttcagctgcaaagacgaagacaaaagtggagagaaactcagctaaagttgctctaatggagtcagggtgtgtagcctcatcggctctaccgaaaccgtatgctctacgagctgatgttgccattatgatcaaacacttgaaattaacaacaaagtgtgaagaagaaagagagagatagagagagtttaaaagaagccaaaagaagcgaagtccaaagtaaaagggacagatgtgagacttgagtgtcttaagcttgacacgt

SEQ ID NO: 27700 - DNA, 1166 bp, Arabidopsis thaliana landsberg
gccaagttaatattataatccaagtatgtctgtggtagccatgagttcacaaataatgcatagacaagataattgcttattctgtacaggttctaatagatagggaatggaatcagataagcgagtttcaaatcaaagcagtatagtcaagttgtaaattcaaagcagggtgcagtcttacttcagagatacaatcggttatgcaacagagaactaacaacctaggcattgaacttacttcattgaatcaaaacatgcttatcggtttgaaatcatcattatcccctatgtaaatgagcaatcctaaatgcaaacactctatatacaatcctaaaatgaaatgcaatctacatgacactctgtttttgtgaaatcattttctaaacaattttcatatttttatggttttttctatgccttagatgatgcaaaatttgaaataagaaaagaaaacacaatgttaaacatgtcttgaaccctccctcaaacttaaattacacagtcccttgtgtaataaaaatctgagaaagaattcaaaaccaaaacacaaaacacacaaagaaaaataaaaacgcaatggtatgtacaatggttgaggtggtgttacctcagtgatcaggtgaagtagatggagacatagtcgtccatactctcttgagtataggcaggggctgaagttgaggcgggagggttttgctcgttttgtccggtcgagcgtgtggaagctcgtctctgcctactccttggctctctcaactcggagatcacttcccgaggctcaaaagatgaagctcagagttgatcgatcctttcagctctccatgcagctgagctcgttgaaccgcttcttcttacttcgggagtgggagacgttggccttggcttgctctggaagtccttgagttgagcagccatactcttcagcgacttcttcattgttctcatcttcttcttgaaaccttcattgttttgctgtgaaggttcctaagctcttcaagcacaccgagcttcttgtgaacttcagctatctcatctactccttggtcagcaccttctttacaatgagcttgctcttgttcgctggtctcatgctccgattgatcaatatgttgctcaaactcgatttgctgcttataatcagcttgagtaaagtactcatgttgctc

SEQ ID NO: 27701 - DNA, 2017 bp, Arabidopsis thaliana landsberg
ttatatttttttcttatagggggttttctacgtaccatatatgctatgtgtaaataaatgaaattataatatttggtgtttgacagtctgtcatttttacatacaataattgtgatttgatcccgtaattttttctttataagttacatgggtccaagagccaaaaagggatgtagatcattgtttaaacgaaataccaccacgttgttcactttgtcaccgcgtcatcaattaaatatatgattagatttttttcacataaagattttaacaataaaataaatgattagatttctttcttataaaagtttttctacataccataaatgttatatgtgtacagtgaaattgttatatttgatacttaacagtctgtcatttcttttttgcgtgaacaatatgtcatttttacatatagtaattgtgatttgacctagtaactttgtcgttaagggttattgtgaaaacatgtacttttttgacaaaaactttgattttgaggcttttccgtatgtgatttgaaaaagagcatttttaatatgatgatttgactattttaccttgaaaattttcaccctcttctttcatcatcatcttccccgtccttcttcttttcaatccaaatcttttaacaaaaattagaaatcttataccctacaaaatccattctattacaaacacccatcgattcaagatagataaatcctaaggatgataatatttatgaaacccaagcaaagaattgaacgaaataaaatcatcttgcaaatgaaaaagaagaagatgactagtaaagaagaagaatttcagatttcaagcagatctgcaatttaagtattcgaaacggagctattctttcattgtgtcctcactctacaccattagcgatattttgtttattggaagggaaactcaatcaaaaactaaaaccctaaagatttttgaatgggaacccaagcacaaaaatcaaactcacagtgataaatgttttgagatgtaatctggaaatatttatttttaaattgcattatttagcactacataacgattcacctctatttttttagagttgtgagatcattggataaaaacaaagatcggagaaatcagtgagtgataagaggagggagaagatgagccatcactctcacgattcaccgctgcccacatcgtcgctactattatcggagctcatcgacattgtcggaggttaccatcgtcgccgttgtcggagctcaccatcgtcgccattatcggtgctcaccatcgtcgctgttgccagagctcaccatcgtcgccgtgagcggagctcaccatcgtcgccatcaccaacaaaggaaacaatatattattctttatctttacataatgatagaagggtagaaccgtttatttcaaaacaggaaagtgccggttttcgtaagtacatacgaaagttcttttctcataattaatccttgtcgttatatgttacataggtacaaaaacaaaaaacaatgtagttttgtttaaacgaattaccgctacgttgttgtctttgctaccgcctcatcaattaaataaatgattataattttttcttataaaaaatattcacatacgataaatattatatgtgtacataagtgaaattgttatatttgggatttgaaagtttgtcatttttacttttaattttgcgtcatcattttgtcaattttacatacaagaattgtgattttacttattaacttcgttgttatattttacatggttacaaaagcaaaacaaaaaacgatggatgtagttttgtttaaacgaatttctaccatgttgttctccttgccattgtgttatctgagtcattgattttaatgattgacataaaattgttgaagtcaattttagtttcaaattaaaacacacaatctgtgtagtaattttgaatgtttgatgatttgaggttggaaaagacactaacactttctataagtaggaaaatgcactatgtgaacagtgtgagttgaattacatcatt

SEQ ID NO: 27702 - DNA, 996 bp, Arabidopsis thaliana landsberg
ttgcccctactattatgaccataaggtttattcaaatgctcttagcttcaataacaaactacaatgctatgtgtggaaatcctaatccaaaatcaaatatgtatctcacattgatcatttgataagaaaataacctaccgacaacattatgtagacgagaacaacatgaaaggaactcttgtgcaagaaatgcttacattatatacacttgatagtgagttcaaaatgttgcatgtttgtattttggatgcaacgagtatagcaacggttcggattttactagaacgggcatattagggctagggttggaaagtactccattctggggagtttggctcgaagttctttttttgcctttgtcggatgagagaatctaaaacctctcgcaatttaatccttggtaatgatgtcattttcttgtgtgatggtgtggtacacatatggacgataactaatataggatcaaattaacctagactactctctcaaattaagaggccagttgtaatacttagggatcgaattcccaaatctcttttgttcacacaatatgtataagtatcgagataaaaaaaacgttaagcttatggtattctcagaaaacagatgattagtagatcgaattatgactaggatgttatcgaaacgttcttgaacttaaatcactattatagagtaaccggtgttagcatgcattactcactatgtctaatactaaagattatgaatgttggtccgcaaatccttaattttaaacatgcatgctaatcgagtttgataagttcacataagtagatagactgattcttattacacatctacaaactcggctcatcaaatagtagttttagtaatagacagccatccggaattcacatactacctgagatcaagttctagttagctactctagaactaccattaaaaacaaccaaagatgaagaatcctacagatatcctaacagatggacaatctagtaagtcatctataaccct

SEQ ID NO: 27703 - DNA, 1076 bp, Arabidopsis thaliana landsberg
acacacacccactttattcgtagttttagttccaactacgtaaagatttgtgttgttagtgatgacgaagtaatcgtgacatgatttatatcaataagttacatatatggtttgggaaaacatttgagcaatcatacggattcaccaagtaatgtacactggttgaaattaaatatcaaaggggtatataaactttttgctcattgcaacaaatctgttaaatttgataacgataaaatttatttatatatttgatatgtgttattactccgtctatctataatagattagcgatttatgaaccaaaacgttgtttttatagtattcaagtttaaatgatctattcattaatattatggtttagagattcaactcattttaagtaaaataccgttctagttttgttactaaagtaatttacgcatttttgttctaatattttttatgataaaagctgattatcatactaaatttttaaataactattgaataagtagaacatttcgaaacttcgttggaagagaggctgattcagacatgtgtggatgtctacagatatgggaactcaaaatataaaggaatgattttatcataactttgaatgattagtagaacacaaatcaggtaataatgtaagaaaaaatgacaatgttcattaatatgatagaatcaaataaagtacagagatatcatgaaaggacccaaccagtgagtgatcagggtatcaaactggaccctttgagagagaaaaaaaaagaaaagcgaattgaatgtagaagacagtacagttaacaatacctgtcctccataattatcattcattaagtttctgagattctcctccagattttgagttttatcttccccctttttttatgtaaattataggtgcattgatatcatcgattgtccaatgcaagttgataatgtggtagatgtaatttaataaaaatttatgatctcctattttttgaacgtgcttaatgttgttatttttttcagaagtgtgtatatttattgcgtatagattgaaattctttgagtttgtttgggaatgattactagttatactcatc

SEQ ID NO: 27704 - DNA, 1666 bp, Arabidopsis thaliana landsberg
ctggcagctataaaattaatatattatgaaaatttattgttttaattttaagtaatttgagattatttcatagaagtacatttatacgactattttatgtttttttttcttgattactatcatgcattcatatgttacattattctgtttttatcacataaatatatatacactacattaaagtgatttgtagaaagcgaaagcaaatacttaattaagacgtacgttagagcctagaggagtgtgtgtgtgtgtgtcattttcgtcttgcggtgtgataaattaggttggatggtttgttcaacattaagatttattgtggtttttgttaggtatgtcgtaattgtgaagtgatcatttgctaatttatcaaccgcatcctcaaactaatcctttaattttattcgactttagaattcattaagaatagtaatatcttaatatgtcaaaatttgacgatgccatatagacaagtttgaataaatttagtgttatataatgcaatcaacgtaaaggaattttgtttatacacatctcgtgaccaatttttcttttacttatctgtgtagttgtaagtgttatgcaagtagcatgtgtgatgtgtcatcattgatctatgatttgtaacaaactatgacacatgttgtcttttcatttcattatccctatttttccattttgctcttgtttttactttatagtcactagcttataataatattatcgcaaaatgccaaattgtgaaataaaatctctaattgtggccgaatgggtgataggtgtaagttttatgggtttttaataaactcgtgaagttatgggtctttgtggaatattctaaaactattggggcccaatgtgtaaatattttctattcaccttcttcactctaagaatcgtttttacctaagacagatcgtttcaaaggtttcaacatttgtctcttgaaatcgatcgccgtttttctccatcctccgttcataattccggcaccgtttatccaaaatctacacttggctgaaaacatgaggtagctgttcgatttctaggtttttttgaaaaagtataatctcgaattcgatttgtgtgtatgtttgcttaactcacaaaaaggttttgcgtgatttgtgagctgagtttgacttcctcgtcacattttctctaaccagactatataaagcccttacctttaagttgttttactaaaggggttttcattagttatatagccttatagagagtagtgttctttgtgatgatgagagacttgtttgcacagatcttacaacttttctttacttgtgatgatgattggcttcagcagcattcatgtttacaatctatataagcattggcttttgttttacttgtgaagttcaaaattgagaatctttgtgattgatataacaagttagtcgtaatcttctgttacggttgtgtgattgaggtagtatgttgcacaaagtccgctgagtagagtaacatcgtattatattgttgtttcaccttgtgtgcagtcgtaatccggaggttctttgggctcagcgttctgataaggtttacctaactgtcgccttacctgatgcgaaggacatttcggtgaagtgtgagcctcagggtctattcagtttctctgctcttggtgcccaaggcgagcgcttggatt

SEQ ID NO: 27705 - DNA, 745 bp, Arabidopsis thaliana landsberg
tgttgtagctaggtggtcaaattgtccgaaccataattgtattattttgttatatttaccgtttttctctaaatctcctaaccgccacaacgttgtagttttgactctaaagaatattcaatgattcaagtatgaatatgtaaatatattcgtagagtcaggtgataaactaaacaacagaagcttaaagtcaacaaatattttattcatcttaatatattccttacacttgatctatcaattgaacccgcgtattattaatgaaattccgacagaatttttaattttttaatttttcttttaataatcgttgcaacttaaaagtcaactaatatttattatactgggagaagattggtccatattttgagtaacgaacattgattatccttttttttttgtaaaaaaacattgattatccttatagaagaaaaaacaaaaatgtaaacttgaaatgtaccacgaccacgagggagatggtgttaacgtaccatatcgcaagaaaaaaatattacaaaggttttctttctatggtccagagctctggttagaaaaatcaatatggtcctggaaagatccaagtggactcatgcattttgaataatcaaatatggtattgcattacaactgtgagtctgtgacgtaaattttgtttgagatacaaattctattttattttttttgggctaccaaaatttggttaaaaaggaaaaatttggtcggtttcattactatacgaggaagt

SEQ ID NO: 27706 - DNA, 730 bp, Arabidopsis thaliana landsberg
tgcttttgatctcgatgacgattgttgcgaccgcggtgatggtgttggtggcagaagcttttaatagatggtgtttagagtgtgcatgaagtgccatatgttagtgatgctgtgtaaagcgtcaccggcttgccctaattgcaagtttatgcattcacctgaagacacctctctctcacttctttttactcctaagccaagtttgtcagcttagttattgtttggtttctaatcttgtttatatctaatcactaattaatgcttcgtatttaatgttttcatcgaacaaatattttatttgttgggatgttgttggaactttggtttatatagaatacgataattaatgtgatccgcttttccctgtacctttttctatttatttttttctgaatcattacaatgtaatgttgagaatataatgttagttggtgatcttatttcacctggtctcattgggccacacattgtatattattgaataagagagtacaacttatatacaaggctaaagggagctgagcaattaccggtaaatctaaattatgtaatcgagtattttccaaaagtgacacaagggaattcagtattttgtagttccatttgtgttctgatgaggtggaaaaggttttggtgtggctaagggaaaaattgccgaattgtatacattcggaaattttcacattagcacattgatttttcttttgggtatgtaaaaaagccaaaaact

SEQ ID NO: 27707 - DNA, 1222 bp, Arabidopsis thaliana landsberg
atctaagaacgttacttcataaatcacggaaagttatggctttgaatggaaatatatcaatttagtaataactaagaagagtaaaaatcgcaatggcagtaaatgtctggaataatttactaccacaacttggaaacgcatttgaatttcataaaagacttggccgacaaacacatggtgatgttgccctataatttgcattcttctactctatttcatcagatatcttagcataacgggcttctttttgtcgaagcccaaatcgaataagaagcccatctgtaatttgctctctcccactttgatcaatcgttaactctaagaagtaggattaactaaaaccctagatttagtgggaaatccactatagtgtgtgagcactattacctaagattttctgttctcatttgcgttttttttttctggtcaaccatttgggtttttctttcaaattgtcgggcaggaattacggattttaataaaacttaggaataaataaataattaaaaaaagacagaaacaatattataataaatttatcttttgagctgtgtcctcaatgaaaccttaataaagagaaccctctctgcaacatttaatactcataacaaaacctatctctctctgtctttactcattgtcgttatggtcgcgccgcctatagccgccgcgtcgttagagctccctcctccgttccccgccgtcttcgaacaaccaatggagaaactcaccttccctaacgagttcccttacgagtttgcctcctcaacgttttcaacttctccggaagactcaaaggagacagaagatgaaacaaccgacgacgaagatgacttcttagccgggttaactcgcagactcgctctctcgactcagcgcctctcttctccttccttcgtcaccgacaagtctcaggtttgttaaagcttctctctttttccaatttttcaaatgttctctcaatgtagactaaacactcacagattcttgctctgtttcttcagatgaaacccaaagtcacagagtcaactcagagtggactcggaagtcctaatggtccgttttctcaagtcccttcaccgccgacatctccgtctcgtgaagaagactctttgaaagtgttatctgctgcagctggagaagtcgccaagatcaaaaaggccaattttgatgctaaacccatcagctacccaaaccctaaccctaattacttaaccagctt

SEQ ID NO: 27708 - DNA, 1564 bp, Arabidopsis thaliana landsberg
taaaaccaaatcggtaagaatatcaattcatccatattcgatctaattaagttagtagattacatacatcacttatattaaatgttctgttggataacttattatccaaattaacttaaattatgaagataaatggagactgatctctcaattattttttttgtattcacaaatttaattagcatttactacaaaatgtaggtttaaataattttagaaaaagagaggttaaaaataccttcaccggcgccagagctgcttgagattatagaagctagtgcgaacggaatactgaatgtaatctataaaaagtaccaaaaaaatgttaacaaataataaacaaaggatgataaaccaaaaaaatgttaacattttaataaaccaaaagttgtataaaaggtatgttggacttacagcaagaggaattccaagaagggcaaagagagtcagtgctccagctctgatgccatcggtaggaagggccattggaccggcgattctccggtgctcctccgcctttttagtaaccaaaaccgtcattgccaaacacacggcaagaataatgttcacagctccccaaagccttttagctcctcccatcttcctactaataccttcaataccaagtgacatgactccaagaacgatagagttaagcatcaatcccaatgcaccaacatgaattccttggttgtatagtttcttcattttgtcatctccttttgagtctccaccatacacttcacgacccatccaatcggtatcgtataaaagaaaagggaaccatgcgatccagttcaaggccgtgacgattagtagcatccacattggacgtttcatcaccttaaaagctccaaagatctcaccgaagaacggagttttctcgttgtcggagtctgccttaggcgaccattgcttatcttccacgtaccatagagctatgatggtgacgactaggaggagagtgatggaaaggaagaaacagctcttgagatttgcgcaatagatgtcgcatgctttagtcattgtgaaagggaagatcttgtagaggttagtgtacgatcctgccgcatatcccaaaacgtttccaacggccatgaagaaagagaaaaacgcatttgcggttcgcgttttcttagcgttccctgctgataaatcagccaagaaagctctgcagggtccttgtaaggtgttgttagccacgtcaagaatccaaaacccgagagcgaatatcgctatggctcgcgttttcggcggtttgtcaagctgatcgcccatgctgtgacctatatcggcagcgtaaccgataaggaaaacagcaacggtgactaaaccagctccagcgacgatgaagggacgacgacggccgaatcttgaggtgcaacggtcactgtggtaaccgacgataggctgaacaagcataccggagattggaccacagagccaaatcagagaagcccatttatgtgggattccgagtagctgcacgtaaggagtcaacagagataactgtaaagcccaaccgaactgtacaccggcggcaatggaacccaccgatatgatc

SEQ ID NO: 27709 - DNA, 1707 bp, Arabidopsis thaliana landsberg
gaagctcagagggtgatatcaaaagcttctgcattttgtatcctcctgtctgagactgtcctcggggctgggcatagtatataacttgtcgctctctcacgcgctcaaatgcctgtcatgtcaaccatttagaccaccacctttaaaccatggcatctcatgagagctataaacatacccttaggcagacattttgtgcgtagtagtctgaggtatgaaaagaatcgtgtatcgccttatactctggaatacacatggaatctcaagtcattttcatagtggtgccatggtttaaaccaaatttacagattacctttcatcacactgatgaaggtgtatgagctttgctccttcacttctaacctcctcatacagaccagaagataaagctccagtacggaacaatctgctcaacaaagatagtgtcaatagatattcccaaggaaaatgtattatgcaacaccgcagcttattatacctctaacggcttccaactttggttgcctttgcatacttgaaagtgctgctttgaagttctcaagagagaggaggccagattccaaattcattaaagaaacagcgcagaatctaacatcaagagatagactcaacacagagaaaatgatatcttaaggaaacatctcatgattgtaatcgaagaacttacataaacttcaggaaactgttcacagtagtattagcattaaacaatgtcttaagtatgtctttaaatctcgtgtctgatgttaaattctgcacaatagtttttttttttttgaaattggttagtatcagttgttcagaacaagaatcaacatcatctaaaagctaagcatgtcatagtagtaattgggattggatattagaaccttaatcttatcattgaaccgagaaacatatccactggggaagcctgagtctgctggtagagacagcaggtgtacaaacaaactagaaacatagttcctattagttaaataagttgattggaaaaatagttgactggctattacagaaaagaagctgctcattacccgtcaagttcttacctggaaggaggaagaaacaaaaattttctgtgtgaaaagcgagatctcactcttttctccagaagttggtcggcgtactgtgatgacagattgcctattataagattttgaaccagagtagtattaacaagaaccaaagttagctgtcatcaaacataaaaatacatacaagaaacagtttgtaaagcccaaaggacatatatctgcatagcgatactcataccagtcgagacctaataccgaggacagtcagcttgtgaggttcagagttgcatagcatcaagcaaactgtatagcaacaggtgttttccgtatatatacaccaccagataatagggtgagtggatagaaaacaccaatgtccaattcctttgttcatcaaaggttaaaagaaaccagaattcttgcctgtgcaaacatgtcaaattcatcaagcacaaagatgatagtcttatgtgctagtccacatgccctgaaatatctatatcagtttgtatgcgttgaatatcaataaggctcatttatgtaaaggtaaaaatactgaccgcaacatgggtataatgaattgtgaattgtcaaaaaataaccccccccagtgcaagagagtaagccagtacaaatgaaacattggttacacagcaaagagcaagaacattcg

SEQ ID NO: 27710 - DNA, 849 bp, Arabidopsis thaliana landsberg
gtcaaggaatgtccaatctccaattcttaagattcagagattttggtaatcgtgaaatagtgtgtttaccacacagtttgacctatttatctcaaaaacttcgattactacattgggattattttccgatgacatgctttccttcaaagttcaatccagagttcctcgtggaactaaacatgcgttggtccaagcttgagaagttatgggaagagattcaagtaagtatatactagatacttattttttcatgcaatattttaaatgacagtttttaatcttgaatccataacttgttcatctttctacaattattagcatttaaaagaagatgagctgaccatttttttagttaatttaaattatgtataataagcttactatactagaatgttatatgagtagtttgtttcgtacgtgtatactatttggcgaataagcatgctcacaaagttttcttcatttttttttgtacagcctcttagaaatctcaagcggatggatttgttcagcttaccatattttttaattaatttaaattatgtataataagcttattatagtagaatgttatatgagtagttagtttcatacgtgttcactatttggcgtattagcatgctcacaaagttttcttcatttttttgtacagcctcttagaaatctcaagcggatgattttgagtaattctagaaatctaaaggaacttcctgatctctcaagtgctactaacctcgaggtgttgactcttaacggatgctcaagtctagtggagttgcccttctctatcgggtatgccattaatcttcagaggattaatcttagtttttgctcaaatctggtggagct

SEQ ID NO: 27711 - DNA, 941 bp, Arabidopsis thaliana landsberg
  unsure (1)..(941): unsure at all n locations
tgaaaaataaaaggctgggtgaagtaatcaaagattgacaaataggaaaagagaacatttataagacaagaaggaaacaaaaagagaaaaaaaaaaacaattgaatgaaaaaaatgagaacaaaaacttcaatagctataagatacctctaaactgaaagcgaaatactaaataatgcatagaaaactgaaagaaaaaaaaaaatcaaagatacattnnnnnnnnnnnnnnnnnnnnnnttcttctagctgatgtttatcatcatcttcaggcacccatgactttgttctttcccatttgagatgagactttatgagtgactagagcccgaaccattctcttgtaaagaaaacgaatcatgagaaagattgatgtttagatgaggaaaagtaatagaaggaggaatgtttctagagattgaatcaagggggttcccagcaacaaaatggtatctagacacacgaggacgaacgggaatgatcagattcccatcgaaggatgagttagtgttgttattaatgatattgttgctatctcctatggacttagatggaccaagagtaagatcaagattaatatcatcagttgataaagcatgtgagctatagttgttcatgttcatatctgtggttcctctagggactccaacattaagcaatgggttaacgttgttgctgctgctgctaccttctatggacttcaatggaccaagagagagtccaaggtgattatcatttgataaaacatcttgtgaagacccaccaaagagcaagttagacttgtctttgttagaaagccttgactcgatctgttgcctctccaattctcggtcctccttgtgggtggttccgtgaccgccaagggcatgaggggttgggaacgctctcttgcacaagtaacagatgtagatcttattattatactggggcggattgttcact

SEQ ID NO: 27712 - DNA, 1359 bp, Arabidopsis thaliana landsberg
aagaagcatgctctaaagaacgaggagtatgactcaatgctcggaatagtgagagaacttccaccagagcttaacctccctaacaacatactgcctgataaagaaaccaagcgtccttctaatgtgaactgatttttcaggggtatgttttctggccgaagccctacagggtgagatactcaaggggattatgtttcggtctctggtttgaatatggcaggtagagtacattagggtagacggatttacagcttttgaagaagctatgttcaacattttttcatggtttcttagggagtattattgtctaatcaaactttgtatgttatcacttcggtcttttgaacgtaagaatcaagttcatgaaacatgagtgaatattagtctgatgcatgtgcgtatgcaaaaatccatgtgcgcctatgttgctaggcaagcatgaagaataaagatccaaactggatatatcatatatttatctttttataattactgcaaattattagtggggttgatggtattggtaccgtgaattacgcttgcttggtcgtctttttatttttttgataaaatcaaatcttgtatcgtgtatctattattatgattcgtctccttccttttgtcaaaggccgtttcttttcttgagatttatcttttgttttctagctttctggctgtcgttcttttaggattcaagtattcaaccatttgttacaataatacaaataattggatttctccctagtcactttgtagatctcaactaatgggccattttttctctcaatttgaaccacgagacatggtgttggaaatttgaaacggtagattgtgtaaaatgttcaccaacttagacatcgcacgccttataaaaattacggtaaacagaccaaaaagtctttacaaacaatgaccaaaaaaacaatacgattttacaagctgccgaatctacaaattgcactaatctgtatcatagtttcatgtaacaacaatgatgtttttagagtttctaataagaaaatttttaattgatgtaacaaaaaaaaatgtgtagtgtgggaaattttaatatatatcagtgagtttagataaaaatttgaaagttttaactacaattactaaattaaccacgtaatagtgagtcgtaaatctacaaaggatatgcgagggatcgataatcaaggcatataattcggagctgatgagttaagctttagttagtttgactaactacggttatggttaagacttaagcagagtggggcttattagtggattaatctttatttgattctccaatattaaacctttacgctccatccactctccttcacacaagcactgagatcagagcaagaa

SEQ ID NO: 27713 - DNA, 1525 bp, Arabidopsis thaliana landsberg
tcccactaaaaaaatcacttgaggtaacctttttgttataaactgttatttttactctaaacttcaagataaaatggagacacatgcttgtaagtttaagtgtttgttcaggtgtttggagcgttggttagcaagatcccaagagaggcatggccattactaatgagaatttgggtcggttctgaaataaccaaatcagcattggggagaaaacgtaatgattccggtcaatgtaagtaataaaagccatcactagtctaaatgttatggtctatttttcacatgtattagaaaatattatcacatattgtgtctgtatattttggatttgttttcatcgtataggttgggacagctgtctagaaccaaaactcaattcaaagttttcttggtaaagtaaaatataagtttcttacgcaggctctttagacgggtcaaaacaaactgtgatctaaactttatcgtagctatatacacataaattattttccaacatcgtattacatatatcatttgtaaagagtggcctgcttttcaagccttaaaagatcttttttttttttccttgtaagatcttctacaatgtgttctcatgatcctcttcacttcgtcgtaataccctttatggcccaaggccatatgatcccattggtcgacatctctaggctcttgtcccagcgccaaggcgtgactgtctgcatcatcacaactactcaaaatgtagccaagatcaagacttcactctcattttcctctttgtttgcgactatcaacatcgttgaagttaagtttctgtctcaacaaacgggtttgccagaagggtgcgagagtttagatatgttggcttcaatccccgatatgatgaagttctttgatgctacctactcacttgaggagcaagttgagaaagccatggaagagatggttcagccgcggccaagctgcatcattggagacatgagccttcctttcacttcaagacttgccaagaaattcaagatccccaaacttatcttccatgggttttcttgtttcagcctcatgtctatacaagtggttcgagaaagcgggatcttgaaaatgatagaatcaaacgacgagtattttgatttgcccggcttgcctgacaaagttgagttcacgaaacctcaggtctctgtgttgcaacctgttgaaggaaatatgaaagagagtacggccaagattattgaagctgataatgactcttatggtgttattgtgaacacttttgaagagttagaggttgattatgcaagagaatataggaaagcaagggctggaaaagtttggtgcgttggacctgtttccttgtgcaataggttagggttagacaaagctaaaagaggagataaggcttctattggtcaagaccaatgtcttcaatggcttgactctcaagaaactggttcagtgctctacgtttgccttggaagtctatgtaatcttcccttggctcagctcaaagagctgggactaggcctgaggcatctaataatcctgtcat

SEQ ID NO: 27714 - DNA, 1385 bp, Arabidopsis thaliana landsberg
aattctctgcatatctaatttcatttcttgatccaacgcaacccaactggaaaaatgtttaaaacttgtgcgatgaggttaacattagtttacatccataagaaatgtatacataaatgaatcatataccttccatttcgatatttagttctgtgcctaccgtaaccggcacattgctcatcagcaccagcgccaacaagcaggattctagcatcggacttatacttgacccgctggttattttcctctacacttggatttccattatcttcgtgaatccaaccatcaccacgagcagctaaccataatgctgttcctatgttaaggtcctagaacatagcaaaaaaagattgaataattcacatcaagttcggaggaatgtaatcacaatgctcaagactttgaggtttaccatgtaagtgtaagcagaatttatgagtgacataacacgttttgtctcaaagcctagttttgacagatcagcatcaatctcaacaagtttccacctgaaaattccaaaaacatttgtatcaacatagatagtaacagatatatgcatttttcataaaaggcttgtgaagttcaaccttctaaaaggtgcaatctttttgagttcctttattccagccttggcggagatcctatcaggagcattaggaccatcaaaactgacattaaggagatcaacttcatctgaagaaatagatattacttcttttgattagtttcagaattgttggccgagacagaaacagtgtgggggaatggttacattttggatcaaggcactgatgcaacagcgcagcaagaatcatcgaatccaatccaccagagaaaagaacagctactgggacagcttctttatctccctgtttatgccaatacgaaggtattcagaagaaaacacatagcttcagagaaaaaacaagtttaagctcatacctgataaatgctatgaagtgaagttcgccgcctcactgattcctttaacacgaccaaaactgtctgcgcaaatcctaaagctaaaccttgtcagacatgttgagatttggacaggactggaggaatcaaacgattcttaagcagtacctagagaagttgacacagatttgtcttcctgaactccactaagcgatgacgttgatagatcttcaggtctaggtacaactaatttcctttcccattcaatcaattctttccagatggtatttctccattcgtgttttgtaacttcaccacgaatacataattctgaaaccccaaaagaaatactgtacacgccacatggaagctcttcccaatatctataaaggactattaccattttcagtatccaatcctgcaaaagaacagatgttacttgagcttggagtgtacataaagag

SEQ ID NO: 27715 - DNA, 1416 bp, Arabidopsis thaliana landsberg
  unsure (1)..(1416): unsure at all n locations
tttattattgtgtattcgaggctttgaaaccgagtgagaacgctgagtttgggtgttcaaattatacattaatctatgtttgattgtattaatattaatatatgtcatatgtgtttatatggtgtgtgctatatgagtaacgaagataattatacatggttttgatgagtaaatttgatacatgaacctggtttattgtgttatttttttttttgatgaatttggatatgatatggatgaattttggccatcatgtctaaggggaactgaaacccgtgagatgattagaacatctgactatgaccccaaagtttgtctattagtggcccactctaaaatctttacgaaaacaaggttttgtcctttttgttcacggagatgccaaaaagcttccatactctgttcacagtttctatttcaatccctattgataatgattacacacattcacttcacagatttttctaattgaattccctttgaatnttcaactcccgcgctgattccacagtgattctttcttctgctaactgtagcataattaaattagtgacaataatgaatgtttagcattaccaattacatagttttcccctcattattaagtgtgaaaatgaaatcaaagcagcaataattgttcaacaagagaacaaagtttcacataacacaatgcagtaataataataatacacagtcgctaatgttatatcttatctcaggactaagcaacaacacacacacaaattctaaagtttacaatccaaatactgaaagaaatccaaataaatctaattaagctaaattaaagcactctcttactctctaagagattccatttttcagtaactaaagattccgaaattgcataagtaccgattaattcagcacccaaccggagcaaccaccgtcggcttcaccttcggaggtctcccacgtcccctacgctcacctgtcgcctgagctgccggttccggcgcagcaaccgtctccgaatctgttctcggtctcttcggtggtcgtcctcgtggccttccagatccggtaatgaccttctcctggggaggctccgatggatctttcggcttcggtggacggccacgagatctaggcggatctgtagagacgacggtggcagcaacaacagcagcagcagcggcgtcagattcggcctgagtcttctgcttcggaggacggccacgaccacgcttaggaggagcatctggatctggtttcatataattgttcttcaccatgattagctgaccggttttcttcatctggttgagatggtagctgagcagcgtcgtgtgtgccggcggtagagtttgttgagtcgactcgatgtgcttagcaatcgtcgttttgttgcagccgttcttatcgttcaaggactcaatcgctatccattatcatgta

SEQ ID NO: 27716 - DNA, 5031 bp, Arabidopsis thaliana landsberg
tgttatcttctttatcatctcctgacaatccgctattgcattacttttgtatctttccagctctttcttgttcacagaaccaacagaaactccagcatgagcaacgttcttgccgcttttctcaccattttgtttctgccactgtgattttgaagaatccgagaagattgagctcaaaccgtttgaagcatgacggtggccagggctagatcctttgatgattctgaatggtaaagaagaagatggggtttcttcaatccatttcttttctgatattagcaaagtaactaaatgaagcatgcttgattcatcgagcagtctgagacacgaaggcccttcctcctgcacatttttagccatcacctccctgaccaggttaagacggaacagcattagctgaatactcgtcccaaaaaagacaacaaatggctaatgcaagaaccaattgtaatagttctgaacctaagatagatttacatattaatcaatatctaatcaaagtcctgccaaatcaggagggaagagaatgtacgcaccttgtcctcgagtgagatactatagcaaagcctcttggagaattaatgaaagattcaatatcactccaaaaatactcttttgcaaatatgtcttgtacttgagaatcaacattgacaagctcctgattcccactagagtctttgctagactttgtattctttccccagaacttgaaactcttcaaaaggcgacctaaaaagcctggacttgcatctttatctttactgtctacgtcatcagctccaacttttacctcatcgaccgactcagcaacgaaagaaggtgagatttgagacatgggcacagttccctgactcgatgactttaagtccttatcctctttatgtttgtttccacttccctgacttgatgactttaagtcattatcctctctatgtgtgtctccacttccagaaacgctcttcatttctgggagatgctctaattccatctcaggtgaaccataccacagtctttttagcttttgaaaaaagccatcttccatggacgaatcactccacgcaacaagagcgacttgattcgtctcgacgggtttaacatttgccttaacatccttctggccgaccagaattgggtcttgagaactctctgatgattcttctttaacaattttatcactctccaataccttttcctgcttctttccaagtaagccatctcttcttctttcagcagcaagctctacatcgctaattagctttggtgatggagcattaacagtttccttatctttaatcttctgatcaacagcagtagacaaacgaggactagaatcaagccgcatcggaggcttcttttcggtaacagcccgaatcataaacaagccttcacttactgtagtaacctgtaagatatctggcatggataaaagaaacttcgaaaacttcttatgtccatagaaatctttatcaatagccaagttgctcttactcagctcagcacgtagttctgtaatggcagcccccttgggatataaactcactatcgaacgaatcttatcaacaacttcttttggaataggacgaaggttaacaacagcattcgaattcacagactcggatagttcttcgattttcacactagacgaagattgctcagtagtggtagcaatagcaaatggatcaagaagaggaatcctatagtgaccataccaagagttataaggaccatcaggaggctgattaaaatgcttaccagtaacacactctcctttaatcaaagcatcccaatcccacataatagaagcagcactacacaaaacaccaggagctgatgatttactcgcaagcaaaatgttgtaattgttcatcctcaatctatgtaacacacttgcaaactccttatcactagagattagcaaaagatgagctggtggtggattctgagaaacccaacacataagatctgtgattagagatctatcagcactgttcttaccaccgttaggaacatgagtgagactgattcctgtagcggagagagcgtcttggtttgatctggggagctgtaaaacgtcaccgaaggctgtgattgtgattggtcctttgattccgctgtttctgatagcggcggtgattgattgtgctactttgtagacattggtgtctacaggtaagttacagctcaggaagtcccaccagaccgaaaccctaacggatcgggactcttcgtcttgctgaggacgtcgagagggagaatggctggatccggagacgaaattggagccggaggtggttgtggtggagaatggagaggaatgaatgttagtgatgaaaagggtaattgttcgacggtgagattgggttgtggaggaagaagagaggcggaagagaagggatttggatggtaaagatccaaacttcatggtcggagagctatttttgctccgggaaatggagagactgagagggttttaggagtgaggaagacgaagtaaaggaaagcagagcttaaaccctacttattattttggaattgtcgataaccgaatggtatcccaattgaaccaaactaaaccgtactttcgctaaaccaaaaccaaatagcgtatggtttaatattctaattcaataagtacagtaattagggatttcaatttttgtttgagagagagagagagagagagatggtgacgaaggagcaagtcgaagcttcactgacttcgaaactaaagccaattcatctcgtgagttttcttagactgctttcttctttcaatttcatctattgattagggtttgaaacttttgggggaaactttgaaaccctaatcatcaaattgatctgggaaaattgccaaatttgagatttttgacctgctcactttgatcaaaatcagaaactttgatagttggatcataagaggtactatgtattgtaataatctcagcatctagattatacatcactatgtgttgtctttgagctctgaaacagaatataaaaggtggttgtttgcgtaattaggtgtaatatgatgcagtggaaaaactgagctcaggatatgatgacgtagtgttcctgatgtattagcaacttagtagtgagtgttcttgtcggaaaattttatttgtgtcatggttttttgtgaactagaactcaaaaagcggatccaaggatgtgtatagtttctttgctttataacatgtgaagattgaagttacttcaatgtcaatctatttcccttttcacttgattcatgtgttccaattgtttcaatctttagcttttagaattttttagtgacattgtttgtttttgtgtgtaccaggaagtcattgacatatctggagggtaagtaccggattgtcaatacacatttaattctctggcttatggcataatttcttgttcttaatatcagcaaaactgtttattgcagctgtggcgcgagttttgtggttgagattttctcggttcagtttgaggggaagagattgcgggagagggaccgtattgtgaacgctgctcttgaagaagagatgaaagaaatccatgctctctcgataacgaaagctcaaactccgcaacaatggaagccaatatcacaagactctgcaacaactccaaccacagaggcttgaagacaaaagaacaacaaacatagctgaaaagctgtattttactttgactttgttccatggtagctaataagcttgaacttttataagcatctacggcgaaataacttatgaatttgaatacattactggctgtttatcatctgcataatcgaaattcaacatcttaacagtcacaaacattctctttgaaaaaaacaggagcaaagatctttactcttccttcttcaccttcttcttggactttgctgatcgttctgaagagcctgaaaccgcacttgttgagcttttttgtttacctgaggaagactctgaattttttctttttggcgactttggagtctcggcgaagccagagaacatgctcttctctctgctgctacgtgtgccgcttttatgccggctgctttgagtaaggttagatgatttcttagaggaattcgtcactgatccgacaagcttctgttgtgttctagccttcattttctgaagcaactcgtttggttcagggtaacgaactaatgcaactcgccgagtaatcttcccaactaccataaaacgaacaacaacagaagaatcattattaacgaaacaggtggtaaaacaaaactgtgtaaactgaacgaccaaaacctaaacaagacacaactgtaaagtaatgggaatataccaatcattgattcttcagaaggtataatcaactctgcaccagcatcttgagaatgaaagctagcaagatcatactttgcacctaaacaaaggtgtaatgagccagcttttggagatcaaaactaaaatatttctatgaaagaacacaaaacataaccataccatttgaatccttgaattctccaaataacccatctttgtctggctcaatcttaagagtgttctcttcgatttctggaaactgcgataagaaaagtcatttagctgtagaacattacatgaggatcaaatttgcaataaagaatcattctctaaacatacttggcctaaaggagcttggataagccaaaactcatcagaacgcgtcaaatcagtgtcatctagctgctctgcgccactgactatgaaatctccggaaactttgaaatcgaaatccatctctgctcaaatcagctctcgcgatttcacaaaacctgcaaaatcgagaaaacaagtgttcaagatagcgagagctttaacatatataataaacaaagcttttgaacaaactcaaactctgtcaaaatcgcaattataaatctcttcaaaagacataagttagtaagaaaaaacaagaaactggatgcaaatcggaacgaagaagaaagatggcttcgtcggcggcggaaaagagagagaatcgttacccgagaaatagcaattcggcgatgacctaaacccttcc

SEQ ID NO: 27717 - DNA, 1194 bp, Arabidopsis thaliana landsberg
ataaggatctggtcttttgtttgtttaaatgtttatctgcaactactggcgtctctaatctactcttgctaaaatgcagggggtctttaatgttcaattgctgaagttccttgattaatttcagagacgttgtcagacatgagtaaaggtacgtgacagttaatttattctttggtttgccttggaacacttgatattgaaagtcttagtgaaatagggtgttgttaaagactttctgtgtgtttgttgatctgaccaatgaaataacaaacacgaaagggtagattgatatttgatagttataacaattttcagcaagattttaaaacaaaagtttctgaagaagtcaacggggcattctgagaattgaactcgggacctctcgcaccttaagcgaaaatcaaaccactagaccaaatgccctgttttatatcttgttttgttgatgcattccatttacactctctcatttgttgaagaggaattgttgcttcttggttggatgtagtcacaatccatttccttttctttctgcagctcactctttgtgaatcctgctgcttccaatatgtgtcggtcgtccctagatgaagtttactggttatgaagatttattgattggacttaaaacctcggtatgtttttctagtatgcagaaggcacttaataatgaaagtttgggggagtttttgttaatgatttctcttgctgactaaaagtgaaatatatgttcctcagtttttgaaggactaaggaaaattgatctctaagcaaaatttcaggtagaaattagaacgtatagtttggaagagtagatgtggcattccaattatagatattggaacctctcgaagccaaagcaggaattataccactagatgatgctgtcgtgaatctttttgtttaggggtttatacttgatgaagctggaaccatacatttgcgtaaatctgttattaaatgttattttgttaagtagaaatgaaacgctatagatctaattctgttagttgactgaatttaagcatttagtgcaaaggtggatagtgtgttactattattcaatcctgatgaactttacaccaaagtactcaaaaatgccggggggcatacctagaatcaaacttaggacctctcgaacccaacgcgagaatcatgccactaaaccaatagccctgctgtttagtactacaa

SEQ ID NO: 27718 - DNA, 1737 bp, Arabidopsis thaliana landsberg
  unsure (1)..(1737): unsure at all n locations
ggaaaattcggttgaacatgatcctaataacaagccaaaggactctcagacttctaactaatacttagccttactaaacagttagaaagatagtggttatttaagtattgtccactttgtttattaacactagagtgtagattttcttctcagacaagcaaatctcaaaatccaaaatatggtttcgaatcagcgtgtacggttgtttatgctctgtttttgccttgttaacaacgcggttatagcagccacggaagatgaaaacgtcgagagaaaggtaataacgtaagagtgaatagtgtttttgtgttttgtctggtgagacaactgaatctctcacccttttcctctgtttctctttatttacagccttacattgtgtacatgggagaggccactgagaattctcttgttgaagctgcagaaaaccatcataatcttctaatgacagtgatcggagaagaagaatcagttcttgctcataatatcgtcatcggatttttatttttaattatttacttttgcagcgagagcaaagggagagaggtgaaaatctatagctatgggaagaatatcaatggatttgtggcaagactgtttcctcatgaagcagagaagctatcacgtaagtaacaaaactgtcagaactgttttggcttttatcttgatgttattgattattgattgttttttctttgtggattgtttctttgcaggggaagaaggagttgtatcggtgtttaagaacactcaaagacagcttcacacgacaagatcatgggactttctaggacttgttgagtctaaatacaaaagaagtgttggaattgaaagtaacatcattgtgggagttcttgacacaggtaaagtaaatttactagttagaactcgaatctgaaaatatcgataaaccccgatttataacccttttttattgttgtcaaaaggaatcgatgttgaatcaccgagctttaatgacaaangcgttggccctcctccagctaaatggaaaggaaaatgtgtaactggaaataactttactcgttgcaataagtataaatcctctgtttttataatcctctgtttctgcaacttctctactctcttctttttactgaatttggttttggattaatgttaaaacagtaaagtgattggagcaaagtacttccacatccaatcaaaaggccttcctgatggcgagggagactctgcagcagatcacgatggtcacgggactcacacatcttccacaattgccggtgtttcagtctccagcgctagccttttcggaattgcaaacggaacagctcgaggtggtgttccttctgctagaatagctgcatataaggtttgttttcttcgttatatcattactctgttttcttggaacataaggaatatctgagacacattatcctctgtttcaaattaaggtgtgctgggactcaggatgtacagacatggacatgttggcagcattcgacgaggcgatttctgatggggtcgatataatatcgatttcaattggaggagcctcgcttccgtttttcgaagatccaatagctattggagcgtttcacgcgatgaaaagagggatcttgacaacgtgttccgcaggtaataacggtcctggtctctttacggtttcgaacctcgcgccgtgggtaatgacagtcgcggctaactcactcgaccggaagtttgaaactgttgtcaaacttggaaatggcctcc

SEQ ID NO: 27719 - DNA, 1044 bp, Arabidopsis thaliana landsberg
aattatagatcagaaaattctcatcaaatccgttaaatgttgaaggtaagctatgaaactctctttcgcttttgtgaatttgaaaagtcctcgaatcccctatacctgatcatttaatatgataaaacaaacaatccaataaaattgcatacaaattttggatctatttctttacttggcacgagagtttacaaagtttctttcttttcacttgtgcaccgagttgctgcaaatctgttttcttctgaagagaataaactctcccaacgatatatatggaatgtaataaggttaaggaagaagctatcagagcagtggaggttgctgagaggaaactttcgcagaatgatttacgatggggcgattaacaaggctcacagtttctatccaaagcttgatggtttggagcaagtgttgatgattatctatgtttatacatctgcatctaaatttgttttggtttttctgattttaattttaattaatttttgtttatgtgtaatattacttggcacactttcattggttaaactaagatgaggtgaataaagagtttcatgaacccaaaaattattgtcacaaataagcttattgtcatgtagaaacttcatatttctttctaacagaaaaattacgtttccaaataaaataaagaatatccaagcaaaggatatattcttgtgtggagattaatcaacgaataggataaaacccaccaaagattgtacgttaccgtttaccgttatgccctgcatatacgtacagacacgacattcacttcacttatgcatatatatcccatacacagtttgtggggttggtccaagtaattttacacgggaatgagtttttttatcggaaaacatggatcataaaacgtactaaactaccactccgacccttgataatgggggataaaaattttttacctcaccattttcaaaatagccgcaccctaagcccctctatgatgagagaagatggatccctttttgatgtaactaccgccatatataagaaagattcttctacaactttttctat

SEQ ID NO: 27720 - DNA, 790 bp, Arabidopsis thaliana landsberg
ggaaactggtcgctggatgaactgagacatgtttatgaaatttcaatggaagaaaatgctccgcagatattgggtggattctgttggataagcccatctgctagaggcggctggctaatcacactatcaactgtgctaacaatattttgcttattatgaccaaaaggttctgcctgtgccatttcagcagttgtaagcaatgactgtgttgacctgcttgaagatatttcacgcctgacattaccatcaccattactcatactagcaacaacggcatctagaagattctcggagctggattcaaatgtcaggtgactatggctcatatcatttgttcgtcttatagctgcagcagattcaaactttgctagctccccataatcagtgcttgttttactgaacgctggccctaatgcctctaacagctcactgccagaaaaagaacacaaagatgcagttaaagcatcgaactgacttgactcacttttttcctcctgcctatgttctgtatctttcacaaatatacttccttggctctcagatggttggaaaacctcatttcgacgagaataatctttatctgttttcaacgcagtaagtacagttgaatcaagttgtggatatgatgaacctgcttttagcctatcactctccatagctaaagcagatgtgcctccactattacgcacatgattcctcgagtagtgttggaaattgggatctaaacctcttgagtatcggcatccacctggtttcttaacatacatcagctcactcatatcacttatat

SEQ ID NO: 27721 - DNA, 1266 bp, Arabidopsis thaliana landsberg
agttgaagaaacggacaccgtcatgcccgaagcacctgccggcatgcatgattacatcatacgacatgcttcggggaaaaagctatctgaggaagaaactcatgaggccaaccattatgcaaaggagctgaaatatccgaagggggcagtaatattcaatgggacaaatgaagatgacttcttatacttgcctgcctgataacaaagagctatctgtctgccgagagatgggaagaagcataggctttccgacgttagaagacgggctctcagtgttatcaaaagatgaattggccgacagcttagcatacaacaacttaaaggtgaaagaataagatttttgtacttaaaaacaaaaaaaatcgtttgcttatacttaataccacacccctttgcagggccttattcttagcaacgccctcaaggcgcaaaaaagcgctgaagacgagggatataccatggccttgaataaccttcgttctgaagtaattgaactaagaaacgaaggtcttgaaaaagacaaaatattaaactcattgttgaacaaaataaaagaagacgaggctatttccaaaggtcaagctgaaacgcagatatgtgaaattgaaaaccttcaaaagcaattggccaaagctaaattgaaatgtgctattgccgaagctgaccaagatgccagtgattactggaaaaattattgggaaaaaacagttgtagaacttcgctcctcaaaagaaagatgttatgaaaaatctgtagaatgtgtgaaaaagataaaaactagcttcgccaatgttggcgcatattcaagtgaagacaacttcgtacggggcgatcccgaagcccaattgaatggatcagcggcgaggccgaagcctttgaggagattttaaatgaccgtggagacgtctgtgccttctctggtgcaagaggagtcgcagctattttggagaaagcagggtgcgaacatgtgaaaattctggcccaagccgaagatgctttctctgttaacgatacaaaagacccctcggccgaagcaagcttaactggtggaaaattcttcactgacatttgggaaaacggcggccgagggatggcccacgaaataataaagaagagcgaaaaagatactcatgatgctagggaagcaacaaaagcggctgaaaaagctgcggaacttgagagacagataggtattgcttaatgggttttaactttattgtttatttttgtggcttcgaactgattcacattttctaccgcagctga

SEQ ID NO: 27722 - DNA, 703 bp, Arabidopsis thaliana landsberg
tccacatgttaggcccaacatgtaaatcaaatttgggatttacattattaccatcataatttccatatccgaaccctgctcttatcaaatagttgatgccttgctctactttcagattatagcagtttcgtattccatcgggaaaatatctcaaatccttgtactgcctgtagatatatgtgttatcatccccagcttcaccacgtaaaccacttaaaataaaatcagcatcagatgagaatgttaatccggttcgtgggtcggtataaggagactcattaacgggtaaaccgcaatccaaactgatgaatcctggcaagatacaaaatgtattattagtgaaaaataatgttttccttttgttagaccatgaagcttataaggaagacaatcaaaagttttggaaaacagagaatcctttattttctttaaccaaatctcttatatctgtaatcgttaatattattttcatggtggctatgcgtacaacaaagtagaaatcggttagtgatctcgaccagtcgagcaagaacactcaactacttggctaatccttaagtctttatatgtcaaaaagtgaacatgaagcaattattaaaaaaaggtatatagagaaacctcgttgatcaggcggctgagcttgaacatgatgtgtcatggcccaagccccaatgatgaacaccagtttacgttgacgacgacc

SEQ ID NO: 27723 - DNA, 2024 bp, Arabidopsis thaliana landsberg
aaaagggtaaaatgtttcactgtaaatgactatataagacttggcagttacctggtttgtaacgaaagaaaaaaatgtccgatagttacattgcattactgttacagaatacgtcagtatccaccgatgtcctcaagaaaaagaatataacatacacgtatgaaactaatttggattcagctgttcaacagataacaacaggtttattcacattcgagttttgatagttttcaaacaggggaaaacagcccgggccaagatattcgaccataatatatatgtaaaaaattactcggaagaacctcaaataaaaaccacaaaatgggctatatattcatcaaccctcttaagttaacgtacgaaattttacataaaaaacgatgaaagacgttattctttcctttttcttcgtaaaatactcctacaacgttataaacacttcctaaaggtggtttgatataaaccctctaagtcgtctaaccatccaagacccaacacaaaacccgtggtgtgttgatatagcccacacaatctctatttctccatctcctcagcttcgccagtgggagatgatagcctcggccgttttgcagctcgcttctcatcttcttcttccattggctccttttgatcacaatcatctccaacatcttcactcgtcttgtccccaatttcaagatcatgctccaatggcttctcctcatctctgtcattctgactcgatggaacaacaagctcaatgtgtgtagaaacgggctcttcattctcagtggtatggtcggcagtgttagaacccacggttgcagattttaaagagacggtctctcttggaggactctcgtcgatttcttcttcatgagtattttctattgggttgtcttctatgataccgattgaatcattagaactattcgaagtttcagataacaaatcagtctcgtcttccttctgcaccaggggaataccaaggttccatgaagagaatgaattagatgctctcggagaggtagtttccgtgatgcattgaaagatgccctctccagcgttcaaacacataaactgttcaccagtttccatgtccacttgctatccaaaacagagcatatataagaaaattataattggcgtgtcaaaaataaaaagattttgtcattagcttgcggaacttttagtaccttttttgccgacgagtcgttactaagatgataaaacgaagacggatcctcgaatggttgttgtagttgttcaagtaatgatcctgtgttattggatcctgaatcgaataaatctcttagtaccatacccgaatcattagcagcttgtatgtgcctcatggaagatctttcaagcaaagtcatttcgattccttgatcgtcttgcgtctgtgtcatatccccgttacagtctattagggggctgcatctctcagagagaacctcaatgcccatatcgtcattgacggcaactggactttcacaggactggttttgttcattactaacttcccgtgaccggttttcaaggagttcaaatattaacttctgaatcagagtacgcttcaatgatgcctcggcaggaggaaaccagttcagataaagctgagaaaatcagagaaaaagcattatcagcaaatgaagatactgaaaaaaatacagacccagcagctcttagaggcatttcaacttctttcaaacggactcatgaaatcaggaagctcgcaaaagattctattttgactggtctgcaaagagaccacttctacagtaagcaaaaaaaaaaacagaatacacaactggagacaccaagaaatctaaatatcctagcaagcatctgcgaaatcattgcgggtgaaaaagattcagtttggcaagcttattaaagtagcaattagaatagacttacaaagttggaagcattatatatcttgaaaggactaaaattaaggggagcttcagcaagaaatagctccagatagtgcagcagaaagaggccacagtccaatgagttttcctgctgggcaactg

SEQ ID NO: 27724 - DNA, 1319 bp, Arabidopsis thaliana landsberg
atgatatctatgtgtccagactgttccatattgagtagtcccttgaggccttcctgggctttgagaagcttaagaaactcttctgtctgtgcaaaacacaacgagatatacagcaagatatgtacttggcagcatcccaatacaaagcttctttcatatatctttacacataggccgtacagagaatacgggaagccatcagacgcaaagttctataagttgcgcttaccgttcccacataaattggcaagcgcaccagctaccattcttagagtctgtggatcgtctgttttagtcaccatctttgctaggagttgagcacctcctttattcattataagatcttgactcttctctgcggttaataattcaatgaaaacatataaataaaccaatcacatattttccattccaaaatttaataacttgacagcagggaaaaccatggcatgaagaaccgtctattgcatcttacatatctaacattcaggcctcgtaaagaaatgacacaaccacaagggaacttaagttctgaatcagctctgcttctcagtagtaagtttaacggatttatgatatcataaaagcaattggaccaccaagagaagtgctcaccgttcattgctaaattagcaattgcaccagaagccaccctgagaatcgttgaattttgagatgactggactagcataagcaaagcttctacacccccttcctccacaatctttacctgattagcctctatacatacacatacataatgcaagttatttaggtgctgtgacaaacaaagaatatttacacatgttaatagagcgatgaaactgcaccttcagcggctagattagcaaccacttttactgcttgaatttgaacttccaagtcttcagacttaatgagttgtaagatcttctgaattccgactaaaaccgaagtagagaaggtgtcaattaatttctcccacaatgaagcgaaatataagaatatcaagctaaaaagatctcaatccatgagaaaatttataccttcttcacaaagtctagccatggtagctctctgaccagataacgacttttttaacccttgtgatctctgagagccagtttgagctccagattctgctgatccttttgaaagatcttccttcatatatcgcttttcctgtggaatgaaattgacttagcaagaccataagtacacaatacatgttaaaagttgaaacaagctcatcgtgattcacctcaacaacattttcactttcccttagattcttctttagttttgaaagctcactctccatttgctttctctgcttttct

SEQ ID NO: 27725 - DNA, 1062 bp, Arabidopsis thaliana landsberg
gttgcgctggggaggcgttcacatagctgttaagaaaacccacagtagcgatttataatcagtaattaggacttcaataactactgtttcacaaaagtcttgaaatgacaacttattggttacctcgttgacgtagttcaatatgcgctcttgagtcatgttttgcctcaactggctctggatccacacaacagccatctcacatgcagaacacgcagcatctccaacaccattagacaatttggcgttttccttgtccaccaccgactcaatgcccatactagataatttataaacaaaatcatactaaatatgagcagatcacacggaaaaacaaacaagcattccaaaatgaagatcctagcttaatggcaatgactacagattataactttacctgacaccacgggtaccatcaaaagtacacagaccaatctgcgagcagattttcttcggttgggtctgcaaggcgcaagggggatgaatggtaagccaaaataatttgcacagcatatgacttgtcacagattttattagctagtccaatattaagcacactaacctcagacaaaagtaaatccaaaatggtctgcccgtattgatccacaacagtcttgcactgctggctaacaactccagctgctccaatagcatggtttatcatggtgattatagtctacacagggaaaaaattgaaatattactacatatactagttaaaaaaccataattctataaagctataagcaattttaattcttgcttaccgttggaccggcaagcaaagatgtaccagaatctgctatcgcagaacagccactttcacagaaccctgtataacagtaactcaaactttagaaccagttgtcaccagcaaacataaatagcaaaacctttttgaatttgtcaggaaaagctatatatatgtgttataaagaacaacgccaatcagtgttacacataccagtgggtgcaccgccaataagaacatcacccatgtcaaactataacaaaatatatatagcttgaagtagatcgtcacttggaaacgttatgagaaaa

SEQ ID NO: 27726 - DNA, 1497 bp, Arabidopsis thaliana landsberg
gcttggtagagatatttgtataaagccttttagcttcaaactagatggacttcccgctcaaattgggatttgaaatctagtaccgtaaattattttgcttgctatactaattttttcgcaaagaattgattataaactacttatttcttacaaggtatataatggttagaagaatagaacgctgcaaaacaccatcgaaattcaaagtagcacaatctaattcaaaaatcttacccagtacattatggttgtgttctactctgagttttgcccttcagaagaagtctttggttatccatatgaattggactacaacgatgtgaaattcaagtttgaatatcatagcaatgcttgttcttgtgtcaaatttgggcttgaccacgatacgcaaacttgtgacttgtcgtttaagagaataaaagaatgcagagtacggcatttacatgatcctctccatctgaggatggtagtggtaggagcgctcaaactgagaacaaccaacattccagagaaattgacatagtcaatgggagaagcaagaagcgatcaagctaatgcgggtgaagctttgaattattgaactgaaaagtgaaaactagatatctaactattgattcattttcaggatcaactgcaaaatagaccataggaatttaataaatttgattttattatgcagattacggtaagaacatatgaagatccttccaacttactctgaggtaaaacagtagcaaacacaagcttgacggctccaaatttggaactttccttagggcagggtaaagtttccgcccagatgtcttcttctacaagtatgatactattgttatcagtttcttcaagcaaatttcatggcgatggaacatcgttgtataattccctttctccttctgaacatagatgcggtggctgactgctaggaacccttcgcgtgcggcaaaagaaaaaaaccctagtcgcctctcctgtcgccattttctcggctgacgtagcctaaaagttatgagttctttcagggcgatttaattttaaccactagaagtacaataagtcttctatgcaaggcgaagtttctttgttattaatttattattgtgtctgtcatcatactctcttgttaggagatttgattttaacgtatataccactacaaaaatataacttgtacagtaagtcttctatgcaagcctgcaaggaaaggaaggaagtttctgtgttaatttgttaaaacttgattgtgtctctcactatacgctcttgttaggggatttgattttaaccagtaaaataaatatcttgtatagcaagtcttctatgtgagtcttcgacgaaagaaagacgaagtttctgtcttattaagttattattatgtcttaatacatcatactttgttaggacaattcctatcaattaaccactaaaaaaatatatcttgaacaaagtcttctatgcaaatcttcaaggaaaggaaggcgaagtttctgtgtttaatgt

SEQ ID NO: 27727 - DNA, 2525 bp, Arabidopsis thaliana landsberg
aataatggaaccagtagagatacaaatgagatttgtccatctcagcctcaagatgatgaaaggtacttgtgggggattttacatcctctgagagcttttagcgcatcttatagaagtgggtccttgagatattgcaatgttggccgtttagagaatagctgagctttatgtcgacgtctctgggattctttttgttttgtgcaatggtcatgcttccagtaattgtttcaccctcgcatatggttaacacatcttccaggtacagcactgtttgtttccaatgcgtagcccgcgatttcggtcctgcattgcatgttgtgacttgtaatgtgagtaccaaacattgacaaacatcaacatatttttcactcatgtttagggaagtcgaacctgttgagaaacccatcttcttgtgacacatagtgaatgacacatcgaagtaggctacaagggcatggatatggtcatttcgttgtgcgacgagcttaaacggagctgtgaaggaagcatctccagcagccatcttagagatatccattgtctttagtcaaaaaagccaaaggccaacaacaaaaggaatatgcattagctacagaaaattagggagatgtaattaactactacagcacaatcttacttaccttcagcagcttgctatcagtcacgatttggttaccatcaacggtgtcaacaagcggttctgtaattgctcttctcttgatgcacgacatgtcaaacccatacacgtcgtcccaaactgtacatgaaacgacaagaagcaaagccgattgcaaaaaaatcaggtttcgaagataaatgttagcaaaaagaaagacaagatctttcatattactcacactctactttgtcgtctttataatgagcatcctcaatggcagtaacataaagagaagctttatctggtagaacaattccaccatcaacctaaccaaaaagaaccaaaagcacacaaaaatgttcaaagctatgatgaaaccataatcaacatatgaacacagaaaactctcacttacaagccatttattgcgagcatacaagacggtgtcaagcatattttcatacaacagaaagtaacccatccattcagagataatcacatccactttaggaattggaagttcgatctcctcaatcttccctttcaaaaccgttataactgccaacaaaacaaacacaaacacttgtttcagccaactaccatcagatcataaaccatttgaataacactctaaacaaatacataccatctgagaatccattcgacttaacaatttcctttgctgtgtcagccatttgagaacactcaacctaagaaccatttgtcaaatcagatcaataaaagccaaactttgattaacggagaagataaagagacatactgcgtaaacgtgagctgctcctgctttagcacagaacagagacaagattccagttccagctccaacatcaagaacaattttgtccttgataagaaacttgttcttgtaaataacatcttgataactctttgtcctcactacatcctttaacatttcctaataataataacatcaccatagaaaaactgttatacacattgcctaggtttcagaacacaggattcaaataaataaaaaagcaggagactttacttacttcatgaatacctgcaaaaatcaatcaattggaaacagagtaagcactttgcacagaataagataacatgaagaaagcaacagtatataatgaaagttcaaggatttataccgaaatgagagtaagaatcgaagtagtaatcggcgctggtaatgtcatcagcaacatcggcattgttgtcatctccatcgaacattgattcatcagcatcttcgaagtgtaacttcgtcgtctgagtttcatcagagccgttgttgttgttctccgtactagtcatttttttgcggcaaagagagaggtttgggaggctaacagattcgaataagcaaagatttagggttttaggatggatacgaactttatgttatgtgtatgattctatttcagccgccggttcaattttgattgacagacaaaccggtttggtttaccgatccggtttggttgttgtcgtaattataaggcagtgtagattgaaattggagtaacagattctgacgctggtggtagtggcgagcacggccagaaggtatggcttgcttacgatcaccgattcattcttcttttatttcgttttacattctgatattttggtctaaatttcttcttctctcttttggattttggtttttagggttttaaagtttgtttttttatatgtctgagtctcagatctaatttgaaatctcttcactgcgatattgctttttgggttttaaattgcttaatttttccacaattgggattcgttcgatttgttattctggaattgagcactagggttttagtgatttagcttgataggtgtgaattcgatgaaaagccttaatcttgtggatgacttgattctgagactacattttttccag

SEQ ID NO: 27728 - DNA, 990 bp, Arabidopsis thaliana landsberg
tggttagtttcagggtaattaatttcgcagagtccatatatagttttaacttattagagtgggttgcttcggttctgaagaaacaaccattaattatctattttcttaataaaatttcctcagaaaacatgggtctacacatccaacatactacaattcttagatacaaatgaatcaatatctgtaatcctcttttccttctaccgtcacaaaactaatgtgatcctcttatctttctctctctctcgttcatttttttttgtcttaggttgaattaaacacataatatctatgagttctcacgtggttgatgatcaaaggcaacctaataactcaatctcgagtttaagttctaaactaaccaagccatggatcacaaccacaatcttcatctttgtcttcttcttcttcatcatcctcgttggagcttctctcaggtggatggacatggtatatctatatctatacataattattcattacaatctattagtaactcaaatgggtttccctcaaaaattgttctttcttacatagtttttaatcggtggaggtagaatcaaagtgacaccaatatttacaagaaacaccaacgcaactatccccaaggaaaaactcactacaccactgaacttcacattgcaatgctcactagaccagaacatagcaacccagacgtgtcctgcaagcaacccggagaaatcacaacctagtaaggacgagccagagacttgtccagactacttcaggtggatccacaaggatcttgaagcatggcgtgagactggaatcactcgagagacgttagagagagcaagtgataaagctcacttcaggctgataataaaaggaggaagagtgtatgtgcatcaatacaagaaatcttttcagacaagagatgttttcactatatggggaatagtacagctgctaaggatgtatcctggtcaagtccctgatcttgagcttctcttcatgtgccatgactca

SEQ ID NO: 27729 - DNA, 1862 bp, Arabidopsis thaliana landsberg
gtttttcttgttttagttaacaatttttctgtttagtttgatttcaacactaagatctttccgtgttaacaaaagaactttgtgaatctgatccttaagtattataatgaactcttaatttgagggacttacttgaagtctaatttgatatatgtcaattaccaattaagaaagccttcccatttgtttgatacaacacaatcgaggtgacacaagtatggccaaagagatagttcacgatggagaatcaaatatcaaactctgcctcaccaaagattgatgtatttgaaactaaatacaccatgagaaactctcatgtcagaaaatcaaaactcaaactgctaatcaaaataaatttatattcaagagttgtatatatatatatatataaatactagagtcgtcggatgcatctaaaccatagtccttgattcatatatgtgacgttttcatctccacaaatgggtaattgtgttattacatagtttaaccaagacgacatcgtctatatacaaccatttagggcatgtgttgtccaaattatttttgctatgaatcatagcgtataacaatgtttgtaccaattttgtattattattcaagtcaaaacataaaaaaaatgtttgtttttggtcaatgacctttacgtaagtcacatacaaaataaaattgtaagaaagatgcatatagaatctttaaagcattctgaaatttgataaaagtagacattaataatgagagtggaataatataattatatgcttatatacatctttcttacaaattcattttgtctatgaccctttactaatttagataattacatactcttatcacctctctcttagttacagttaatgaattatgaacaaaaatatggtaatatgacattaatgtgtttaaccttcgaaagatatatcgatggcgcaagtaaaaaaaagagttgaaacgagtttttaaaagagagacaatttacatgagatatttttcgttttaattcttagaattgaaactgttagttactctcaattttgttcattaaacactctcattattgatttctcttatcagcactgatggtattagacctgtggcaccaatagcacctctggaggggttttatgcaaatccaaaagttaaagatgtcaattggaattggaagtaattcaaagggcttttatgcaaaagtttgtttttctcataaaagtttaaatggaccggactatagtctgggtcgcaattaaaatcgcacaaaattcccgagtcagagtctctcagcttcgaagcacgagcgagcgaggcaaaccaaaaagaatccaatttacatcatcttctccaaaattcagctcgaaattttcaacctttactggtttaatggacattctccagaccgatcaagcttcctcaaacggtatacgaatctctctgtgaaaaaaattaggtctttcttctgattttagtgtcactacattatatgcatgtcgttcccaaacccgattttgtgttagttgatccaaatatttgaagaaattatgagtaattttgcaatgttctgaagccaaagttgttgtctttcttgtttttgtttatttggagagtaatgtgacagatgggttttgtttacattgtgatgacagggtactataagaatgtgcataaaagaaagcaaaatcaagttgatgatggacctgaagcaaagcgggtcaagagttcagccaaagttattgattactctaacccatttgcagttagtaacatgcttgaagctttagatagtggtaaatttgggagtgttagtaaagagttggaagagatagctgatatgaggatggatttggttaagcgttctatttggttatacc

SEQ ID NO: 27730 - DNA, 2153 bp, Arabidopsis thaliana landsberg
aaaacccatcaccataactctttctttcttcggccgccgccacaacaaaatgccctaaatctccgaccacttcaatcaaattctcttcacatagaactccctcactgtacactctctcaatctttctcccaaactcatgtacaagaacatcagtcttcttcgtcttcgtcccaaaatctttactttttgctaaaaccgcagaagtaaagatcggagccatccttcccggagaatcagaagcatacccacgaggcccatcaatcaaaatcacatcccaatcaatctcataaacaaaattaggcaaatcgttaatacccaatttacaatcagagaacaaaagattctgaacgggtctacactcgggtcgggtcttgtaataaccaagaagcttcttagcttgagagactttagttgagtaaacaacctcgtaagcttcaactccagggttactctgttcgaatttagaaacagagtaaggactctcatcaacgaaaacagtacggccttggaagttgatagatctccagagaagagattcgtgagttagtccaaagattaagaggttacaagctgggccatgagagtgaatgatgttggagatggtggagagttcaagaaaggacatagatgtgtttggtggtgatgaggaagtgtagtggagaagtgcggcgaggactggtggtggaagagaggaggaggagggagatgaggagagagagtgagaggatgtggtggagtggattgaggaggagaagagagagaaagagaagaggagagtgaagaaagagaggaagaagatgaataagaaacggtggtgattcgcggcggcgacggcggagggtgattttgaagttagtggagagtggtggtggaagagaatcagattagtgtttgtgttgctcttcattttattttttttccgacaaaacaaaaatagaaataatgaaagacgaaatgtgtgttttgtctctttaagaaggtttttttatagacaaaaaaaaaaagaaggtttttttataaaccggtgatggtttagagaaatagatgtgttgcttttgtacatttttgggtttattccggttctggagcaagagcaagaaccggtgggtttgaaaactttgaaacggatgttaattatgtcagcttacatagtaacggttagtgttagagcatctctatctccatcatcagtttaagaaattcatgtgaatatcttaataataacacaataatattaataaaattatatactaaactaaattaaaatttgttaaaactttaaattaaatcttaattttttaaatatattgtggattcttaaacacaaaccaaaaaaaaaaaagatatgagaaacaaaatccaatctagatgaatcaaacatagagtaatacaaattaattaattacttaattttataaaactattattttattacaaggttgaaaattccgcactattttctgagtattttttaaaaatatattaatataaatatgaatttcatatctttatcttatcttagattttagtagttttattttttttgtgattagattttatattttttttgtgattagatttctttttgcaaacattaatatctaatgagaaaagtgatgtcgaaaaagtagaattatactctatttttcaattggtaacttctttttaattttagttcttattataggttatcttttaacttttaattgattcccacatttaatggatcttcacggtctatcatattgttgattttatcggtccgattgaagccaatctagatattttaagcacatttcttgctaaagctattttcatattttattgtataaagtttatttttaaagctagtaatatgtacgatcgtgacaatataaaacttgattttcaaattttgtaacacatacgatcgtgatatgatcatatgagttactatattcaaaaatcaagatttatataattaattgtgaatcaattacgaattttaaaaaaaaaaatccggtttatggtataaatctagcgggaattgtaaatggtacatgtctagaattcgaatcttatcaaagtgaaccaactcaaatgtgtaaaacaaatcaaatctagtaaatcgaatcaaacccaagtctataaaccaacccactttgctttttgga

SEQ ID NO: 27731 - DNA, 759 bp, Arabidopsis thaliana landsberg
ggtttttaaatgttaaccaattcgtccaaaaatataaaatagttgaacaatcctgattttgttaaaacaacttagtattagagtatgcagtagtagtagtacaatgtcatctcaagatttggaattgttttcaacaatgctggtttttttctaaactttgcaacagggtttagttacaacaatagagagatacaaacaaactctaaagtcttattcttcaactggttgatggaaagctaatccctttatcacatgtcgacattgatacctgcaatgacacagtaaggcatggtcaagaacttgtttagtgtgtaactggagaattgtgaataagagaagtaccatattagatcatttgtgggaggagaatttgttgcattgtcttgcgttctgcacttgaatctcaactttgaaggcacaaactgcaataataaaagatgtttgcaggtgacggaaaatcggaatgttgtacatggatgtgtgaaatagaattagcagagaagtgtatacctttctgttgtatctgaagtcacgtttaggaaggaaatgttgtggaagattcaaagtaggtggagcatgaaccaatatgaagagcctcattggacctgcaactcagaagaagggaaaaaaatcattacaccataattcacaacaatgctaaagaagtttgcaatttatgcaaaagttacctgggtaggaagttgatccagcacccgtcgagatcagtgctcggatagtctgtaaagccaaaagtggagg

SEQ ID NO: 27732 - DNA, 1236 bp, Arabidopsis thaliana landsberg
ctcttggagactaccaggtaataacattggcatagaccataaaaaataaggcatgattctttagttttttgcaatcaaatgtgaggttttgacaactttgagtaaaaaacattgcagttggtgttctcgcgtccagggaacgtagctgcatttgcggattcatacagaggatttccttctgcttattgtgattcttgagagcaacaacaattggttgcttatgtgtttcgatctatacaatatttgatgacctgaaatactgattattgatttgtttggtgtgccaatttttgaaagtttgttgaataaaacagagatttactttggaaaaaaaataaccagtaccgtgaagctatttgaccaattcatacaacaacactccatgcacaatcttgtattagtccagaccaaattgccaaaccttcttgatcaatgcaaactttaaaattgccaaaagtaatgcataatatatttgtgacttgatatttgttgacagcagtgatcaacaacaaaccatatatatagtagtaattaataatgaggagaagctcctctattaatttttgatgttctttaaaatactccttgatgaccaaaaaagagaatcaagggtattttatgattttcaaaagatttgtttttgcaaaaaattattgaccggagtaattattccgaaacaaaaaaatatatatattttttcttccaaaagaaaaatattttaaaatattttttttgagattttctaattaaaaattcttcatagtagagaacatataataaaataaagttttgttttaaaaaaaaatagattttaagaatatagactcaaataaatgcgtcaataaatgtcaagaagtggcaaaaatgtaggtaacttacaaattttaaatcactaacagaaatctcaaaaaaataaaaacaataaacaaacaaaatccgttctaaagctttcttcttcttctctctttcccttcgtatcttcttcttcttcttcaacctctcgatctcactgatttttctcttcaacaactcgatcttcccttcctatttttcaattggggtcttgcaaacgaatatctgctttgaaattgaacgaaattatttagttttggtggtttttcttcgacttcacccatctgttgaactcaaggagaatatatgagataacatcactcttcatttctgtgagtttctataatggatcagctcgtgaacttcatcattagacatccaagg

SEQ ID NO: 27733 - DNA, 2145 bp, Arabidopsis thaliana landsberg
gagatacggatgtgattgaataattggagaaagatcgtttgagagggagatgtcgcgtcaaattcaattttcatgctcaaaagcacatcgtgaaggctagaacccggtgatgtaacgatcgagattcgaggaagaagagacacaacaaccatacgcacagatcaaaaagatttgttctcttctttttttttctatttccttttttcgtgtcagaattgatttctttatgacctgtcatcctatagttggcaaaaaaagccgccaatcataaacggcacgcatatttatcttctaaacgttaaaacggcacgacatcttttttgaacacaagaaccaacaacttcttgatcttcagctgcgccatgattttgagattctcaactctttttaacaataaggattacagatttaacagacatgaaacaaggagatgctgtataagattgaggtgtgattatcttctataatcacacaagcttgcacaaatctcttagaaatttgattttctttttctctaacttttccaaatttacttggacattgtgttcctgaacatgagtataatttttactttcgcttacttggaccataattaaggtctatttttgcatttgttacttaagggttttcctctctgggcaaatttgaatgaaccattaaagttatcatctgcttctgcaatctgcaattctgcatccccaaaggaatttcagaaacatgtaaactcaaaactcgtataatcgcaaaaaaagaaacattaagttatcatctcaacaatgtctttaacccaaacaacaaaaatgattaattttacaacacccataaaccaaacaacagaaatgatttaattttacaacacccagaaaccaaatgctaacctatgatgatagtgacaagtcttttcttctttcatgtttttgtatctctatactcttcttcacttttctgcatgacatttcttacctcctcaaggcaactttcaagttccttcaattcttcactgtccaagaagctcactgtagcctacacatacatatgtcagccatttttattgattctgatcaaaaagcttagtaagtattgtggggattaattaatgataagtttggtttgttacttgtttgattgtgttcttcaaatgcatctcagcagtaaacagttctcgtttgcttcctatggaagctgagatctccatatacactctacaaagttccaatgatgctcttgcaaacttcttgaaacgctctttgtctttccacacttctgatccctggcagagatatcgatatgtcatcaaatactgctcactgataaaagagtggctttggtaaatcatcagtcattattagatacctgatatgatcgcacttgctttaacagtgcctcgctgcataccgtaagatctcctttgattctactccatcttgcatataacccccagatttctgctgtactttctgttttgacaatctataaaagaaataatcaaatgaaggaatcacataaagggactatacaaagctacatatcaaatgcatcctcaagagttatcactcggagaatgagacaatacagagataatactagttgaaatgttttgctaacctgctgaataactttcccaagtaattctagctggcgttgagtttcagctggtgttgcagtacatggttttgtttctgttgattcatctgaagaagcttcggtttcagtcgatgaagatgatgacttacatgctgaattcctcttttctaactctgtcattatacggtccaataaaacaacatcaaccctcttgtttttgctcattttcagtatctgttgtatagcttcaaaggcctggaagagaaaaaaacacaaagatgaagccaatttgtttaactcctaagctaaaataaaacaaatatacggggaagtgacagttgctgtttttagacaagagtagaatattaaagttataaattaatagctgcatttacctgatcaatatttcccacatccatagcgacatgactgaaattttcccacatctgccagctatctcgcctgttgacacaatatttttcagttactaactctgattttcatagctcaagtaacaaaccgtaaaggatagagagatacttgaatttaagggctgcttta

SEQ ID NO: 27734 - DNA, 1751 bp, Arabidopsis thaliana landsberg
cttagcacatttaccatgatcattttttatctgtcttttaagaagaaaaggcgccttgttgtcctatttcttctgacttattggcaacttttgatgactacttttttagtggcttggaagagaaatctgtattgccacaaaggcttattgatcgggctaatgagaagggatggcgattagaatatccttttttgggaaatagtttcgtttcttttactcttaaatgaataataacgttcggaataagtgatagtgaaaggagaaaaaatctttgtttataagttttccttgattccatgagttgtaacgctagccgagtacctagataagagggagcttcttcaaaatccacatgaacaggccaggctactccgcgaagttccagaagttattggagaggaacttgtacaaaaccctgaagtttcgtcccctgaggctcataaaagtgacaacgagcaacgattgagtgaatctccattatcgtgcatccatgaaaccccagaagctcgcaacctctttggtggagaagatcaacaatttaataacggctatgtgatgtcaaaccccatcacaactccgggaatcacatcttgtgctacggaaattaacaagggattgccaacatggattgcttctgcaggtgcgcataacatgtatagggtttcttgtttcactttgttgcatcttaccaccattgttctttgttattacttaacatgttaacaaattttagctacttcctgttcttgcctgtgacaaatttgcatcttatctgccttttggatgttgagaagccagtggatattactgcgttcttcatatgaaattcttgatttacccaaaaaatagaaaattcacgccaaagaattggttcttgaaacttcatgtaaagtttgtagcagtatttgaggctatgacagcatctggtggcatacaggctgttgtgactctttctttctttatttttgctgaggcagaatctgaaagagaaaagcgagcaaattatgctagcggaaatggaaaagagatgtaatatttggtttgtagctatactggctttaagagagaaattgacgtatggatcttttaaagattcgagattgatatgcgtcaactagttggtctggtttgctctattgtatagtatccaaactttttataaaggataagttggttctggaattggtaccaatccgcattcttgtcaattacaggtgctgagtatcttcatgtagatgtagagcagccagcaaatggcatcattggaggagagacgccgactgaagagtctaaagtttctcagcttcagtcaagtataccagtaaataatgtcgacaacggatctcaagttcaaccaaatccatcagaagtaatcgaactgagcgatgatgatgaagatgacaacggtgatggagagaccctggaccctaaagttgaagacgtccgggttctgtcttatgataaagagaagttaaactggttatacaaagatcctcagggtcttgtacagggaccattctctctcacacaactcaaagcttggagcgacgcagagtatttcaccaaacagttcagggtttggatgacaggagaaagcatggaatccgcagttttactaaccgatgttcttcgtttagaggaactaatgcaatactctgaagactattagattcagtcaaaaggtggttcaggaatctggtataggctgtcattatccttaaattgcagaagggtttggctcctccttttcg

SEQ ID NO: 27735 - DNA, 1199 bp, Arabidopsis thaliana landsberg
cgcaaccatgatgttcctctgctcgcgagagagtgggggaagagtttgcaaagtaggtaatcagctagtacaccttctgctttaatagaggaaacaatgtcctcaaagacttccaaatgatccaatgggattcatcggaagctcctctaaactttcctctagatacaagatcatagtaggcagggtctatagcaaagtcatctctttcaaaaggaggtagcttgaatgctgatcggtttgtgtagaagagatcagttctgttaaaatcgcctattgtagccgtctggttctacagagggtgtcgatcgacaccagagttgtgtcagtcgacaccatcgtgaaaatctgccatgaaaacgtgagtctcaatctgaaggtacctgaaaaacaagagaccaataaacaaagaaacacgtgaataggtggtagaaaagttgtatttagacttaaaaggacactgttggggtcgaatttggtcaaaggaaccgagccaatcaaacagactccaagaacgcctcggaaaccaatctttaagatatttcggttcgggtgccactccaggacgcggaccccgagctggtggtagtaatatctcccagatcacgtcggagaaccatcccgagccaaccacgaaaacacctcaggatcattgcaaagagcctcccgacccgaccttagaaacgcctcggatactctcagggaaccatcccgaggcgaacctcaaaagcacttcgggtaaacaattcggcccacgcaaaaccccaggaaacgagccatctagctaaaacccgagaagatgcgcccggctcgggggaaacttcgtaccaaggccaaaacaccttaaagctgaagagaagacttagatcggtgcaaaatcaaaataccatttcccgcgaaatgatgttgggaaatctctaaggatattatcaaataaggagaagatcccgcgaaagtctctaaaggataaagataatcaccaccaccgcctctaagataaagataaatcttccaagaatatcgcgagagacggttcaccgaagtcctatataaagcgcctcaagggacaaacaaaagggacaggcacaaaaacgcactcaacttcaggctatcaaaaacgctctgactttgaaagcaaaacacttactatctatatttctaaacacctgtacgatcaaatcattatctcaacaatataatca

SEQ ID NO: 27736 - DNA, 3587 bp, Arabidopsis thaliana landsberg
ttaaagtcgttgtgaaataaggatgaaataaacattaaaatgtcttttaattgttaacatgtggttattttacaatcattgttgctgaataaaaatagaataaatcccaaagtgtctttttattgttaacttgttgtttttgttttacaacaacttttggtcaataagtatatagaataaacaccaaagtattcaatcatattaaacacattaaatatatgtaaaaataaatcagattaaataagatttgaaaataattgtatatttaaattttaatatcaaactggaaactaataaatgctatcaaaattaaatatttaaattaatagattatttcaatgttaatctctttgacccaatcttttttggttggcatgtacccgtgctttgctaatgctagtaaagattaaaaattaaataatttcatgtcccataaccgttttttaaataattacctattcaacaatacatttttgaaaaagattcggtacaaatttagacaggatacctaaattctgacaacttaattctaattctctctatttgaatatttaaaattatagtcagacaaaacaatttatgtccaaataacattagtagaatgaacagtatgactgtttgtgataccaaaaatatacttaactagaatataacccgcggtacaccgcgggttaagttatttaacacatttttgttttataatctagatggtaatgtataatttgttatgtaactacgagcctgtaacttagcattttttgacttcaagtttgtatattgtgaagataataacatatgtttttgatattttttctctttggtaagactttgttaatatatctatgtttaaaagaaattaatttacacttgcttgatgtgtagtaaatattaatcaagtttatgttatgatagtaacatagattgttagaacaataagacattgttagatatgtttgtgtggtgggctgataattataatgaagaataaagcccaataaacttgaaacctgtttaggttttagggtatttgcccactataataatttagaaacaacaaatgtttttttcaatgggtatttgctaagatcatggaagcccactaaaactaaagtctgtttccttgaaaggaagaaaacaaaattggaaaaggcaaaacaaaaacaatgttaccatctactttaaacaaagcttcgatcgttttgtcctgcgattaaatcgaagaaaaccacggttctctccaatccaaattcgaatccattctaagaaaaccgtggaaagaaaatttccgaaagttatagacagaacctgaggccagcttctaatggtcggatctacagttccattggctttgtgtaatccattggtaagtcttcatttcgtatcttcttaccccaataaaatgttaccatctatttaaaaaaatcttcctctcttttattctgcaattaaatccaagaccacgattgtctctccaatcaaaatttgaatccattcaaaaagtcgttgacacaaatcttccgcaaagctatcgagagaatggcagcttgtaacggtcaaatctgcagctcgattggcttccgtaatcgtttgttaagtcttcctttcttagcttctgaactaattgatttaatgcatttcctacatagtcattaatataaaggtaaagtgattacatgattaaagtgagattcaaatccattgaaaaaaattgttgacacaaatcttcagcaaagttatcgagataacctaagtgcaacttgggcttatctccagaccaattggcttctgtgatcgattggtaagtcttcctttcatttggtcagaaccttggctacaacatttgtcacggcattcttgcaagtatcacttgttgtgttagtatattggcccaagagtaaagcaccttcacctgcacatgccaagacgtcttgtatggctggatgtctctcaagaaagcgaaggaagcagccatttcatgtcggtaagtgtttctgctttgaatatatagagtactagtttttaacccgcggaacaccacgggtctatatttttctagagaaaataaaaatttagtttgtttagtagattaaaaataaatatgatttaatgttttgtattttctaaatgtacatctcttatctctatatattatttagtgtataataactatgtttgatttttactaaaatataggaacaataacatatcatctcttatctctatattgtatattatttagtgtaaaattactattgtttattttgtttagtgtttaagataatataattgtattttgattgttatatctaggatttcaccgtggtataccgtctagtattactatcgactcaaacccgtcctaaccaactaaacccgttcaatgaaattaaatattatttgtcatttttgttttgataataatttaatctaaaatatatataatttaaataaatttaaaagttttctttcaaatggttatttaattgttctaaatttcatatattataacattctaaacccgtcataccatctaatctcgtgtgatattaaacattttttttaataatacttttatcaaaagatttctaatttaaatcaatttaacacttttctttcagatggttatttaatttgtatagatttcacatattagaaatattctaaatgttttttctgttaaatattctaaatgtttatttagctttaaagaattacaatatttactttttaataaagtatagttaggggtgtcaaaatgggtcaaaattcatgggtcaactcaactcaactcaacccatgaaccctaatgagttgaaaattttgactcaaatgagttgatgggtcaaatgggttgatgagtcaattggtttgatgagtaaaatgagttgggttgtaatggttaatggtttcaatggtttacccaattaacccatcaaattttgtaaaattgaattaaaccaattaaaatctctaaaccaatgccaatttaagtttaaccaacacatctaaaccaatttaataaaattaatatttttccaaatttcttaaatatacaagcgatgaaattaagaaaaaataaactcgtaatttttccaccaaaaaacataaacccgtgattttcccgccaaaaacgtaaacccgtgattttcccaccaaaaacgtaaacttgtaattttttcgccaaaaacgtaaacccgtgattttcccgccaacaatgtaatccgtaattttcccgccaaaaacgtaaatccgtaaacggtagaatctgtaaatattttaagtttgatgataatgaattaataattattaataatgataattatttattattgttttataataataattaattaaattattatttaattgggttaacccatttaacaacttcacccattaaattaaatgagttatgggttgatctaacccatttaacaaaatgagttgggtcaacccataactcatttaactctaaactcatttgattatgagttgagttgagttgggttacccattttgacacctctaatctcgtatcttgctttaaagcgatatacattcacacaaccaaaatcaaccggctcttc

SEQ ID NO: 27737 - DNA, 4055 bp, Arabidopsis thaliana landsberg
tctggtggttaataaaaaggccactaccttgggatggatgtgcatgattcttctgctgtgggatatgaccgttctttgcaacctggttttgtaagtaatactactctgtcgagtcttagtttttataagcaacccaaactcaggctaataagatcttcacttttctacataccccctgcctcaaacactctgcttgttgatgctagtccattaaaaccgatatgtgcccttagaatcttgatcgtagaagtttatgtatttgtcatgtgatgccattggggtccttacgtttgagacaaatggtttgatggtgctatcaatagaatctaaattacatcaaatgactggctttggtgtttgctagataatgatctttcagactctcgatgtcaacttatgatcgctgtttggacaggtgattacgattgagccaggagtctatattccatcttcatttgactgccctgaaaggtacacatgctctctttagactaacttcatgtaaaagcgtggttttgtaggaaagtttgcagccaacaagtatcaaactgtgtagatctgagtggtttgactgcaaatcgaccgcaggatatgacattgatctatcgaccatggttaagtgactttactattgaaatttctcattgcagattccaagggattgggataaggatcgaggatgacgtactgatcactgagacgggctacgaagtgctcacagggtcaatgcctaaggagatcaaacacatagagacattgttgaataatcactgccatgataactctgcgcgaagcttcgccagtttctctttgcaaggttaaaggcttgcatacgaaccgtaacccaagaagattgttttgaattaaacatcattgataataattcaaacgtaaactcctgttccttgcgtttgactcatagaatgtatcaaagcattttgaagaaatcttacgcattctgaagtgtggaatttgtaaatagcaaaaccaaaagacatcgagttactacgagaaaggtcacatatcacaatcaataagttaggagttggaacacttatagttatgtgaactttagtctttattggttatggttgcttttatgatagaagaaataaataatgcactatacagtaaatagtatatgtcatccttaacacgtaacactaaacgcccaagaaatagatgttctattcgattaaaatcatataaaaaataattgaggaggccgtcggttactggttagcaggtggagagaatgtgaaatgataggcactgcatttatatggacggggccatgcaccacatcacaataatcatcatcattaatattgtgatgatgatagccatatgaacgatcatgtaagagatatatggtttaacccgaaactggaacacagagctgacatgacgtacccatatacctgcccaccatggccattaatgattttacatgcacctcatcttcaagaatcaagagtttagattttacattatggtcttgtcggttttttcaaatttcttgtagtagaagaacaatcgatcacgtcgttttcgatagtgatgttttttaccgttattttataatagggttggtctcaatttgataccaaaactaataaatttgccaaaattgtatgaagtcaaaggtatcttctcaatccgagtgtatttcacatacaatttaatttctaaacatggtggcattctccgtaataagaacaggaaaccaagggcaaacccacaacacgtcagctatatatcactaggctaagtcccttacctctccacaacacaacttcagctttaagacagctaaaactaaatacaaagaaacagagatgggtttggttacagaggaggtgagagctaaggcagagatgtacaccggagatgagatatgtagagagaagacaaagtgtttcctcaaggaaatatctatgcccaatggtttattaccattgaaggatatagaagaggttgggtatgacagagagtcaggtgttgtatggctgaagcagaagaagagcatcactcacaagttcacagagatagataagcttgtctcctatggaaccgaagtcacagccattgttgagaccgggaaaatcaagaagctcactggagtcaaagccaaggaacttcttatttgggtcactatcaatgagatctataccgaggaaccccctaccaagatcacgttcaagacaccgaccacactgtccaggactttcccggtcacagcttttatagtcccagaagaacctgccaaggaggaacctgccaaagaggaacctgccaaggagaagagcagcgaagccaccgaggccaaggaggctgttgcaatcaaggaggctgtcgcagtcaaagaggcggcctaatcagctcagcttcagcagataaaagagacccgaatttttaagtgtacttcaagaatttgaacaaatcatggagagttagtgtttctcactgctctaactatcatgtattatctacctaccacttgttgctgcttgttttacctgtaataagatatcaatatcatcctgttccactaaaacttatccttaattatctataaactacaatacagctggttctgtatgtcacttcaaaaacatgggaaacctcttcgcaagcaaaactgagagcatacactcctaacattcataagatgctaaacttcgtaggtaatatggcctacctctttcgaaaaatatttgacaataggatggataatcaacaaggcaaggaagtagtgttacagcaaaaacttgtctatcaaataatcaaccgaaatcaggagcaatgagaatcgcactatgtcatggaacaagaataaaatatcaactggttgttgcatcttagtcactcatcataactgcaattatctacaatagcaagggaacaccagggttaagactaactgactaagagatacaagtacctcaaagaaaaacaaaacttgaaatcccaaaatcctgacgagttatccagcccatttacaccttctgagaactgaaatttattattaatgacagcaacttcatcagtaaaaggttgatgaaaaatgactattgcaggaacgatgctgaaaccttagatattaggggaaataacgaagttatatgtgataaaatgagttgatcgttttagaaccataccttaaaagatgttatccactttccatcaatccattcctgatgtagccttagttgagagtgatgaaattttagcagctcttgagtatttttaaagagaaccaggtaagatgactttgaaagaacctttctaatcaccccaacccaccatccatcattatacaaagcattaactttgtcatgcctctcaaatggactaaccatgacactctctagtggcagaggccttatccgtgaaacattaacctcttctctcaaaggctctttcccatcttcagctttcagattatcatattctacaaggcatttgtcctttcctctgtattcaataagttttgcaagaaaccaagaatcttcaaatccttcttcctcagggctaacctcgaccggagttccaatgctgaacgcttgcttctcagttgctttcttgggtctcacgttccggttacatgaaacagtctacacatcaaaataaaaactttaaacacacatatttggggaagaatatgtcgcacataaagaagaatgggataagaatgatctatgtgaacttgtctagagttcataattaatatggaaatcatacagaaccttttccctctttatcttccctcctttcagtggtagctgccaggtcccgtcaacccaatctttatgcagacgaagcccctgccttccaaaccgcatcttctcttgtgattgcctaaaatatataccaaccgttccatgcttcataccatctatgacaacacctacccaccagccgtcattgtaaaatgcattaatcttgtcaccaacagcaaaatcaatatcctcatcccttggtggtggcggccttatgtgcagaaaatcggtttcttctttcaaaggctctataccatctttttctctcaagtc

SEQ ID NO: 27738 - DNA, 1618 bp, Arabidopsis thaliana landsberg
aggtgatttttttttttttgttatcattttttgtgttgattattcgttgacttgatgttttgtgggtggtggtcaacggattcactggcggttggatcgccgccgaaatcggaagggagagtgatatactaccatgtggcggatgatgatgatgatgttgaagatgactctgttgaggtaagttcgtttactttcaaaggaaatggtgttgaagagctgactatgagattgaaagaagagagcaatgtcgaagacgttatcgtttgtactcgtagtccgttgaacgggaagcttttcccattgcgtcttcaacttccacctaacaatgctgacatgactgttgtcttattgccaaaatcatcaaaaagtgagtctcttttggtcctaatttcaagtcaagtcgttgcattgtcactgatgttctctgttttcttggatttaacagtagcagaaaagttcatcaagtgagatctttcttttgaagctgagctgtgaagtgaaggctttggctgcaattggtttgttgctactaagaaaggatttggattgacttagagatactgcttgattaccaaacttatgatttagagataccattctttcccttttgtccaactctaatgctcaatctctttcaattactgcgactagtttttttttttgctaccagtagtctaaacaagagcaggatccatctttgaagtgatggaaacgaacacgatctctcacgatgatctcagtgttgaagacttttgagatcagtttagtaacctcgtggcaatcgttgcagacacgtagattcttgaatatacggattggagtctgaggtggtaagtttatcagaccaaaagcaatggcaagtctttcactgtgcagcctaagggaatactctttgctaccatcattggtggcatccactaaaggtgcttgagagcgatccggtaaataaccaattgatcttagcctgtcgtcgatcaccttcaactgttggtatatctgtttggtctgaggatgcgacgtgtctcctgcgaaaaactcgtgggagatgccatttatctcaatagaactgcatccaggctcttttctaattccatgttcactcattagttttctaacgattccaacatcgttccagcggctagctgatgcataaactctagacaacagtacatatgcaccactgcagttaccattggagctttcgttatcttccctttgttccaataatatttctagcaatttcttcacttagctccacactatcaccctttttgcaacaagcatcaaggagacttctccatatcactgcatctggtttcattggcatgctcattaccatgtcaatagcttcagtaatgtagcctgcacgcgcaataaggtcgacgatgcacccgtaatgctccaacgcaggttcgatgcactaatctctgaccatcatgtccaaaatactggcgccctttgtttacaaagcctcggtggttgcaggcgatgagcaagccaacaaacgtgactgagttcggtctaacattctctcttttatccaccatacggtcgaagaaattcatggcttcctcagctcttccatgtgtagcaaaccctagaatcattgcaggggatc

SEQ ID NO: 27739 - DNA, 1240 bp, Arabidopsis thaliana landsberg
aaaaaaaattcaaatgtgcaaaagagatataattttgttttcgtctacatcaaatttaaccttttaaaattcggattttgtggcaattacattaacaaagctaatagctaaagtctgttacaaatattcatttattctctttgtgtcttttgcgaattattcttaattttcatcgtcactgttttttccctacattgcaaaaagaaaaagaaaacaaatcaaaagtccagttataaattgaatttgaaagcatttctcttttactaaagacacttagattaccttgaaatgtttcttaaaatggattcttttcttagatgaaaaatcgtcatcagatgtgtttctgaagaatgcaagtgtctcaacatccccatttgcgatgcttgcttcaagctacccaaccaaaaaaaaaagatgaaacacaaagtacgttgcaaatcagagttttagtcagattatagaagaaagacataataatgagaacctgaacatgaataatgccaagacaatgcttgtaattggtaaccagctctcttctggagaaatagacagatttgaactgccaaataaaacatgaatataaactcaaacactaaactagaacaaccagatgaccaaattcagactgaacaattatgcatcttaaacaagattaattacctcaaataaggaacaagataaacaagagcataaatagcataacgagattttccagtgtcaagccaagcaaacacccaactctgtatttaatcatcacaatattttgaatttgtttagtgtttaaacatttaattataagagatttactaaggattaaggagaaatgaaacaaaccagccaattgaagtaaggtatgaagctgatgattcccatggcggctaatctcatatctgttgacacaatcgctgagttttcttcttcttcttcctcatcgttgactcgtttcgccaccggaaaaacaaatgaacttaggatacacgcaccaattgctgttacgagtggtgcgtcctgtgaaaactccgctctgcaaattactctctcaatctttctacatagctgagaaaacaaagaaaggaaccagttattgagaaaaatatcttgagagaaccattgctagttttgatcgatcaccttcttagggttttgtagaggataggctagaggaagcgaacgacggggaagaagaagaagaagaaagtagtcggggcttggtgtagagtgaagcggaagatgaaagtcc

SEQ ID NO: 27740 - DNA, 1548 bp, Arabidopsis thaliana landsberg
  unsure (1)..(1548): unsure at all n locations
ttgtcctctcgtcactgtttttgatcacacaagatttcaaatatagtttagcaaaaactcaaccagaaactttgtagaggtggattggttcatagtagcaaacaaactacttttgagttctcacaaatgacaagatacagacagaatctgagattatatgtggaaaaaaaatcatttatttgtatcaccaagaagaaaggggaacagattcagggctcaaaggtcatagtctctgcctctttccttgctgcatcaaacagtacagtcgatagatatctttccccgaaactcggaaacactgcctgaaacattcagtttcacatctcttattataagatcgactcttaagcttccatgagttcactgtttgttctttagctttggaaaaaacgtaccactataagcttcccagcattttctggcctctttgcaagtttgattgctgcagtagctgctgctccagatgagattcccacctacagtacataggaggagacaaatgtgataacgatcaaggacctgtttttattttcatggtgaggtttgaatcataatggtgaggataaagctgaatcaagacatttttggcttaacagaaaaatctgatgaggcaaaatgtgaagcacttactaacagaccctcttccctagcaagaagccttgccatgtcaatggattcttcacttgaaacctgcgtaagcgttacaaaactataagaggcaactaagaaatgtaaggtgtgttttggagtcagcaagatgatattggtatgaaaccttacctgaacaacttcatctataagatcaacatccaaaatgcctggaataaaaccagcacctataccttgaattttgtggggacctgagcatttttaccaatgtgttaagctgaaattcaatgaatcttgatatgaacaccaaaagttagaaggacctcataatgaacactcaagactaacatgtgagcaaagtaaaagaagaaaagtgtgccaaagagttccttattgagaacaaactggcttttccaccggacagaatagggctttcaacaggctcgacnccatacagctataagatgagaaaacaaatgagacaagttntgagtttactaagaaagagtctgattgtataagtaaatgaaattcacctttatgtttgtgttctgttccttgagatacttcccagcacctgttcaggtaccaccagtaccaataccagaaacaaagccatccacttttccaccagaacctttcgatatctcaggtccagtagtctcataatggatctgcaatgaacacaatactatgttataagtatctgacttcaaatacactaaggcacttaaactaaatagtaattacctttggattagcaggattctcaaactgttgtagcatataaccattaggtgttttcgccaaaatctccaccgcctttgcaacagcacctttcatacctttagccggatcagtaagaatcaactcagctccaaaagctaagagaatgattcttctctctatactcattgaagctggcattgttataacaag

SEQ ID NO: 27741 - DNA, 6794 bp, Arabidopsis thaliana landsberg
  unsure (1)..(6794): unsure at all n locations
tctatgaccagttatagttctagtagggatcagttcatccttctcatttttgacaattgtcattccacccttattagggacgcaatgcacttgagaaacccaagtactatcagagatagggtagatgacaccagcatcaagcagtttcaaaatttcttttttcactacttctttcaaattgggatttaacctcctctgtggttcaatgctagaatatgattcgttttcaagatggatcctatggttgtataaactaggtgaaattcccttaatgtcggataatgaatacccaatcgctctcctatactttctaagctcagataatagcaggttcacttcatcattatttaactcagcattaatgatcacaggtaagtagagtttggaccaaggactgcgtaccttagacctctaggaagtggtttgagatcaaccttcggtgccttgagttcagaccagtcatctgaagtcagaatgatcggctccccagagtcgatggcagacaaggtcgagtggctggtcgagtatgtactcgagtgagtgcgttgaacttgtgttgacctttcttcactcattaccatcacctctgttgttggtccattcaattcccaaagagttcggattcttccatcgctctatgtgagtctaacagcttttggtgtcccaaagtctccaaatgcagaaacccatcttcaccacttttggttaaataactgttaaggtgatcttcttctgcaagctcttccagtaactcatcagcaagggttgtccttctatagtaggcttcttcattcaatctttgacgtcaaaggtcatcctaaaatctttgccaaggtctagattgattttccctttcttgatatatatcatagctcctgcagttgttaagaatggtcttcccaaaatcaaatggtctttgggctctttatccatctccaggactacaaagtcagtaggtatctctacagctctaattctgattggtatgttttcgagaaaatcatgagggatccttactgatctgtcagctaggataagggatatattgcaggatttgtattgagtgaaccccaatcttttggtaacaaagagtggcatgagactggctgatgctcctaaatcacataggcatttgttgaaagccaatggacctaaagagcatgatagagtgaatgagccaggatcactaagcttcttgtgaatgatcttcttttgtataatagcactgcattcgtcacccaatactaccatgccttgcacttcttgaattctctccacgatcaagtctttcagaaacttgtgggaatccatgattagtgctagagcgtcaacaagaggtatctgcaactctaccttcttgatgttcttggcaaacataactctatacttatgtgccaatgctttcttgtgacggccaggaaatgaagggtgtggtttgtgaggaggaggaacaaagaccttttctttgtttttgacaacaactggtttcagagcagttggtgctgttattgggaagggtggtcgagtgaaatggtcgagtggttgctcgagtgacaggtcaagtggctgctcgagttccttgtcagcttgatctttagtgagactgaaatcctccccatcatgatctacactgtcctcagtgactataacgccaccgaatcgctatatggccagacaagccaagggcaacccggaaacgccacattgatagctcacacggacaacccaacttaggttccaaacggatttagacccttagccgaattacccacatgaaccatccctcacgaatgcggttaggctttttagcccttgccatgatcgtgagttatgtcagtttggacaagactaatatcgcatgaaacacactctttatatgaaaataatcttttataacatataactttcgtacaccaagtatccaaaacgttttaacaatggcgccacgagcacatacgctcaatcaaatcaagaatcaaaaccattaagttttgcaaaaagcaacaaactctgtatcggctttcctacgtcctgagcatctctctaatggttcccactaaggtttcctgcaaaacaaatggagtcataattaatctaagattacttagtgagctcggtctacctgcaagagatattagtttaccccaacccataatcataacatgaaacacgcaacagagaatggcaacgaaaggtagcttgtcgaagcaactacaaaacatgcaaatgcattaagactctagttttattaagttttaaagggcccgatatgctgccttcaaacccaacaccaaacacacacactccaaaggtatgcaaccgagcatcacaacaaaatgctacaccgtcttgtagacactcggccagggtagctagccccgtgtctccgagtttttcgcacttcatggcgatcaagtgacatcgttacaagaccccacgatagcacagttcactaagaaggtcagacatatcacaatcttggcacgcttatggtctttgcctcctaccacaagcaccacgtaccaagaccccaaagtttaagatattatgaaacatattgttaaatcactcatagaatcatcaatacctcaacacaacctctcagccataaacaatagcagaagaatctatagatcacatatgcaatcaaatataaccattcacaagattcatataactttcgaaatcaatcaaggatgcatgagaatatggggatgaaacttaaaccattatccagaactcactcagtaaccaacaaaatgcgtgcaatgattcgggcagagttttcagcttcgggaccttaacttgaatcggacgaacggtttaaactcggcagcccttcacttctgctcactttctcttcacaaaacaattggggtttagttgagcttatataggcaaggaaatagtgagtcagcatgtccacgtgtcaagcgtatgggcgagtcaccaacccacgtgtcatccgcccgtgatgacacgctcgttgctctagcggatgagcgatacgtggccaccaaaacatcggctccacgcatctaaaattcggctccaaaaaactntgcttgggccccaagtcagccgagccacgcgtccttggcgcggtcaacggttggcaaacgcccgacggggcatactttcgcccgtggcacgtccgtttatgccccaacatgcccattagtgcccattctttcccaaaattgccctttgatattatatggtgttgtgggcacgtaaggttaattggccatgcattcaagcaactttcggaaattcggactcttgcctatgcccgatgtccttacgcgggtcactacactaggtcccatgttttattcttggtaatagacatgatttcatctttacacgcgtctctccatacctttagctcttttgcttcattgtaatcccatggttcttcactgattgtcatcaagagtttttcgacttcaagttgaggaaacaaaatattgtcatcttgatgagcaggtctatgacgttgtctctctgatctccttaagatgacctcattagtctgttcatcttgatcattatcatttggaatgtcttcttcctcttcaactgaaccctcgttattctcatcggctccgttctcctctgtttcttgtactgagtcttcattctcaataccattgtttccaaagctgactttaaacgttcatggactctcacatatatcgttttctgtctcattccaagaccagtttttactctcatcaaaaacgacatccctactcacaataattctccgcctatatggatccaacaagcgataagctttagagccaggttctgttcccagatgaactaaccttctcaacctgttatctagcttctttaaatgtgaactctcattctatgcatatccgatacacccgaacacacataaatgttcaatatttggccttcttcccttgaatacctcatatggagtttgtttaaccactgatcttgttgcgactctattaataagataggtagcatgcctcactgcttctccccatagatatttggtacatccatgtgcttcatgatgcttcttgtcatctctagcaaatttctattcctcctttcatcaactccgttatgttgtggtgagtaaggtgcggttaagtgtcttgtgattccggatttatcacaaaaatcttgaaattcatgttaatttctaaaaaattcaaaatgttctaaaacttttaaaccaaaatataaccaatttgtaaatttctttaaaatgtgtttaactcaaaacgttacgcaatttaactcaaaatttatttaaatatctatttataaagtttttataatgtttattaataaagattttaaaattttaattattttcttaaccctaaaattttatttagtgtatgtattttttcttgatatatcactccacacttagaaaaaatataagataattacattattacttaatgatcatctcttgtgtcccttttgtggaacaacaaaccggtaaaatccctttggagtcttcatatccctttttatttaatgaaatgtgtgaagacgaaattacatctgtagtttctttagaattattaatgaattaaaattttaaaacaaaaacggtaaaacaaaaaaaaatgagctcgagcttcttcttcttcttctttgggctttttcctccggcgagccgcatttgttgccgtttttctcctcctgcaagctgcatcaatctacgaagtccagatatgtgcatcgagttggagagagcttcaaaagctttgaattaggattttgaggattttgatattcaatccaattagatttggcttattgtgttttactatctacattagaagtttaactatagttttagggtcgatttggcctataattgggtaagaaattgatttcgcatgctgattcgtactgaattgaactcgaatccaaactttgttcctgtcgtgaaaataatacttgtcgaactagttacagttgtaccgaaacaattggtttatatgtaaatattactagtattaccgaaacaatattacttagacatgtagtatttcatatatgtaatagtattactcacacatgtaatatttcaaaattagtactagtattaccaaaaatgtagtagaatcggtaatactagtaatattgactgagtatgtgtattgttttggcatgttacaatgaaagagaacgtaatcatagattttaaattcgaaggtcgcatgtataatgtgatgatgaagacattaggagagaagatagctctctcaatgttagaagataggatattgacgaagcttggattagatgcaaataaggttaaattgcatatgaggtacaatccacggttgttcggagtagaggaagagatgaacgtttgtgatgatgaggatgtctttgcttatgtaacatcagcaaaaaataaccggagaagtgttttggttgtggaggagatttctaaaccgcccgagccggagcaattgcccgagcaattgtctagagttggtaaaagtactgttgttaagaactatatagagttgaattcagaggaggatgaaatgagagtggatgatggtgcactcatcgtcttattagaagaggaacaaggaaatcaacatcaacttgaggcaatagtggaggaggatcacgggactcaagaagatgaaacacgctatgatgagtctatggataattctgataggggggaacagtatgttgagtcgccacctgctgtagaaccgggtatgtttaaaaaagaatgggaagacggaattgggttgaccttacgtcaagaatttccaaacaaggcggcattgcacgaggtggtggatagagctgcatttgctaacagttttggttatgtgattaagaagtcggataaggagcgctatgtcctaaagtgtgccaaagagagctgttcttggcgtttacgagcgtccaatatctgtaatacagatatattctcgattagaaggtacaataagatgcatagttgcactcggctaagtaaaggtagtagtaggctccggaaaagaaaaggcaacccacaattagtcgcagctctccttcatgatcattttccgggacaattggaaactccggttccaagaattatcatggagctagttcagacgaaattaggtgtgaaagtatcatactcaacagtgctaagggggaaatatcatgcggattgtgatttaaaaggaagtccggaagaaagctacaaggatatcaagtgttatttttacatgttgaagaaggtaaatgatggtacagttacttatctgaaaatggatgaaaatgataaatttcagtacgtattcgtagctttgggagctagcattgaaggctttagagtgatgaggaagtttttaattgtggatgcaacacatttgaagaacggatatggcagggtgctagtgtttgcctcggctcaagaccctaaccgtcagcattacatcataacgattgtcgtactcgttggtgagaatgatgctagttgggattggtttttcgagaagctaaaaacggttgtacccaatacttctgaattggtcttcagaaccgacataaatgcaagcctcataaaggccatacggaacgtgtataccgcggctcatcacgggtattgtaattggcatttgtcccaaaatgtaaaagaccatgctactaacaccaacagagacgtactcgcatggaagttccagaagttaagtcggaactacaccgttgctaacttcaaccgggcgtatgaaaagtttaagatgagataccccaaggcgactaagtat

SEQ ID NO: 27742 - DNA, 1637 bp, Arabidopsis thaliana landsberg
  unsure (1)..(1637): unsure at all n locations
cagaactctcgaattgtcactgggtaaattagcattaacacagagacgatccttattttagataagaaggatactatcatgcaactaatttgcaatatccttctcttactatagtttgcccattgtaactaaagcgttatatttccttgcagttctacttctactttagactccttataaacagtgccgaacatcattactgtcttcaacttgagtcaaaagtctaccttttctggcgttatttctttgttcagctcttttggggaatatgaagagcttgaaccaacacccgaagttccaattcctccaagacttccaatatacttttgcagagcagctgcacccataatcctaaacaaggaacttccattttaacaggaacaacagtactaaaatagagaagcaatcacaagttccactatgtataagaagcaacatttctgcctgtgctatctaaatgaatctatcatcataaacttgatctcaactaaaatataggtgatacataccacactaatcccaccgcaacagtgaacaagatcgtagagacaagctcttgcgcaaatcttgatttgtttgaaactttaggattaacctaacaaagtaaaaacatgcgttaagaactaacaatatagggaaccatcgcgaacctatgaaaatatacctcaccagatggtaatataaaagaaacataccatggtaacatgcagtggttgcttctcagatataccagggttcacaaatgattcgtccatattgcctgatgcacgatgcttcagctcttgcagctgcacataaaccaataatttactacaaatacaacaacacaaatttagaaacaaagaaaactaagaacactctataagcttgagtcctttgaacagaaaaaagcaccggctacatacagaaatattcatatcaactggatttttgaataacgtttttagggatatagacagtagaaacaataagaaacagcaggctaatcaaattcagcgaccgaagtatagaccaactaaaaacagataaccgaaccagagattctagaagtagtcatggtaacaataccagtgcgggaagactagatggcttccccgtttgttcatcaggaagatactccgagatagcatttgtaatgacaagagctcgaatatattcagcaactcctctactatccactgtgtgttccctttgttcaaaccgttgaactacagcctcaggactaaattaaaagaaaatattagctaccacatagaatcaactaagaacaaattgaattcaacaacacctacgaaaccaatcaattagaggttggtgaaattacgtacatatgcttattgagctcagccaataaagcaccctgcaaagctgcgtcctttggattagcatcagcctcagcaataagtttctcgagccgcttctcctggcgagagaaaggccaccagcttaaccattcccactccattaccttctctatagctctctttatagcccgccatagtgccatcatcaacaccacaatcctaaacttgctcttcttctgatcttcctccttaccttccgttactccattactaacctccgcttcttctcctncacttttcgtctcctcaccacccacaaatctatcattcgtc

SEQ ID NO: 27743 - DNA, 1059 bp, Arabidopsis thaliana landsberg
tcgccaaccagcaccccgctggtgatgcccctcgccgccaggagtatcccccccagggccgcggaggtggaactcgcggtaggggccggggacgcgcggagcgccacgccgattctactgtctcttccacggcgaagactgcgcccaccaaaccaaagactgcccagaaacgaaggccaccaaagacaggatggcacgggcgcacatgccgacaaccccagagttgtcgcacacacttaccagcaaccccctccaccatatatccacgcccccgtcccgcatccaccgcaccacgcttaccaacaccatcaggaagtacaaatcgtacctcctccacccccaccaccacaccagcaacatcaaaacatccccaatgccccaaagcaggaagacttcgccgatcaaccgtatcgtggagtcatccacatgataactgggggtccaacactgacttcgacaccaagtggcagaagcgggaccattaccgcagcatcaaccacgtcgccatcaccggtccagtcgtgcagacgaagtggtcccatgtaccgctaaccttcgacgcccgagacgtcgacctgcgcacgccccccacatcgacgccatggttatcaactgcagcgtggcaggctgggacctgcataaagttctagtcaacaatggcagtcaagcagacatcattttcctccatgccttcgaccgcatgggcataagccacagcctgctcaagccttcggacaacccattgtatggcttcggcggcatgggcacttttcctgtcggcaaaatagaattgcctctctccttcggtgtagcacccaatgcccgaagtgagcaaataacctttgatatcgtcgatatggtgtatccgtacaacgccatcatgggccgaggctccatcaacaagtttgaggcagccattcacggactgtacctgtgcatgaagataccaggtccgttagccgccatcacggtctacggcaatcagcagattgcgtgcaacatagagcgggacttcgtccctgggcaaagaaatgtgcactgcctcacgggccagcgcga

SEQ ID NO: 27744 - DNA, 1046 bp, Arabidopsis thaliana landsberg
ttaaattaacaaacaagttcgatatgagtcatatgacgatatgtaaccatcacaagattcatggtgttgcaacaacggaagatttgacagcggcgacggggaaatcgaggagaacgatcttgtcgatgacggcggtgaaagcggctgagaattcaacatgaagaggatggcttgtgaaggcgacgtaaccatctttgttctcaaaggtcatcgaaaatgcatgagtgaatccttgtctaagcatatcgtgactctctttatcttctcccctaataataaccaaatcgtacggtcattaatcaaaagatccagaacatacttaaattattgaaaaaaagaaaacaaaacaaatgatcacaaaccattcaaaggatttgacagtatcaatctgagaaacaagattctccaagcccttcaagatctcatcaacctttgtatcttccttaaacttcacaaccaccaaatgcttaaaccctgaagttgccattaattttattactttagcctcactcacttacatgtatacttatgttgaagcatttcttatatagaggtggagattcctatgtatgtgtgcacgcgtgtgaacatgtacgtgtgaatgtacacgtgtgtatgtctgtacacatgtgtgtgaacaataatgctttttgctgtgcttgatttcaatgtacaatcttctgtctgctctgacaatctgacattacctatatgactatttgtctctgaatttaaacattttttttgtttggttttcatttgtttttcaactagtctatcacaacttgcatgttttgtcaggttataatttgtatttcgaatttattgtccgaatttttaggttacgaatagtttttttgacgttaagtgggtttgcatgtctgtattctcattcaccgaaaaaagataacttgtgtagctgagatgcttagctgcactagctagatagggcgtaccacacaactcgactatggtttggggaaaaaattcttgactaatctaaaaaacaaacaattctaagaactttgttttagttgtttgtatta

SEQ ID NO: 27745 - DNA, 1684 bp, Arabidopsis thaliana landsberg
  unsure (1)..(1684): unsure at all n locations
aagatcaaagttctcatgtttctgaagacaaatgtgtattctctgattcaagagccttgtggatgcagatgtatcttcagagaacataaacgaatgatgttaaagcacagtaagcttttgagttggtactacacactcaacagcagacgtttgctagttatagtacctgaatcctctgttccataagtaaagtacatagacttcattacttcagagttcacacttgcttttatatgtttattgactcggtaaattgccatataaccatttttatctcggtctggaattgggggaatattattaattaatgcccatattttaagctgaccgaattattacctttgaccttcattttgaatgaagttaaacccaatctattcatataatggtcaaccaacccacagacatatcattaagcaaaattaaatgatacagttaaaacccataactacccatttcttaagaaactagcttgttgccatgtcattaatcaacaagcaatctcgagtaaaatgttatattacattagttccttatacatcaaaatctggattttacaaggagagctgtgtgaatagcaattccaactccttctcttgagacaatgttctctgtccaacaaagaaacataagttagttagtttcaaaggtgtttcatatagagtagtaatgtgaagaagaagaggattgacttacttggacagataaaaggtcgttgattttgttgagaaccttgagacgatgaactgcataaacactgtttgatggaagtttacaaacccttttgatctcttcctgaatcacactcgatttctcatcacaatccatctcattccatctttctcccacacgattacctctgcttcccatttcgtaactgattcctcagctgaaacttcaataaacagacatatacaatgaaaacggaatcagttattacaaagataaagggctcgaaaaataacaactttgtgttcgatcgaaaatagaacaaaacagaacagtgggaagaaagattgagtttttacatcaagggttacgaattcagagctcgcagtttccgattttgtcacactcaagagaatttgcgaaaagaagtgatcgagaattgtcttccagccctaaattcgataccggtcttcttatcaaataattttggctttttcagttatttacttacccgacccgtaaactaacctgtaacccgacccgggacctagctcacaaagaaccctttaagccctaaaatctccgatcacatctgaattttgcttcttcctggcaatggcatcttcaagagtgttaggcagattctcgtctcgattaaagtctctatgtcaaaatctcagcaacaagaatgccaatgtttcatcactccgcctctcccatcaaatctgcatcaccttcctcagcaactagttgtcgtctcaatcgatcttcaaggtttgtcttttgtatcatttcacactatcaaatggagaagacaaaaaccttcttttttcctcactatcaatgggtctgcaacaatgtagattacttgctgataattttgaaatctgaatcaacaaagtcaaaatctttctaagcaaaattacaaatttgatgaacttgttaaatggcaaaaatcagattaccagtggagttgagctcntatttacctctgcncagtgctatagcatcgtcc

SEQ ID NO: 27746 - DNA, 504 bp, Arabidopsis thaliana landsberg
ctagtgagttactttctagagaactcaacaatcctcaagaaactcacactatgcttacgtaacttcagagagaaggaagaatctgtcatcgtcaagaaactccttaccattccaagactctctccttcatgccaagttttcgttctctgatcctcaatattcctcatagtagtctttatttcagtgatgaacacaaaaggtttgtcttttgggtaccaagttatcgttaactctgtttttttcttcgttttatctatcgtaaacttttaagagaatcatatgtttggtattttgtcaaatatgactattaatgctttctcgtcaacaaaatccttattgaattatttattaacactttataaatagatatatcctaattaattataaaaaatttgaatgcatatttacttatttctttcattagtttgacaacattatctatcttatcggtgaatccttataaatcatcaaataataatgtcacaattaaaattattataatgt

SEQ ID NO: 27747 - DNA, 1993 bp, Arabidopsis thaliana landsberg
atccattcaggcccaactttggtcgtcatggccatggctttacttttctcaaggttcactaattgggtatggtgcgggacccacgtagccgggaggtggtagacaccattgaacgtttcttggtgaagatccaaggccagtattatgtaactcacactaatttgtaaccagtagattgatccattcacacacaccgatttacttcccactcgcattatatgaggaggtgacatcagtttgctccattcgccagattcaatatcaagaatcccaaattcataacaatcatgaaaacacatcctcactattttatacttgcccgtaactttgtctctaccgaatcccaagagccaatttgcttgcggtcctgaaagttgtaaaaatattttttttttactgcgctttaccatgatggatcttttttagaaattttacatttttttaagtaatattgtctagtgataattttattttttaacacactttaaaaagtatattatattattatttaattatttaatgaaggttaaaataaatcaactgttctaagttttacatttccaatgtaaaacttctatttttttctaaaaaatcaatttttatgggacggagaaagtataatattagattttacctggatctggaccgggtagaaatcttcggagttgtccggtggagacgttcaaaacgttgaaccaaccaggttcggtgatgcagactaaaccgtcgcaagtcatcgagggttgcgtggcgtcggtatgaagataaacgatctcttcgtccccttcgaactgagacttagggaggatacccggccgcgtgcagtagtcgcagttataagcagccaggattttcgggtggttcttttgaagagttctacgcctctccacgaacaagttcgattccaggattgatctccattgttttgagacggttttgaatttgaggattgatttcaaaggcaatccaaggaaaatttcttcaagtagctcggaaactatgtagatagagttagtgttttctctttcttcctccatcttttatgttttgtctgtcgtcgtggttctgacttttgataaacccttaaatatcgactttaagtgtatatctgaaaaccggttttggtttggtaatttcgttcaattaatttatttgagaaaaagtacatgtcggtcaccaattatgacttgtaattcacatctcaatgcgttccaaatttttttttatctaaacgaagaaaaacttattacctttaggaaaaaggttaacggcaacaagtgtgagcgaaaatacaaactagcaaatgttatgtcccttttttttggttaaataaaacatgtcttctcatgtaaaaatgcaaggaaagtgatttcagaaataaaagagcttggttgaagcctgaaagaatgctttgaagttttttcaaaaatatgaattgtcaagaaaatgtattaaatgttaaccaactacataaggcaatcaatcatatatttgaaaaatgggtatgaagttaggtcctatacaaataatacaagggggggttcgttgtcaataagataggcacaactcttactgaactgaaataaactttagtattgaacaaactgatttttgttttggtttatttatctttcagtagaggtaatgattatataaaagattctcaacaaactaaaatatacacatcatatttaatatcatcgagatattatcaactaatgtataaaagtttcaatttatgatagttgatattaggatttctcataaataaacaatgttgataataatctaattaatgcttaaacaatgtttacttacggatcttaacattataactttaataaaatagtagagtaaactataaaagcaacaattaattgaattaactttaaaaatatagcaagattttagaaccacaacaatagtttgattcttaataaggtaacttataaaaaaggagcaggtaatccccaatagggtagagggtagccaa

SEQ ID NO: 27748 - DNA, 694 bp, Arabidopsis thaliana landsberg
actcagattaagtgtgccactttcacataatcatcaatcatattgatataagcagatagactcgtccgataatttcgaatgtcctacgcaaatagaaataatagtactctttatacattttttttgcaaactttcaaatcatgtagtaataaaaaaaaaagcatactaaaacttgataaaacaatttttaaatccataaatagtttgtaaaaatataaataatagtgaaaaaacttttcttttaattctatttattcaaagcaaactcttccattttgtaattacgtccattaccttaattacaatggaatccaagcaaacaatagaagaaataacaatggaattaatcaaagagaaatttttgtacaaatatatatttttatccagcttaattaatattttattaactttaaatcttaaagcccatgtattattgtaaaagaaaagaccaacaaaaatgaattaataacaaaaacctataatattgtgtgttttacataaaaaacctaacataatttttaaaatatgtccctagctctcttttgataccttaagtcattgcttgaatagcttttcctatggaccggtcttgtaagcacatccgctcaaaccacatgttttttttttttggaaagataaaatccgtttgacatctacaattgaactgaaatgctcaaccaattgcagtttgatc

SEQ ID NO: 27749 - DNA, 1768 bp, Arabidopsis thaliana landsberg
  unsure (1)..(1768): unsure at all n locations
tattcgtcgcaggatacttctcactccaaaattgagtcaagttccgactttagaaccagaattggaatgagattgctaattagcgtagaggggtcttgtagattatactgaatctcaaatttggatcgtaaaggttcaaactttacatgatatgactcatttgtacagtgaaagttagggtttttgctgggacgagattgattaaaaggaaacatctttactcatgtttcagttctaaattatgtgttgccacaatttgggatgaaaaaggttaaaatttgacatgatctagctgatgaatatgtgattggttcagaaaccaaacaatacaagcttcagttacataactgattgattgtgcatcattctctagtaggagttattgtagttcatttaatggttcagaactactaagctagttagcaactgaatcaaccttattagtctctttatattgcataccaagtttaggtattaagattatctgacgaggagtctcattatgttacttgtctcattttcagtttcactatcatattttttggagaagaggaatcaaagtgcataatcgtccctcatttaccagaagctttcccaccaatcaaagtccctttccaaaaaggtgccgggcagaagtttctacaagctccagggacaggaatcgacctaggcttcttttcactggatgatctatcgaaaccatcaccagaagnnnnnnnnnnnnnnnnnnnnnnnnnnnnnnnagtaatatcaccaagctcggtttcagaggaaccattagttcataagcagatcactcaagcggttttggagaagacgaatgatggatctttcaaagtgaaagtcatgaaacagatcctatggattgaaggagaacgatatgaactacaagagttgtatggaatcgataattcaacaacacaaggtactgctgcatcggggttagaggatactgatggcaaagaatgtgtcatttgcttgactgaacctaaggacacagccgtcatgccttgtagacatttggtacaaacttctagcaattctctttgctttcttctaaacgcaatttatttcatttactcggtaaacttataaattagagttccagttatggaacaggcaaattctgtcattttagacttgcttaatattactgttgattgtctctaaagccaatctacatcaagtctttcacaagaccataactttttggttgaattgtcatcaagactaaatcatgttgtgttgtctcttgcagtgtttgtgcagtgattgcgcagaagaactgaggtttcagacaaacaaatgtcccatttgtagacaacctatccatgagcttgtaaagattaaagtggaaagtagtgatgaacaacactgaaaaagaggtttcttcccttcacttaaacaccatgtttgattctttcttcttcttctttttgaaaaccgtcaaatcgaattctttttcccttttttcttatacaaatgtgttttctcatgtcatactcttgcacatatttgttggtcttagttttgggaaactcaaagaaaaaaaagtcagtaatgtatatatagctccaatggttcttgagaaactttctcattgtatctttctacttgaaacactcattctgtaactgaatacattttggtttgggcattgctcaaatataacgtgcaatcatataatattaatcgtaacgtgtcgggttgacatatagaaaccgaacctcttagttaccgccatgactttaataaaatagatatcttt

SEQ ID NO: 27750 - DNA, 2747 bp, Arabidopsis thaliana landsberg
ctttatcttgaagatccacttgcaagtaacaatctttcttcctggtggtcgtttgacaaaatcccatgtctgatttttactgtgagattccatctcatctcccattgcagcaaaccatttctcagcctcaatccatgaaacaacttctcgataagtggttggctcatgagtatccacctcttctgcaacctgtaaagcataccttgccatatcctcaagacagaatcctgccatatcctcataaccgtatctttgtggtggtccaactccaatcctccttgttcggttttgagcgatactgtaaggttttaattctggcttgatagtgtcagctgacccatctgctgcctgtagctccttgctgtcttctggtttctgtacatcagctttcatattaggtgtcagctccacctgtttatcaaaactactgctctcttctgtagttgtagacttttctgaacgtccgagcatagaaacttcgtcaaagacaacattcctgctcaaaatcactctgttctctaatggagaccaaaccctgaatcccttgactccatctccatagcctacaaatactcccttccttgctcttggctccaatttaccttcatttacatggtaataaactgtgcagccaaaaatcttaagattagagtaatcagcagatttaccagaccacatctctgcaggtgtcctccacttgattcctctgtgcggcccacgatttatcaagtagcaggctgtacttactgcttcagcccagaaccgtttttctaaaccagcattagagagcatacacctagctctcaccagtaatgtctgattcatccgttcagctacaccattctagtgtggtgtatctctgacagtgtgatgacgagcaaccccttcatccttacacagctgattgaactctgatgaacagaactccagaccattgtctgtctgcagcctcttgatcttctttccagtttgattttccaccaaaattttccactccctaaagttcttgaaagcttcacttttgtgttttagcatgatcacccatgtcttcctggaataatcatcaatcatcgacataaaatatctgtgacctgccagaggttcaactcgagctggaccccaacaatccgagtgaatataatctaatgtgcctttggttatgtgaacagccttagggaacttactacggtgaagcttcccatacacacaatgctcacagaactcaagactcttgatcttctgaccacacaaaagatcttcctttgataaaatttgcatccctctttcactcatatgaccaagtctcatatgccatagcttagtcatatcctccttgtgaatctctgctgatgcaacattcgctgaaactgtaacagtgaacccctgtagtatatatagagtaccacttatgacacccttcagaatcacatgagaaccttgacagacctgcaaaattccatctccactagagtatttcagacctctactatcaagcagactcagtgatatcaaattcttttccatcgacggaacatgtctgacatcgttcagtgtgcaaaatctgtcatcatgtgtcctgatctgaatagaaccgattccagtaacttgactgacagaactgttggccatcttgatgcagccgttttctacctgtgcataagttgagaaccactctctccttggacacatatgatatgatgctcctgtatcaagaacccacacatcagaattgtgataattttcagcagccacaagagcaacatcttgttcagacttaatgccatcttatgttacaacagcagactctgattgtttcctcccaaaacaatttaacttccagtaattacagacatcatgtggcttaggactcttagaaaacagatttctaattctgttcttcatacgatatcctaccccattgctgccactagctactagcccagaggcttgattatctgtaattgtaccagcctcctgatgacgccacatcgtcatgtgaagcgcagacttgacttcttccaatgtaactgtaactctattcactataaatgattccacaaaattcttatatgatagtggtaaagataccgacaaaagcacagcagcatcttcatcttcaaacttaacatcaatattacgcagttttagtaatattgaatttaaccgatctaagtgatctttaagtggcgtagcttcttgcatatttaatgcaaacagatgttgcttcagaagcaacttgttctgtagagacttcgtcaaatacaaactctctaacttcttccacagattaaaagaagtggtttcacttgaaacctcaatgatgacttcatcttcaagacacaacatgattgtggagtgtgccttctcttccatgacagccatctcagcagcgtcactcttccctttactgtcattagacagcggcgcccacaagccttgttgctttaacagggcttgcatcttaatctgccagagactgaaactgtttctcccagaaaacttgtcgatcttcacattcatcgcaaacatcttctcaccagattacaaacgcagaaatcctagaacctgattctacacaaaactttttctgcacggattttgcacgaaaccttcttctacacagatctgcacgaactttctttaaccaaaaatcgcacgaaacgcataacaggaaccttgtgctctgacacgaattttgcacggatctgaactgcacgaactcgcacgacgacacagacaaagaactt

SEQ ID NO: 27751 - DNA, 1461 bp, Arabidopsis thaliana landsberg
  unsure (1)..(1461): unsure at all n locations
gcgtcaattctcaacccagttttcagatttggtattcgattttatttatgtaattctcatgttatttatcttttctgttgaaacctctctttctcgaaactactaatattagggttttctgggtttgagaccacgatcttatcgaattattaatatcctttttttttcctgtttcaaacatagggttttagtgcatgagatcgaataatatttatttttgtttccgtttctagggtttattcaattttttgcgtttttacgttgcaatttttattgaaattcagatttctggagaagtgaattttgcggtaagcgtaatttagaatttgtaatccgtattctcatggaggattcgaatataatatgagctctaaattgattttatgtttgcaactttgttttgtttatgtttttttttaattggtttgtgaattttgattataactaaatttatgaattttgcatggttgtgaattactatattgcaggtttttggaagctaacttattgttggaggtggagagatatggctgactttggtttgttctgtttcccttgtttaatggaagttgtttcatcatcatcatcatctctgtgattgtaattgatctcacaccatgtctgattacaatggtgatgatcttgaagatgaatatatggctgatgagtatgacatggatgatctcgaggatgatatgaatgccgcgtttgatggaagagatatcgatgcttctgattccgaagtcgaagatttcgatcaattggtttgtcttcttcctctgtttctcacactcttcagctttgtgttctctgtatatttttcttaacacacaattgcttgtatatggagtgttttcagaacaaggctgcagatacttctgctgctcaagcacggaatgggaaggatattcagggtataccgtgggatagtcttactcttactagaaaagattacagaaaaactaggctagaacaatataaaaactatgaaaatatacccaatnnnnnnnnnnnnnnnnnnnnngtgaattacatttcatgtttctttaaggttatttattagtagatgcacctatgttgctcttttctcactctagtcttgtctattggaaccagaaatgcatgaatactgagaaaggcagctctttctatgagttcagaagaaattctagatccgtgagatcaacgattctccattttcaggtttgtctagtgcgttatataacccctgtctctattatgcttccaacaatttggtggctctctcggggtttctaaatgtgacttggtagttttttcatcataatgtagaccttccctgtgctagtattgatgatggaaccatagttttatgtatagctgatcatagttaagactaaattatgtttgcgtctttgttacagttcaggaatttggtctggggcacctcaaaaccccatgtttatttattgtacaactcct

SEQ ID NO: 27752 - DNA, 5147 bp, Arabidopsis thaliana landsberg
  unsure (1)..(5147): unsure at all n locations
tgataagttatgaaaatgaaatgtttctcaatgctttgatgtcttatttgcaggaagaacatgagcgaataaacaagaatcccagagggaatggccacgagagatcaaaatcagtgtcagagagcagacaaagagaaattgctgaccagattccgtcacgttcctcgtcagtagatctatcttctgtgtttcatctcccggagggcatttctgattctgcgcccaacacttctttgtctgggctggagcactgtgctaatgtgtttataactgataccaatgagagctcgaagctgtcaagtaacggtcagcacaataatggagaggccaagtctatgcctttacaaattgacaatctttcggaaaatgcttcgcctcgagcctctgtgaatagtcaagatttgaccagtgatcaggaaccagagagtatagttgagaaatcaagaaaggtgaagtctgttcgatcatcctcggatattaaccggagcaatagccggttgagtttattcagtgaaagaaaagaggctaaggtgtatccaaattctacacacgacacaactttggagagcaaaatcacgaacttggaaagtagagtaaagaagcttgagggtgagttatgcgaggctgcagccattgaagcagctctctactccgtggttgcagagcatggaagttcatcaagtaaagtccatgcgcctgctagacgtcttttgaggctgtatcttcatgcttgtagagaaacccatctctcaagaagagccaatgcagctgaaagtgctgtctccgggttagttcttgttgccaaagcgtgtggaaacgatgtccccaggtatggtaatatctttctttgcataattactattctgagtgaactttctcagagttaaattttgtccgtgaattgcagattgacattttggttgtcaaacactatcgttctgaggacaatcattagtgatactagtgcagaagaggaactgcctgtttctgctggtcctggaccaagaaaacagaaggctgaaagagaaaccgagaaacgatcgtccttgaagtggaaagattcccctttgagcaaaaaggacattaagagttttggtgcctgggatgaccctgtaactttcataacagcgcttgagaaggtcgaagcttggatcttctcacgcgtcgtagaatcaatttggtggcaggtaatgttgctctgttctccctgtttcatcttttcattctctgaaccaattataattcacatgctctttttctttggttgcagactttgacaccacgtatgcagtcttcggcagcatcaactagagagtttgataaaggaaatggctctgcatcaaagaaaacttttggtaggactccgagtagtacgaaccaagaactaggtgacttctcattagagctttggaaaaaggctttcagggaggcacacgaacgtttatgccctctgcgaggtagtgggcatgaatgtggctgcttgcccatacctgcgcgtctggtaaacatttctccttttgagtttgtcacttttggaccttactcttgatttcacaaacgaatgtccacgatttgtaacgcagattatggaacagtgtgtggctcggctagatgttgctatgttcaatgctatccttcgtgattctgatgacaatttcccaacagaccctgtatctgatcccattgcagacttgagagtcttgccaattccttctacaacatcaagttttggttctggtgcccagctgaaaaactcggtcagtgtactcaactcaatagcttggcaatgcttattatactgtggtctctgtaaagctcatgcatttctaatttcaaacagataggaaactggtcaaggtggctcactgatctgttcggcattgatgacgaagatgatgacagcagcgatgagaatagctatgttgaaaaatcgttcaagacattcannnnnnnnnnnnnnnnnnnnnnnnnaatgatgcttccaaaagatatgctcctcaacagttctgtgagaaaagaggtgcaaatgcaacataaaactcacaacacttttttttatatagtcttctttcttttacttgatataatatatttcttctcattgtgaaggtttgcccgatgtttggtgccccgttgattaagagagtgttgaataattttgtcccagatgagttttgccctgacccagttcctgatgctgtactgaaatctcttgaatccgaggtgagaccatttttataatgatggatctaaggctaagcagctaattttgctaacggaaacgtgatggcccttgtaggaagaagctgagaagagtatcatcacaagctatccatgcactgcaccttctccagtgtactgtccaccttcacggacttcaatctccaccatcattggaaactttggacagcctcaagcgccgcagttaagcagaatcaggtcttcaattacaagaaaagcgtacacaagcgatgacgagcttgatgagctgagttcaccgttggctgttgttgttcttcaacaagcaggttctaagaagatcaataatggtgatgcagatgagacaatcaggtatcaacttctcagggagtgttggatgaacggcgaatgatcagacattgatgtgttttgtcttttagtttccacttgtgactgtttgtaaatgtctcttatgtgtcaaaaatctttgtcaattggttgtttttggtgttgccgccatgtatagaatgaagacagtagtaacagtactggagtttgagcttgacatatatacaatttgaataacacgcagattgaccactgaagaatcaaaaacagaggccacttagtcaaaaaaaactctgaaactccataaacgaatcccactcttcagctttcactatcctttgttccttacacaatttcacaacaaaacattacaatggtgtttattagaagtaaagtttcaaaatccattgaagccattgattctatagaggtaccttgtaatactcctcgagtcctcgtcctcgaaatggagatttgagcagatgggcttttggaggttggaatcaaaggaagcatcggatttgagggggttttcgaacattctcttggctatttcgagttgatttctcttcgaagttgtgtcgtctccatttttgttgttacagtggccgagctttttgttttcacagtttttatgggtttacattggttttgaaattcaaattgatctcggttcggtttactttggtttagagaagaaaaccaaaaaaaataagacacgcgatgggtttttgagaatgaggtgcgtggatccaaaaaggaatgatttttgtggattaacccctttagaaatcgtagacacgcgctcaacgcgacatgggtgagactggctgtgaaatggcacgattggtaaaagtggggtatgaagtggagctctctcattggctaaaaaaataaaaatagtagacatatagctcctatcctcctcctctctttttgtcatttttatattagcccctactgagaatgaaattcagattttattcaatctgaaagttgtgtgtgttttagatacaattgaaaaaaacttgaatctggactttgtgatactaaaaaatttcctcatcattttgttctgcagccatttttacaggttggaggttataactgaaaacttgattcaaagaatcgcagctgaagaaatcaaactaagtgagttgaatattttctaaacatgtgaaatatattggtacaagtttttccaatcattttgctgaaattggtacaagcttgtgaaattgtagactctctcttttgtagcaatttaaaaatctcatctcttcaaatctatatataaaacaggtggataacagaaaaattggtactagagcctttgtcttctttatgattctctgatactttgaaaaaccgttcacttgactaacctgcaagtgaatttcccttgagtagttacttatgtaatcttctcatgatgcagacagctaactcaaactccttagttactgtcttctaaatgcagtttaaatttcttgcatttgcttccttctagagcttcttttcagccactgccaccagcattgagatgtgtcgtttatcaaactagatacatgacactttcacattattgaagtgagtagccttgagacagttcatgcagcacttgcacttgtctcttccatttcttcttcgaagaatcccactgaatcactccaataacctcttcttagcttactcagccctaaaaaacataataattcagaatcctgcaacttattctaggatctgcaacttagtttcgaaaacctgcaattctctagagatctgcaattcgtttctgaatatcttaaccaatcaacgaccttcaaacaaatccgtaagagtccttttacccacagatttataacctttgaacttgttcataaccagttattcttggctttcctttcttttggtaaactgaacttccatgaatctttatcaaacattttctgcagccttttgactcatccattgagctacatacctaagacaacctcaatgaacatagcttcaccagaaactaaaaaaaaggatgtcactttgtctttgtaagctcagcttctcttctatgagttatgctgcatgctcttcactgtttctttgattcactcacacgttctaatgtatccgaatgagtttctgtgacataactcttaagaaagtgtgccaaaacgtgtgacacatctcctttcttcatgtagccactcaatctaattcttttattcccaaaagaaccaccaagaacttttctttaatatctgcaaccttgtcctctctttacatggagcattcttcatgttttgatgatgatatagcttaagctgatgtatcacaaaacaatgccttaatctcagacaatctcttgtactctcttttctttaatatctgcaactcatacttgtcttgtaccgctgttaagataaacaggacacgctgcctaactcttctagctaagaagactatcgacacaataatagtttaccatgttgcataatacacacactcatttctaacatcaaaatcgcaaactgtattctttatgtggttccctcttaacactcattttcaggcgagaaaacgagcagtaacaattcacgtgt

SEQ ID NO: 27753 - DNA, 1482 bp, Arabidopsis thaliana landsberg
tcgtacccatcaaaggaatggaggtatctatatctggtgagaaaaaaaaattgtaacatatatcaactaatataactatattactttatttagaacatacaatttaagttaatttttttatcatatttccttatgtttctggtcatcatataattccggtcaaccaaaataattatattgcttcatgttatttatgccacaacaatataaataagaaaggtaggttaaacatttataatcacaaacaaaaatatgaaaatgatggtgaagctctctccaataacaatgatggttactctactctttcttgcatttggccttgcgcatgctagatactcgattttcccaaccgagcatttctttttccatcacaccatattagtgaaccaatatctaggagtatttccaattcctcatccagttccaccttcgccgggacatccaccacaccaaaacgcgaagatatcagtgaaccaatatccaggcgtatttccaattcctcatccagttccaccatcaccgggacatccaccacaccaaaacacaaagatatcagtgaaccaatatcctgacgtctttccaattcctcatccagttccaccatcgccaggacatccaccacaccaaaacgcaaagatatcagtcaaccaatatccaggcgtatttccaattcctcatccagttccaccatcgccaggacatccaccacacttaaacaaaatatcagtgaaccaatatccacacatattaccaatttctcatccagttccaccatcgctgaaacatccaccacaccaaaacgcgaagatatcaatgaaccaatattcaggcgtttttccaatttctcatccagttccaccgtcaccaggacatccaccacaccaaaacaagaaaatattagtgaatcaatatccacgtatattaccaatttctcatccacttccaccatcgcagggacatccaccacaacaaaacgtgaagatatcagtgaaccaatatccaggcgtatttccaattcctcatccagttccaccatcaccgggacatccaccacaccaaaacaagaaaataccagtgaaccaatatccacgcatattaccaatttctcatccagttctaccatcaccaggacatccaccacaccaaagcgcgagtatatcaatgaactaatatccatacaaatctctttgtcattcgggttataaaaaatgtatcccataaactagtatgttttaaatggaaataagacaacataagatatgttgtattattgtgaatttttatattataaatctaaattacttcatccataattagagctataatatttagcataaacatatatatgctaatggtaccttatgtttcatattaatgtcaaatttgaatggctaggatgctttggtaacgatgagtgatagtattttgataaaaattttggccttctcttgaattctggtaagaattttttttctttttttc

SEQ ID NO: 27754 - DNA, 1387 bp, Arabidopsis thaliana landsberg
attggtagataggagcaccacagttttattttatttgtcacaacaaaacaacaattgcatatgcaaaaaaaaagaaaaagaagaagagaggtgttggtgcatggtgattactatttaaaatataattttttatattttaaagtactatatatataaatatttttgatctctaatcacaaaagatgatatcaataatatgatacaatcattcatttatatttagtcaagatcatgacttttcttgaatttccaagactgttctgacaattctatttgtgaataagttttttttttgtttttttacttcgaagtaaagacttgtttcacttgtcgcataatcataataaaattccatacgatttgtttttcataaataatttatagacatagaaacacatttatatactgcttcctaccgttgagacaatctgagagagaggaaccaaaacaacgaaaggtccaaaccttgataaacattaacatacttatcttcttcttaactaaaatatttacccacaaattaataaaacaaaaccctagtttttttttgtttgcgcttcagttgatctgaacagtccacgtcattcagactaaaaaaggtaagccgacggtcacgatgtatccacgtcatcatcaccacacaaaaatttccccaaaaaagaagagatttttaatcgaaagagtgatgatgatggtcgaagaaatgatccacatcccatggagaagactcgaaatcatcaatcaaaccaaactcgaaatcttcagtttcgttttctccttgtttcgaaacctctgtgtttggtaacaacgttgattggattttggtttcttcatcgagaaacaaaaggtcaggggcaatttcggtatcccaaaaacattcgccggcgagagataaatccggtaacagatacggatccgggaacaccaaacccgccgacgattcttcttcttcttttataaccgtcgactttctctccggagatagctcgatcgcttcaatctcatgctctgtttcctcgttgacgttgaatcttagaacagaggtcggtgaatgaaggctctgccgagaatctctaccgtaatcgcaggcggaaaccgtttggagatcgataaccggcgttggcgtcggcggagttaggaaattcgtgagcgctttaggtcctttgagatgaatcgcggctctatcgtacgctatagcagcttcctccgccgtgacaaaagtcccaagccaaatccgagtacggctcgacggatctctaatctccgccgcgaattttccccaaggtctctgtctcacgcctctcccctttcccggcttcaccgacgtcgacacgaaatcttaaaccactacgctttcctcctccttgtgcttacctttcctcgcggc

SEQ ID NO: 27755 - DNA, 1405 bp, Arabidopsis thaliana landsberg
ctccccatgtgaaaaatcagattcaagcgatcttgcaacaagaatgggaagcagctcagcaactgctttcttgattgcatttttcatttcagatgtgagtgtatcacgatacatcctcaaaattgaagggaactttgcctatgaaaacagttaaagacaatacatgagaactgaattcagactataccctgaatgagcactatgaaccaacaataaagaacaggaatagcataaacgaagaaattaaaacaagaaagtattgtcaacttcagtgatagcatatgttagacaaataatcaggtctggtcactcaccgttcttagcaatccaataactaaaggaagaagccgatcacataaggtagaggtatcctcttcttctaacttaacctgcaaaggtgtaagcccagtattcagagtcatgctggtgttccagttctttttctgataatctaccacttctcacaatttaggatcttctatccagtttacacaaacaatcgagctccacatagtacaaaaagaagcgcccatattcattaaaatatatacaattgtatcggatgagacttacttcttcaccggtcttcccgttagatgaaatggatccccgtatttttgctgcagataaaatcagtacatctatctccccagtatcatgtatggagatacgcatgaattctgatgtgagaatactacaaagaaaaaatcaatgaaccatcagacactagaccaaataaacaaataaaagatataataatagagaaaacaggactggtagataactacatatagaaagtgaaatattatactaaaattttcacggaacagcactaccaaagaaaatcaatatacttaacacttaactgatacaaatgcctacaggttgtatactgttctacaccttttgaagatacaaaatatgaataagtatcaaaataatgacgaacatagtacatttcaatgcaaaccaagatttatcataatacgggtaattcagccagcaaggcattaccgcatgcaagacacaactttaggggcacgtttaagggttcagaagttatgattgattactgatagaatgctacaagcctggatgaatgcatagtcatcatacggtaaaactatccaccgcagttggcagttataaagcttaacatctttgcaaatggccaaagcacgggtaacatgaaaggattgattcacaaagaaacagtgacttacgcaaattatagagagactatctgctatatgtaaaccagaacaataaaagggacgtagaaggggaaaaaaaaccagagctgggaaaccctgcaaacatttttcaaatatcgaccgccttcactatctaagaatttaaagacgcacgaaagcgagactcaaaaacatagtcaacaattcacatc

SEQ ID NO: 27756 - DNA, 1509 bp, Arabidopsis thaliana landsberg
gatttcttgagcttaaatccttttttattgtgttgtcatgtgtgcagactgtgtatcgtgatggaattgtcttcaatcggcttgaaaatttgaagctatgtatatgcaatggtgattggtccaagttacttatccagtttctcaaagactcacctaacctgcgagtcctcaatctcctcgttgatgatgtaagtgtcttcgtcgactattttgtagtctaaattcacactatagtgtagtattctaacctttactttttctttttaatcttagtatccgtcaagtttgggggattatgaaccggttcgctggaaaaataataagagctccgtcccgaaatgtttgttggagagtcttgaaacttttgagtttgcaggttacataggaacacctgaagagagggatttcttgagttatatcttcaaacatgctcgttgcttgaaatcttcatcaatcttaagcagaccagaacggtatcatggaatttgagttttatgagatatgcttcacaatagaaacttgaaaatgatctaagagtatggttttttgtatttcttcttcgaatgtgggaacttgttttcgaacaatctatcgtctggcttttatgtggtaaactacaatctgtatgtctctgccttatggccttgtaaactactagttcggaagctcagtcaaatagtctcatgcctgtttaagaagctacgattacacagatccgagcatgaaagtagcgaaggtgaacacagctgtacttctcagcgcaagacatcttatcaacagctcttgattcaaagttaaacctagttgatttattttttttgtcaaaaaaaagtaaaaaataaaaaataatttggacgacatctagcataatttgatacacagatcattcctacgatctactttgtgtaaatgtgagattcgacaattaacaagcataaagaaaattccaaagcaaaacaagagtcaatcatgaagaagaaaatgggtctcttcaataaactgcataagtaaattcaagatgcactacaatgaagaaagtgaaaggtcaagacttttaattgaaacacagcaacaaaagtaaaaaaccaaacaaaacttgttctactgattctcttaatcctcctcttcgatgacctttgtgccaagaccactgagtccttctgcagggatttcagcaacagtgacaagggagaagaactcttccttcgcatcttcatcgtcgtttctcttacgtgcaacacgaaccctgatcctccttggtggacctctgattcccttgctccagatttgcttgttcaatttcacgtctaccctaacgtccttagtccccatagctttctctgcgaacttcctgatttccttgatggctttcggtgccttcttcttaaaggtgctgttacaaaccaataatacataagtagagatacttaatcacataaaaccaaacccaccaaaaaaccacattccacataccaaactctaatcttaattcttttttcaagatatatc

SEQ ID NO: 27757 - DNA, 8957 bp, Arabidopsis thaliana landsberg
  unsure (1)..(8957): unsure at all n locations
atatagacagttacgtaggaatcagattccacacacctcaagtaggaaaggaatggttcgcctagctcacgaaatggtatgacacatgactatctataataattagttacacatacaaaaaactgactatttatttcacttgttaatgtagaagagaaagagttctgaccctagtaaagtaacaagaagtaaagtctggatagtgggacatacacattcagatgggagacctgttaagccagagtttgaagctgttattgtaagaatttacattcttattatggattttgtaagtagcttagagtaattgcggcttgctttttttgattcaggataaaataaagactatagatagtcaaatggactccagctctagtataagtatcaaagatgatgctgtgagccaagtattaggaaaagacaaatccggaagagttagaggaatgggaagagggataacttcttccaagttagcattcatagaggctagagacacacatgtggaaaagcttgaagcaacccaagcagaattgctcagcaaggttgaagacctgcaaaatatagtgcgtaacttagctgcagagaaaacggtaacattttgactttgtttatattttcatgtctgaaaagtttttaaatatttctttgcatgttttcttcttcgatatagcgtgatggttgcaattctgagtctactaatgttaacaatggaggaccaaggtgtcagctgctggaatggtattcagatgttgatgttgttgtagtggaagcagaattctgctctgctgatccaacatacaagataggacgtattccacttggtcctaatgcagcagctgttatattgaagtctgctgaaaataaagagacatctgtttggaggcctacccaaactataacttcacttggcgaagctgttggatgcaaaattgcatggccattcgataagataattctggacaatatggactcaccaaatggaattaagactgctggttcatcggtaacagttctttcctttgaacttgtatatatagatttagagcttttgattagatggcccataatattatattcttgctttattctttaggccaccaatgcattagatgatagggtcttgatttatgattggactttcgaggatgaactagtcgctgaaggtagtctgttctcaacggacaaaaaggaattagtcaacaatattcctttgggaccaaatgctgcaattgtgactgttagtaaagtggttaacaaagaggcttttctgtggagaccaagtgctgacatgagttttatgggtgatgcactaaatgagaacattgcatggcctatagataaggtacatttcattcaacaatggcgtcaagaatcagtttcaaaaaatgcttcaccaaaggtaaaattccaactcttttgtctgttatgagatgttgaattttctgctaactttattgtattgactatgagatgattttctgattgtagagtactagtgtgagtgtaagtaacaccaccgacaccaacaaaggtggaaagaagttatgcatcatcttagattgcaaaggaacaagagaaaaagttgcagaaggcagagtttgttctacaaacccagcagatctcgtccattttgtgccattgggtcccaatgctaccaaggtttgggtagacgtttctaaggttggagatgcaccagtttggagaccaaactcannnnnnnnnnnnnnnnnnnnnncattaggtactacagtggcttggccaaatgacaaacttgttgtgtaatttgtgtacttttaagtacttagagctcagtaacttttgtatcttcttatgtcatggtgtgaacttggtgtaagctgttcttcttaatgataatttaaatggttttaagaagtttttcattattaacagcaggtttccatatttgacgattagaaaacaacaaacaatagaaataatagcagtacaaaccattagtgctataataaaaacataggtagataaagtaaatcataacaaaataaaaatgttgttatacagtttttaattgcattaaaataagcgctattttaaattactctattgtagcatagccaaaaaacgttatataaagtgttttatctattatgacgggggtagatagagcgcttaccaaaccgctatactaaccatctatagcgtttatcggatgctataaatacttcattttcatgtagtgtttgttagtatttctatggtcaaaacttgtcacaatccaaagcatttgactaattatatgggttaaagatgaattaggaacacttataccgattttcttccagaagaagctaaaaccaacaaaaaattgcttagaagcagtaaatagctttgttagtgtttgtatggtcaaaatgtgtcacaatctaatgtatttgactaatcataagagttagagatggagtaggagtgtttagacaacattaatacctattttctcccaaaagagactaaaacgaacaaaacattgctgagaaacagtcaatagcttcgttagtgtttctatggtcaaaatgtgttagaatccaaagcatttgacaaagaagaagagttaaagattgattaggagtgtttagacaacacttatacccattttgtcccaaaagaggctaaaaccaacaaacaattgcttagaagcagtttgataataggtttttagtcaattatactaaaacaccaatcatgtcgttgtagtattttaggttgtcaatccaaatgggtgtgatgctaacaatcaagatgtgatcagaagtcattaagtcaagccaagcaataacaggttttggtgtgttctagcaatcctaagtgaacatgcagaaaacagaaattcaagcagaaacagtaaaacactcgaccaacacagctcgttgcagagcactgggtgtgatcgagtgacaggtcgagtaacagacagaaaataaaacacaaatactccactcacagtctgttgccagacaactgggtggtcgagtatgaggtcgagtaacaagaaagaattgcagaaattaagcgacagataacaagatgcagtaaacaacaatagagtaaacaaagaattcaataagataaagaattcccgaggatggggtaattgagaagtttcgtttcctcagtttacaggtgattgacatgctcaataaattaaccctagacaacaagttcattaaccaaatctaagtgccaccgcaacagagactctcaagttaacctagtcccagactcaatcaccattaacgagatctaacctaacaggcattacgaatcaacaagttaaagccaaaacgctccctgcaaccaataccttggtactgtaagattaatggtaatctccgtgaggaggctcatctcatatatgacaactatatatagagctatacaattagggttgtgtgtatcgagtatattctatacaaaggaataataggaatgtttctatatatctattctatcaggtacagggtcacgaatctctggaattagtggttcagacatttcatcgaacaccttttgggcgcgaaaatgtctgggctcaaattccagttgatcagaaagcaataggcattaagaacaactaatccagaagggatctatcaatcaatactcaatcacctagcatactgaaaattctaccctactctaacccatcctcagagacttattcactactcagacatcataacagaaagcataaacgttgaacaagttgaaaacatgataacaacagtgtaacagcaggatgataacagaatgaacaacagtaaacgaaatcaagaacaaaagctgaatactgaatactgaatagataaagagaaatccggattacaaaaggtctagaacacaaggtctgcggaataaaactagataaaacttcttttttgcgaaaatgtgaagtacatgctacttatagccaaatattccgaaaccctaatacttaaaaagacgaagtattgggacggattaagaactgtactcgacccatgtggtcgagtgggaggtcgagtgaaaagctggagtcttcttttcttccttgtgctcgagagtctggttgagtgcggaatgaagaaggctctgaagcttgtcatcgagtatccagtcgagtggtggtgatggtgatactcgacttccaggtagactgataaggtcgagtagtggtctggcaatgaaggtgaagacactcggcctcggggtcgagtgatgtgatcgagtgatggtcaggtgatgggatgaagacactcgaccttggggtcgagtggtgaggtgaagtggtgatgtcttctactcgaccagggggtcgagtggtctcttgagatcttgaagctcctactcgacctcggggtcgagtggtttgacaagatcatgtccgcttcttccatatagctcgtcaacagctccaaatcacgtgaaatcaacacaaatatgcaacatgcatgcaaatctattctaaacatgtaaagtgatgacaaatgatgagaaatggtataaaacagtgatgatatgatgctaaagtgatgacaaatggatgctcaaaacatgcaaaatacacacttatcaactcccccaaacttagtctttccttgccctcaagcaaacaatcaagaacaagctggaggggaggtttgaaagcggggactcagagccaaagcaccagataaaccagatgaaatcaatgtccaagttgaaagttctaagctgcaagatcaaattctacttaaaaacgttagccatgcctcattatcaatcaatccgactcatatgctcgacctacacatgttttcaaatctaccaatccctttaacattcattagttctggaacgtgaatcaagcaatgcatcatcaatgaactcatttggctaaggtgaaggtcaagagacaaagatggtcccttataaaataggcttaagtaacaggggatccctcaagaatgattgagctttagtagaatgctaaaggtaagtcccaagttatgcatacagagataagatcccatttacccagagtataacaatgaagttctaatggtaatcccaactcctgtcccaacttaactctaccctttgcactcatgaatctttcaaactctttttcatatcattctttcttttctcttaactctaggagaagctttctcaacgctctaatacatctagcgggtttggatttctttaacaactaaggttccgggtttttttttttaaaattaaaattttctttaaaaccaaaggcttttaacccttcttctttagctaacaagaacctcattttttctttgcattcctaaagccttcactagattttttttttctaacttctttagcttacttcccctagaattctttccctttccttatcaacaatgaattcacccttttcttttaaacacatcccaacccatgatataagcgcccacctagtcctatccagtccgaagaacgcgaactagaactacatgagacactatctttgtcgttacgaacctaacactttctaccaagctcaatcgaaataagacctcacaaacactcacaagtgataaagggcttgaaagaaagtttaggtttgggttcgggttaattgctctaataaggagagtcagctacttggattaacaagagtggttaaaatgagtaagagaatccaagtattttagggtatccatgagttcaaattagatgccaagacatgataattctaaatcagattcaagttcaaattgatagggaatggtatcagatcctaacagtgtggtcgagtagagcaatctaggcatggtgcagttttactttaatttcaatgactacgcatcagacaactaacaacgagggcactaagtttatctggtgaaccaaaatgcttacaaggctatctcatcatcatcccctatgcatatgcaacaatcctaaatgaaacactctagactcgatcctaaatgtgatgcaactacatgaacactctttttttttttttttatgaaatcattttctgaaatttttcaaatttttttggttttttctatgccttagatgaatgcagactcaaaattatacacaatgcaacacacacttcctgagccctcccccaaacttaaatcacacagtccactgtgtgaataaacttggaagagagtactcaggacaaatccaatcacagaaacaaaaaatgaagaaacaaatcacaaccgacggtataatacaatggtgaagtgaggcgcttacctcagtcgaagaatgaacgtagttgctcgtcaatggctgcctgcgattgctcccaggccataaacgaaccgccttgttctgtatcagctccagcaggtgggtactcgacctcatcagctctgtggcggccagcaccgctctgaggaaactcgacctctctccttctgctgcggccagcaccgcggtcgcgtaaactacgagactgcagaagtcgtccgctcctactgctagatcgagtgagtgtggtcctcctcttcctcccagattcacgaggctcgaatgatgaatgcctcgcagggacatgcagaatctcttgctctctaggctcaggcctgcgccgacctggctcgggcgcgtcatatctcctcgaaggcatgtcctgagggagatggccctgcggaatagctgtagtggaagaggagcagctgagcgtgtccttcagaaacttgatagcccttaagcacttggcgagtaacttgtcctgtttcttgcaccacttctgcagcttgctgttgtttctgtgagcttcgctcaaactcttgctttccctcgcaggaggtatatgctcactgaaatgatacatgctcgtgtcaaactccgcctcatctatttcatccgtctcatcaacatcttctgttctagctccttctgtgtgactgatctcctcagttggcggactgccctcgaaataaagatcttcaagcgcaggcttgaagtcaatgttcctgccctcgagaatcctagtagcgtaaatgcaggggaaaagaatgttggcgattctaatcgatgaatgctcgaacctgtagcggtgaaagtcgccaaccatgtcaaactcagagaactcacatcggcgcaagtgatccaagtccatcattctcggtgctaaccctacttccttgagcggaactccacaaactttcagaattggcgtcacaacgccacccacgcatagtgctcctcttaccttcttcttgccgtttgtcaatgcccacttcatgtacccacacagatggatcaacagaggcattactggtggtgcgttgttgagatctcctctcaagacattctttccttttgtacggcggagaatccctataagcgctgaatctatcatcttcatgtcnnnnnnnnnnnnnnnnnnnnnnnnnnnnnnngagtaaaagacattggcaaccgatctctgaaagtagtggatcacaggattctggatttggttgctcttggaccgcgccgagtttagcggtagattgttccctatagtggcccacaaatccttaagctcttctctgtcaaatctgggtttggtcccttccactagggaaaccaaacagttcttctaacttcttgatcgaaagctgataccgctgttcatccactgagaacgtcaagaaacctaatcccatggtatccagctcaaagtctgtgagtccctcatacatctccacttgcagcgtggaaagaaactcgattgtctcctccttataggcatggtaagggtaagacatgagtatctccagatgacacttctcgaacagatgctgtacgtcctccagtaaccccagctgggctaaagtctcatagcacggatacctcgttccccagaagtcattcatctcaaagaacctgatatactcctccactgtaacctcgtcaggtttgttcagcaacttcgtctccttgcgccatgactctggcacatactcagtttcgatatcctcatcaatcagctcatatctacttgacatcgccctctttcctctagcgattttagctcttctctgattacgtcgggctgcagagcgttcgaattcatccctgaagctctggtaaacatgttgctctctcggtctagcggaccaggactcagcttcatccacattgtaatcagggtctatagaggattctccactgtagttactcatgatgaaacctgaaaacagacaaaactcaaaaaaaacgttaatacgttagtaacagcaaaccaaaaacacaaaccaatcaagtgaaccggtcgagtgatgtaatcaagtaatccgtcggttttgatttattttttttattttttcgattgatcgagtgactttgtttggtcgagtgaaactagtttcgtggttagagtgaggcggtggtcgagtggtgaggcttgagcggtgaatcgagtgattaatggacttgagagatgagagaatgatggcaccttggtcgagtggttatgagctagaagtggtgaaggcggcttggtgatagaggtcgagtgaatgaaatggcgaggtcgagtgattaggcaaggtcgagtagcgaaccttggacggagaaggtgatgagggatcgagtgtttggtgatgagagacgagcttgaaagagattgagtgaagcttgtgagaatggtaatggtgaggagagctcgagtgatgttgagctcgcggaagaagagaagacgttggtggcgttggtcgagtgatgtctcagatggagagatgatgagcttgaaggtgataagtgttcagcagtgaagagaccgagtgatggttgaggtcgagtgatggagggacaaggcgatgggatcgagtgaagcttgtgaggacgagatggggtcgagtggttgagagaagagagatgagagtttggtttgttggtggtgatgaatgaggaggggcaaactgttaataggtgaggtgagatacgaggcgagtagtgataggtgggga

SEQ ID NO: 27758 - DNA, 1017 bp, Arabidopsis thaliana landsberg
atccccaagtcgattcctttatcaccgttctgaagaatttggtcgaaagttttggcctttagcacccaatttacaatcctggcgataactgaattgaaaagggttccaaaagttacatcacctgaaaacaacagtgcttttgattgtgttggtggtttggagtgcttgataagtttaatcagggcccttgatatggggtcctgcttatcatcatctggaggtggaggaagcaggagatctctccatggctctcctcatgttcctggtcctgggaggaggaagaggcctcccaagaggagacctgggtcttgtagttcttcgtttgataacaccgaggagccacttcttcataggatccctggaaggatgtttttgaatggctctacagacaccgtgtctctcttctctcaacagggcaagaaaggacctaatcaggacgctatgattgtttgggaggttagtttggaaattataccacatttgttgcttaggctacctatagtttagagatggattacaccaagtatagatctttagtaatcttggttgttatatgtttttcaacgtttcagaattttgggtctatggaggacactgtgttttgtggtgtttttgatggtcatggtccgtatggtcacattgttgcaaagagagtgagggatttgcttccactcaagttaggttctcatttggagtcctatgtgtcccctgaggaggttcttaaagagattagccttaacactgatgatagaaagatctcagaagaccttgtacatatatctgccaatggagaatcacgagtctacaataaggattatgtgaaggatcaagatatgattcaaatgctaataggctcaattgttaaagcctacagattcatggataaggaattgaagatgcaagttgatgttgattgtttttgcagtggaacaactgcagttaccatggttaagcaggtactagaaccaaaaggttctgatgatgatcctcactttgtcgcaattaatcatatgggtg

SEQ ID NO: 27759 - DNA, 2008 bp, Arabidopsis thaliana landsberg
gcttcctctgctccgactgacttgttcctgtctggatgaagcattacagctaactttctgtaacgctttctcactatttcgtcatcagcctcagggttcagaccaagtacaccatagtggtctacatccccataaatgatattctgtgcagataaatgaacatcaaaagtggccaccatttgagcaattccatcgagttcaggatacagaaactgagccttcaaggcaaatttcctcgcccccgcaaaatcatttgctaaaaacttcctctttgcaatctctctagcccttgtagcttcttctttattaaactccattggaagtctcctaaagtatattctcctctacaaaatgccacgaatggaggagcagggacctgactgctcggggaaaccgaatcgacttctcaataaagagactgatataaaagctgcacgagagatggactggataccgattctaggggaattgagcacccacgacaaatccgcacactgcaaatacatttggaagttaattacgtaagtgaaagcaaatgtataaaccagacagatagggtaataatgattagagaactgaaggcagaagctatccaaaataaagcctctattaaccaatcaatgcataaatctcatccaagatgatatataaactcaagattcctaaacgtcaagaatggcactacttatgaacaagtcattaaactccatcaacacatttattcttgactcacaaaaaatgctgcattgcagaattcattaatataaaaaggaaaccctaataattaaattgcaagaaatctaacatttcattgccagaaaccctaatcatttgatctacaaaaatgttgcattgtagaattcattaatataaaaaacgaaaccctaataattaaattgccagaaatctaacactcgtctgaatatcatgaaaattggacaagaactaaacagttatgtcctaaaccctaaaatgtatcagccagggacattgctcgtaattctaaaacaattcaacatatatcactcaaaacaacaatcaaattcaccagatttcccaaagtattcatcaataaagtatcgtatgttaaactccaagtgggtattcacgcacagtagtaaccaaggatcggagtatccataaataacaaatacataagcaaaggaagattgaatcttacataagcagcgaaacgaaacggtgaaggaagagaattttcggctgtgacggtacagattccagatttttgccgaggtgaaatggaatcagaagtagcgaagcgatcccaaaaagagaaatttggaatcagattatcttctacgaaaatcggcggcgcttcacaactcttgaatcgatgtttgtcactgctctgagttttttttcttctctaatttcacaactcgtttttttttcttttttttttttgactgcttagttaattcattagtatgaacgtttgtgtaatatattgggactgattacaaagagacaccagtttgattaattgataaaaggataaagattattaattaaggaaaagattattaattaaggaaaagattatttatattgttgactgtaagaaaatattaatttgtttctttttgttagtggagaaaataatagtttggtatgtataaaaggaagaaaaaattaggagaatggctacataaggtatttaatttttatgaataaagaaactattattaatctatactattatttgaacattacatttattaaaatatcttgaaagttgattagtgtttacaaaaatatcattgattaaaaaagtatgacatgaaataaaactagttcgaaaggacggagattcttttaaacttgtttcgttttgatcatatattaagaaagtgttattgatttttaatttacaagagattttgatgactttattcaaatcttataaagtaaataaaagaaatattttaagctattgttagatagttttttatatttttgttgattagtttttcataatcgtgtaaag

SEQ ID NO: 27760 - DNA, 1148 bp, Arabidopsis thaliana landsberg
tgaatcattatctgtgttaacttttggaattgtgtacatttctctttatgaaatacagtggaaatatgagaagacctagtcaaatgatgaggcttctattaacatcctttttcggtgttattgttggtttccttatgggtattacttttccaaccttgactttaactaaggttaggttaaatctttgcttcgtgcagcatgtcgataccttttcgttcatttcaaacttgattatgtcattgcttacacggtgatggtttctatcttctttgttttgaaatggttagatgaatcttccatccacattgtttccctcgattgatcttgcatacattgaggataaatactctgacatatcaagacaaagactatttggttcttggtcttcgacaaaaggcctcaaactcaagaatgacatccctgaccctccatataactataatgacactaaggttgtgattctcttgttctcttctttttttaactttctatgttttaataaagaaaattgttgatagaaactttggagctattgcagatatgggttcctactaacccccgtggtgctgagaggctacccccagatattgttacacctgaatcagatttttacctccgtcgactgtggggcgaccctaatgaggttcataaattttaatctacttgcttttatttgagaatggcttcaagatcatgtcacattttgttggtatggcatgcaggatttaacagtcaaacagcggtatcttgtaacatttacggttggctatgatcagaggaaaaatatagacactgtgttgaagaaggtatcctgccttgccaacgtattcttcttctttccttccttttctcattccttgactttacatttctcagttctcagataacttctctataatgctgtttcactacgatggccgggccagcgaatgggaagagtttgaatggtccaagcgagccattcatgtgagcattcggaaacaaacaaaatggttagcggctactttcctaagctggaacgctaatcttcttcctagtaggagtttttgatgtagtgaatatcgaattgaagccattgttagctccttgaaagtgatacttttcaggtactgtttcttctttcagatactcataataccctggtttag

SEQ ID NO: 27761 - DNA, 1453 bp, Arabidopsis thaliana landsberg
ctattcatgttataagctgtggttacgaagacaagactgaatgggccaaagaggtcagttttcaaatgcagctacagaatcttcttatgttctctttcttacctgtttgatgacatcttatttggcacttttgttagattggttggatctatggttccgtgacggaagatattcttactgggttcaagatgcatgcccggggttggatatcgatctactgcaatcctccacgccctgcgttcaagggatctgcaccaatcaatctttctgatcgtttgaaccaagttcttcgatgggctttgggatctatcgagattcttcttagcagacattgtcctatctggtatggttaccatggaaggttgagacttttggagaggatcgcttatatcaacaccatcgtctatcctattacatccatccctcttattgcgtattgtattcttcccgctttttgtctcatcaccgacagattcatcatacccgaggtttgtaaaactgaccacactgctatttactatttgaatcccattttgtgaatgcatttttttgtcatcatcattggtgcagataagcaactactcgagtatttggatcattctactcttcatctcaattgctgcgactggaatcctggagctgagatggagcggtgtgagcattgaggattggtggaggaacgagcagttctgggtcattggtggcacatccgcccatctttttgctgtcttccaaggtctacttaaggttcttgctggtatcgacaccaacttcaccgttacatctaaagccacagacgaagatggggattttgcagaactctacatcttcaaatggacagctcttctcattccaccaaccaccgtcctacttgtgaacctcataggcattgtggctggtgtctcttatgctgtaaacagtggctaccagtcgtggggtccgcttttcgggaagctcttcttcgccttatgggttattgcccatctctaccctttcttgaaaggtctgttgggaagacaaaaccgaacaccaaccatcgtcattgtctggtctgttcttctcgcctccatcttctcgttgctttgggtcaggatcaatccctttgtggacgccaatcccaatgccaacaacttcaatggcaaaggaggtgtcttttagaccctatttatatacttgtgtgtgcatatatcaaaaacgcgcaatgggaattccaaatcatctaaacccatcaaaccccagtgaaccgggcagttaaggtgattccatgtccaagattagctttctccgacaagtcagcgaaggagaaattgttcgtaacactattgtaatgattttccagtggggaagaagatgtggacccaaatgatacatagtctacagaaagaatttgttattctttcttatatttattttatttaaagcttgttagactcacacttatgtaatgttggaa

SEQ ID NO: 27762 - DNA, 781 bp, Arabidopsis thaliana landsberg
ccttcaactgccaaaatctcttcaagctgcttacttccgatcaccactttcgctttccaaactccatttcttctttgcggcgacacttgtatccttggcccaagtactcctctagggcttgttgtaccttgtctaacaagataccctagtgttttctcccttgttattggcaacgagctacatctccggcttctgtaatactcttccaggatgtttcttgaatttgtcgcaattacggtaaccgaaccaccaccatcagatactgctctttgcgaacaattccccatcttcacagcaactaaaaatgaagaaaaaataagaaagaaacagagagtttaaaactaaattttgagtttgatttgattgtttttggttcaagataggtttataaatactaaagagagagtaactctcagacaaggattgatcaaacagtctctttgttgtctcttaatctcactacttgcatgtgatactccgcgctgtgcataatactactaccttatcctcatcctttataactcattttttttctaatttttttctttttttgttctcttgcgttctagataaaattcttataaaaaatgccagcaatatagcaaatatttcaactgaatatcttcggggatagactataagtgattttttatattgtacttatagaaacacacatatatacaaactataatatgtacaaaaacatctcatatatacaaactataatatgtacaaaatcatattatataacaagaaatttgtatgtatgtatttattgaat

SEQ ID NO: 27763 - DNA, 1777 bp, Arabidopsis thaliana landsberg
aacttaccctcagcttagaaacttgataagagacgtggccgagccgagacctcttcaggaacaggttggtgagatatggactgcggagaagagaattccaatcatttgacacgcaacggaacctcgcggccgatttcgcaggcaccctggagagtatttcgaccatgagatcaattggcaacgtacccgagttctctccatattcacccactgaagaagatatggttagggcaacatcttccttggagacttgcctcttccgttttttcatcatggcggacattgcacatgaaaaagaaatgaaacccttagagttctgagtaccgatagacaaacacaagacgaccttggaaatgaaacccttacagatccactagacagacacgattttgccacctttcggattatgtctacctaccacattttttttttatctttctccctttttgtaaccttatctttttttctttaatttcctttttgtagcatccttattagataccattacatatatagataattttatctataatttttcttcttttccttctaaattcattgataccaatcgagattacaaagttattatacaaattatttatctataattaggtagtactttttaatgtatatatacatacatacactatactaattacccaatcataccgttgctttcacgcctttttgtatattttaaaaatgacttactaaaatattgagtgtgattatcttgaaaagatatcaaatttctatttaatcaaattgaataaattttgagttcaatttattatatgcataaaaaatatgaaaaggatatgactatgaggggatcatatagttttatgaaagtagatgaaagagaataacatacagtcaaagtaggttttagattagagaaagaaaagcaatggattaggtcgatgaaccgcgaccaccacggccgaatcgtagtacattgattctcttgatatttttgcgtaggcttgattggccttcctccttgggtttttagagaggagtcacccatctcaaaacaagtatcaccaaatcctgagtttaaggaagcaaaaatattgctttcaaaaacattaactagattttcatttgccaatgaacctcgttgggtaggaataaatagggtgtccacagatgaaggagtatcaaccatagaaagaagcctcagttggtgcagcatttgaaaaggctagtaaatttggcgtttattgacgccagtagagagagagaagctaagtatagtggcagatggcgttgctggggggggcatactcgtttgtccgtgatataacgtgcttaacaatttcattatggtctctacatttttgacgaatgaatgcctatcagtcctagggttttcttgtgttttaggaaacattcttcctcaaaataattctccgcatatcagatatatatcaacttaactgagaatagcgattagtgcaatagtttcaaattaaagaatgatgtcctacaagtaaacagcctattaatttctcagggacaaatctgtcagtaaacctcggaaacaggcgtttcggtatctagatacaatccaaacttagtcatatgtagggtttactgtttaggtaagcgagcgaaattaaccgaaaaagtgttatagcccaacattgttgcattgattatagctcaaaactcatgataaaacctgtccaagtgtttgccaaaaaaagacatgttccaagtaaaattactaggctttcctaagataaaataaatctcaaaaaattgagtcgac

SEQ ID NO: 27764 - DNA, 956 bp, Arabidopsis thaliana landsberg
tgggcgtcgctacgtacctgagacaatggtgcagtccgcccctgacgcgacttcgtcaccacccgtcgatcaagaggtaccgttcttttcccatcccatgcctttcagattcagcttcgatccaccaagcgaccccgcttcggtggaggcttgtaacacccctggtgttactataactaaaacatgagcatggcatcataagcattggcattgcatatgtttgacacacctagagtgcattcactaggcaaaaatttcaaacaagttgtattgttttaatgttttgcaaatagaaccctggttaaaggacttaaccctaaatagtggttaaaggggtaaaacttaacccaagttgagaaaacctaaaagctttagggtaaaagtcataaaatgaccccaagaataaacttgagtcacttttatacccctgggataccagaaaccctaaatggaaccctggaaaaccctgaaaccaaaccctaggggcctatgtgcaaaattagtccacttttgggctaaagtgcaaaaaccaagccaaataagtatcttaagtcctttggttcacaaatatgtggacttgaaagcaaaaccctaagttttgggtttatttgcaaaaagtaccacttgacctctatatagcctaagtctgaaatcagtgttgtgagcacaactttgagcccttgtgactttcaaagcatagagtttttgccctaggtgaccacatcaaagttgaagatcaatattaggagaacaactttgcttaaggttgaaagcatagttgttaagagtatttgagagataattaagctcaaagtcgggctgtcagtcaatctctgaactgaattttcagtagcagtgtgatgggaatgaacttgagctcgattatgaatgggatccagtgactctctgtggaagcacattgtatcaaagttatagatgggttatagctctacaac

SEQ ID NO: 27765 - DNA, 2357 bp, Arabidopsis thaliana landsberg
tgcttttcaagctgcttgagaaagaagaggatgttgtgatcatacgcggaacacagtcaagagagaatatgcgtgcggttaaacaaggaatgcatacgtctaagttttgtctacatctagctggtgatacttcttctgcttgcagattatttgatgccattgctagtttatgtgtcccggtgattgtaagcgatgggattgagctaccttttgaagatgtcatagattacaggaagttctctatattcttgaggagagatgccgctttgaaaccagggtttgtggttaagaagctgaggaaagtgaaaccaggaaagattttgaagtaccaaaaggttatgaaagaggtaagaagagtttcttcatttgtcttctgaaagtttctttggattttatgaaaaccaatttgtgaagtttatggacttggtttgtgtaggttaggcgatattttgactatacacatctaaatggaagtgtgaacgagatctggagacaagttactaagaagataccgctaatcaaactgatgattaatcgggagaagcgcatgatcaagagagatggaagtgaccctcgatgttcttgtttatgctcaaaccaaaccgggatcatccatggtgtctagtaaggttaaatgcctagcaagctcatgctaagcaacaaaatgtgatcattattaatgatgaatcaaagactggaaaggtaaagaaatgtgatcatttagtccttataaattataactagaaccattctttgttcttctttttttcccaaatacatgactcagtacgcctttctaagccttttctttttatataggaacaacaagagaaaccacatcactctctaattccgggtcaagggtttgatcaagaatgcgagtttcatagtgggttttgactttgggagtgttaaatatcattagttattcaagcaaagagaggtacattttatggtggaatttgctaatactcaaagaccaccacacaagtgatgaaatcaaccatttacattattagctaaccaatggagaagcaaaagacttttagggcaatgagaatttctagtcatagagcctactcagagaacagaaacagagtaatacaaagcacaagtttgttctttaaaatagtaactgacaattacaacacaattattaacaaagagacacacaaatgtacaaagcaaccaaatgatctttaacaccccatttaaacaacacacaaacaaacagcataaagttgcacaaaagccacttatgaaggaggtggtgctttgttctggttatttttgtaccaaaaccacgacgcaagaacaactgccagagtacctatgaaccattcaggagtctggaaaaacttctgatcagggagatacttaggggcaatgaagaaactaaagatcaagttgatggttatagccaagaaagcaactcctatagctgaccaactgttgtcagttggtatgtttagctgattcttaacctccttaacaatatccaaaacaaaatcggtatcgtgtctgcaaaaaaaaaaattataacatgagttagagaaagaagaagatgatgcaagtaggtttttacttttttttggatatatcaataatacaagaatcatcaagaaaactcgagcggtcaagtttcggcatatatcgctcggtcaagtgggttggtgccttggtggatttgcggaaaactccttaccaaagagatctactaatcaaagatcagtcgggcatagatccaaacataatcaagaatacatgtattttgaagtattacttgtactttgagtttgaccgggaaaaccctattctttttgtcacagatctcagggcacgctcccaaccttggaccttttaaggctcccttgcatggtttggtttcagtggcttaaaagaagggaaaactcttcatcaagaatgccttcttcatcgggattggctgctctttttacatcgtccgatcttacgttatagaagattggaatcaccacgagtttcttttccttcatctgttcattcatcgtcacaagctcatccaaacaccactttgactcacagtacctcttggagaagatagcaagcgcgatttttgacttcttgatccttgtgaagagatattgtagtcttctccctttctgctctttagtgtctatgaagacgttgatccctgcgtttcttaattgcagctctagatggttgacaaagatttcgcgcagctcatcttctcggaagttgataaacacctgatcagaaagaggttcttggacctgctcatccattggaatggtgtctaagtttgtctgaaaaaaaaatagtgaatatagttggtgagagactttgttgtctcactt

SEQ ID NO: 27766 - DNA, 412 bp, Arabidopsis thaliana landsberg
  unsure (1)..(412): unsure at all n locations
aaagcaagtaagctctagaattttgaaagtcggcaattgaaatgttaggctagcagtaaatgtggaggctgcgtctaaggtagagacacgtataatagagccgcacgatcacaaagacccgttatttacgcttcaatggtttgaccttagagagacaggggaccagatctgaaccataaaaaacacctgttttttgaacaatccctctctcctaacgtgcgcattttccgacacagaaaatgatagaaagcacaaaagacatagaagctctatacacgtcgtcgtgtcacgcgacggtggaataaacattgggaaacaataacgcttccttttcatcagattccgattagagaattcacactgacacaaggcatanaaactcaactttaatttgaatactaatgagggaaga

SEQ ID NO: 27767 - DNA, 1032 bp, Arabidopsis thaliana landsberg
gcttcgacttttgaaactatgaggcgtgctctacatcttcttccccaccaccaccaccaccacctcctccatttagcccattaaatacaacaaaagcaaatgattacatcctccctcctccccctctaccttacactagtattgcaccttcaccatcagtcaagatccttcctttaaatggtatttccagtgctccatctccacctgttaaaacagctcctcctccacctccacctcctccttttagtaatgcacattcagtactttcccctcctccaccgagctatggatctccacccccaccaccgcctcctccaccgagctatggatctccacccccaccaccgcctcctccaccgagctatggatctccacccccaccaccgcctcctccaccgagctatggatctccacccccaccaccgcctcctccaccgggctatggatctccacccccacccccacctcctccaccaagttatggatctccacccccacccccacctcctcctttcagtcatgtaagctcaattccaccgcctccccctatgcatggaggagctccaccgccgccaccgcctccccctatgcatggaggagctccaccaccgccgccgcctccccctatgcatggaggagctccaccgccgccgccgcctccccctatgcatggaggagctccaccgccaccgccgccccctatgtttggaggagccccaccgccgccgcctccccctatgcgtggaggagctccaccgctgccgcctcccccgatgcgtggaggagccccaccgccgccacctccccctatgcgtggaggagccccaccaccgccgcctcccccgatgcatggaggagctccaccgccgccgcctcccccgatgcgtggaggagccccgccaccacctccgcctcctggcggtagagggcctggtgcaccgccgcctccaccacctcctggtggccgtgctcctggtccacccccacctcctggaccaagacctccgggtggtggacctcctccacctccga

SEQ ID NO: 27768 - DNA, 2656 bp, Arabidopsis thaliana landsberg
ctcctcatctccgtacaacagcggcggcacccaagaccttcgtttaccaagcaatggtgaatctaggtttacaactggtggaccttttaaagtctggcccattaaaatgtcgaaagcccaagtttattaaaggtgatccaaaccttcatacacaaaagcccaggtctgacctaaattattctttgttttttcttagtaaaatactgaatcacttatcggcaccacttgataatggacgtcaaatggaccgttatgtaccagtttttatatgggtgcttaagaattctttgcgaactctgcctttagtttcacctaaggtcttcgatcatgaaatcaattgtttgagtgtgataggtatcttgttctcaattctaataattcgaggttgtgactgttgtcaccaaagcgtcacaaattacttatctctgacacattttgctaccaactttaagcaatctctcatcaatagcaacattaagactcatagctatcggtactacacagaagcttccattctttatgaggaaaatcctgaatattcatcgcttgctcttgaaaataaaagattgatgagaaccggcattatgatctcgtctccacggagcgatgattaccgacgcttctccaatctttttgcctcctttcctcggtttactgaaatcaagcaagttcgatccaacaactttaatattggtattcatgaggttacaaggttgaggaagaacggcatcatgatcccgtctcaatggagcggtgattaccgaagctttctcagcttgttatctccaaacctaaccgaccatagaaccatagtcaaccaactccttgccgttgagcaactcaagctcacccttctcatgccggcgagaacctcggttatgaaaccatcttcaacgtcacctcgtctcttgaccttgaccaatttgtctcccattgacttactcgtggaagatcattcgactagccatgacctcacatgtctcaaaacgcttaatagcctttgtctcaaagttttcatgaattcaccgtcgtctcaccttatctatcataatttggcattgaggaatgccttctttgtttgtattttaaactttatgatttttgtgttatccttttttgtacttggtttggtttgatttaaatgaatgaaaataagttgttttaaaaaaaaaaaaaaaaaaaaatgaaaagtcattgaagttaacgtcgcatttaacggcaaacgttaaaacaatctattttgaaacgtcgtcgtcttttgactcttcgttatctttccgtttcgtctgttagattctgttttcgtagccatggcttcttcgtctccggagaccagaatcgccgtttaacacctgtcccttgagctaaccggtcgcgatctagaatctacggcgttagaaagcgcctcctccgcccctgaattatcttccgacgaaattatccctctcctgaatcaaaaccaaagacctagaatcaacatcttctccgcctcctacactcgacgcaaaccaagtgtaagaacagctcctctcgttgcaatggttgtaattcatgaacaattcagctgaatttcgataattcgattcgaaattgattcaatggaattgcgagtggattcagtttctgctaattatgttgctagatttgtagaattaggtgattgacaggaactgtgatcagatttaagtaagaatgattttgaattgtgatgtgtgtaggagcaagtgattaaagtgactgaaactgagatatcacctgtaactcagttttcttcatggatttggagtggttctcgttactctggcttactgtgtatggcattgtcatctacattgtatctgatcatggagttagtttcagatactttttctggtcagtacttctttagctctccaatggtgtatcctgtgatttcgtccttgtgttcagtttcatggttttgtgtaaagagttagctttatgggaaggctagaaaatgttgaaattatctttgctttgttcatatggtgggagaatctatgtttgattctgaaacagtggacttatctaagaacttgtcttttctagttgtaatggaatctctccttagatgagtgcaagtgctaaccttagtgttgccttgagctgacaggtgtattagtatattgatagacttttttttttctaatttcctttgtttgtgacagttcagccaattcctttgtttgagaccgcgttcatgagatgcacaattatcttgatactgtcatacctttggttgaaaagaattgggcaaccgatatttggacctgctcatgcaaggaagcttttggtttcaagagccctcgtgggttatctttcattgtttagtttcatctttaggtaattacatctcacactctgctccctgtgtacggataacctactctcagtagcttctcgggaagatggtttgttaaatttatatactggtgaccggtatatcatttgaactgaaattgctattagaaacaatgtccattccccaccaatcaatgtgtcattcgttgcaaagtaagacttctaacactgtttttcactgttaattgacattgtgaaccacagcattcaaatgttgccgttgtcccaagctattgtactaagcttcttgaatccaattatggcttccagtgcagca

SEQ ID NO: 27769 - DNA, 2237 bp, Arabidopsis thaliana landsberg
tgaaaagtcagatatcataaggtggggttgtgttccacttactaactcacctatccaaatatgagaattcaccttaagcgcgtatttagcagcaacatagcctccaaaagaatgtcctaatagaataaagttactgagattctgggctttacgccattcctcaaaggagtcgataaaccatgcctcagtttctgcacaattaaagaaggaacaatgcagtttcattactggtatatcaactcatatacaagccattaagagactgagagggtaccaatgaaagtttagccacgattcattaacagtagagggaataaataccttctgtgcttctacatgtaaaatcaggcctacttgaaccaccccacctacgaagaaaaagagagaactaccttattatacattcacaatgtatacaagtagtttaaaatgggcagcaatatcctgtcttcgatttttaagacattaaaatcaagtgatggcaacagcatgaaatctttaacacttgaagcaaccaaaaggccatattgtgactaatacagttgaggaagacaagttgaatgataccaaagttgcttacccaagttgatcaatagcgatcactctaaatcgactggcaagagcatcaaaattacggaagaaaaacccttgagaagcaccataaccatgaaccatgacgagtgtaggagctccctccttggcatcaaatgtaacagtgttgatgtaacgtgactcattgctcgtagacctaaaccacctgattttagaacctggtggtcctgaaccaatactgacttgctcttgtacataaggcgtcctgaagagtaatcatcccaaaagagctaataagcagcgtatccctaatatagaacctaaaaaactctccttttacatttcgtcctctaagaaacaatgacccagaaacagggctaaacccaaattacagaatttcaaattcatttatgtcaacaatcaatccaactgagagttatatccctaattgagaataaaaatgtgtgcttgagagagaaagatctacttgaggatggagagaagacgtttcttgaaggcgatgatgtaatcggtggacgtaggaatccaccggatcgaattaggccacaaaattttccatcttgatttggccgcattcgttgcagccgacgcagcagcagatgaatcagccccccaagcagtagaagaagatcccaccttcgtctttgagatttcttccgcacattcttaatctcgaagcaaaacggctcaagttcatacaatcacggtatcacaaaatcaaaatccacaaaaatctagactttctttttcccacgaatcaaggaatcgagaagtttgctactaaattttctttatatagataaacgagacaagaggttttgctgcgaagtcgctttaaggggatatatgctttttaatttgttcgcacgcgtcattgccgacgtcacgtatcctgcataatcacagaagcttcccgttggcaatacttggacctgtcggtctggtcaactcttgaaataattagtcaaatgtttagcaaaagtgattattctgacttttcactaatccagcagtgaaagtaaagcgttgtctcaaacaattttccattcataagagcagtctactgcaaaatccaaccgtaaaacaccaacagaaagctaaaaggtctcagtttttcaaacaaaacactaacaacgatggtttctaatcactaaaccggaactcgagcgccatttgtttagcttgagcttctgctgcagctactagtagtagtactagaacttgggttgttggagacaccgagacacagtgcttcagccaatggtccacctggtgttgttgaatagagccatgatggaccttcatggctaacccactgatgctggtttgttccctctgtttcctccatgcctcctccagccattgagagtgtcagagagcttcccatcgcttcatcttgctttccttctacaacaaactgtcttgtttcttggttatgttgtggtgtctggtttagacttaatagaccctgcaatgctccaaagctctggtctactattggctctttctgcctgaaattcagatcataatcgaatccccgtttgagctctctgcttgatccaactttcagctggacagcttcttgagtctccgggtttaaggttccaatggcatcatcttctttcgtaaaccacctcagtcctcttcacatatcaaccaggaag

SEQ ID NO: 27770 - DNA, 983 bp, Arabidopsis thaliana landsberg
gttcacctgatcatctgaccgattttctcttcaagggtcatatgtctcatcaggttcttgatcctgactcccagtggctcttttgggtccttatacttggcgtttgcgagtggtactttattagctgcgacggtacagcagagcagcagaaggcctaaacgcttgtagcaagtaacttgaactccccatctttgtgttctctttcactctcaataaaatagtcgagagctgattattgattaaccagctgataaggggaagacgatcaagctatatgttgacgacaacaacgatgagggttacaatatttcgaacgagataaggaacatcatgaggttgagattttgtctacatgccttgtacttgggttgttttgcttgtgagattatgtacagagacgtgtgaaaccatttccgtgactagagaacatcaacaaaatggattctttcccttttgtcaaataaaataaaatctttgtaaaagtaaaccaattttaactttggcaaaataacattctaaaaatattagcttgtaggaactactttttgttctaatagctaatgaaaatcatcatttttttcctaatttccatagacatagcaaatcatttgtttcttttctttgtgcgatttctttctttttcttctttatttgtttcatttgaagtatgtttttatttgcttgtcgctttgttgaaataggttggactttacttccacttcaaaacttttcatcttttttagatgaatatttttcttgcaagtttatgttgaattttgattttggactctaaaattagcatgttattgttttctttctttttctgaaatttgaaaaggtccctttgcaaatgcacacctgcatatgtctggatacgccctgcatgtggcacaagtctcatctcggtttatgagaggcccaaatgttagatatctcataaaatggaacaaaatacagaatcataagggcaaataacaaaagct

SEQ ID NO: 27771 - DNA, 900 bp, Arabidopsis thaliana landsberg
atatgtttttaatttaactaaaatataagcctacctgctgtataatgcaagttaaaattataaataagcagattaccatcacgatggatgtaccttctcacatacacacctatcaaaaacttaaaacctttcaaaacctcttgctatattcaaattaggattcttcattcatgaaatcattattccaagggttttgggatgtcttataaaattattttggcagaagaggatgtaaaattttgaataaaaagtagtcagcaaaacatatgttttattgggattttttagataattaaatcagagaatagggctgggcatatgagtaacccattcgagttcgggtagaacccgttcgggtttgggattaatgggtatatgatttattacctaatagaataattctaaatattcggtttgggtcgggtccagttggatttgggtcagtttggataaaaagtttcaggcccaaagtactcaaaaaatagaaacggatattttgtatgtaaatagtgcatctccaaacaaaaaaaacttttaaatttattaagttttaataaatttaatttaatttgaatatattttactaaagttttacaaatataataaataattttaacaaacatagcaaacataacaaagtatacaatttaatttatataaaatattaatgtccgggctatatacgggttatgatctagtcgctatatgttaggccaaaactcaaataaaatgacaagaccctgtccccgcacaattctctcaatccgccgtggaataggccaacaacaggtttttgatcacttactctacattcttttacaaaaattagaagatacgcaacaagccttttaccctcatttatccatggaacaaactttagggaataggaagaacccctta

SEQ ID NO: 27772 - DNA, 1742 bp, Arabidopsis thaliana landsberg
  unsure (1)..(1742): unsure at all n locations
cgaatgttttgggatcagataacaacaaagtctctacaaaatggaactctttgataagagatgctttgaacaagagagcaagacctcatcgagacgaagacttgtcggaatcaaagggcattaatggtatttcacaagattttagatgtatcataagtaaacagatggtcggaatcttgatcaccgtttgggtccgaggtgatctctggccgtacatccgttatcctagcgtttcatgcgttggttgcggcatcatgggttgcttaggaaacaaggtaacatatatttagaattttctatctttttaattatataaaatctcactgttatagatgtggactgatttaggtattgactgtttatagaaaatgaatacgtgcgtttgcatttgtattcatatctgattattttaatttgtggttgaaaatgaactcacagttatgcatctttgactaagattatagcataatgagtttgattgataaccaaaagctgtacaagttttttagctgttatctagagttcttagctttatcagaatagtacaaagctgttagaaagagccgtatagaaaagttgtacaaaaatgctgaacgtaaaactttttgtaacgcttttaataaaaattttgtgattggtaactgtcaaaactgtatacactgtttaaaagtgttaagtggttaccattcaaaaccaatagttaaaaaaaatgtatatatatatagcataatagtttgtacaagactactagttaccaccggcatagcctaagtttaattagcctggaattaggtaactaatatttgcattttgattaaaaaaataggtaactaatgttttgtttgccccgtataatttaaactgacttcttacatttttttttctttcttgatcaatttagggatcagtatcggttagatttcaattgcacgaaacgacattttgtttcgtttgtagccatctagcttctggtggccgcgaccgagatgaaagacagagaaactccgacgtcaacgagatcttagctagatctagttttcctcgaggctcatctctagatttacccaaaaagatccttgatcacgagtaagcttatgttatactataatttttcaataatacttggttcatatattttgtgtacgtaaattaaaatattccaacttgttagtaattaactatatcccaaggtcagacaaaaatgattataatgttaaatagttgaccgattaattataataagacttgatattgtgaagtgaaaaggctagtttggtaagtacttattaagaaattaccaacttgtggtattaattaatttattttgttttgtttttgttggatcaaattctatagtcgggtgatttttttgggagacttgaattatagaatttcattaccggaggagaagacaagattattggtggaaagcaaaaaatggaacatcttactagaaaatgatcaggtaattatttatatatgtatgttttttttacgtgttgaaagttgtaaactcgctattattttcttatacatatatatgttttgttatattaaaattaagctgaggatggagatcatgancggccagattttcagagggtggcaagaaggaattgtcaaatttgctccaacgtataaatacgttccaaattcgtcctcttatactccggatgcattacatacaaaaaagaagagaaaaaacgagctcctgcatggtacgtataacgtattataattta

SEQ ID NO: 27773 - DNA, 1289 bp, Arabidopsis thaliana landsberg
gaaaagctttctcagcctcagcaaatcactctccagcccatcagtctgaaatttctcacccactttatctctaacattagccgataaaccatgtcctttcttcttcatcacatcaaccaacccccaaaactcatcaacaagtccattaccacccagaatccgcagcatcatgttatagttcttcgagctaagttcctcaggagaagcctccttaatccactggaaaaaacttttggcaacatcagggtttgattcgagctttctcaaaaccttcaaagctaaatcttggctaatcactacaccactcgattccaactctttcctaatctcatcctcaccactcaatctactaaaaatatcaatcacggtagcctcagcagaagatttctcttcaaccgcaggctcggacgagaagcttcgacccactgatttcactaagttgccagagctcgtcattggggatcgtaagggacaaagttgttcactttgttgcaaagctccgatcccagggtgaatgaaagaagagaaagatcgcgatgaaatggaggttacctgagaacaaggagatagataaggaagatgagatcgatggtagcttcgaagaagcatcaatcgccattgttgatatctcatctcggatttgagctgggttaacgaaactacaaaagggtatagtgaagtggatttgatctgaatagaaaagcttgatcctttacagtttacaaagaagcgagactgaagaacagcgattgcgaagctctgggaaatgttagggttttagtgaggattttgatttttgactttttgaggtaaacgaaaccatctaacgcaaagagaaggtcccatcacaatgacgcagagcaaacaaaaataaaaacttaatgatatgataattcgagtttagcccctagttttattatagctaccagttttttctcatatagttttaattggatcagtatttaccatgaccagtgaccacaacgatttcgaacttcctaacttgcaaggaatccagaatcattgccttcatttattaatcttttgttcttataaatatcctacggaagttctaacttctaacttgttattttcgtgatctcaatttgagtgcttttaagaatctatctttgccttaatgctatgactctttaagatatttttttgtttatgtgacccttataattcaacgtagccgaattgagaaacggatggacagaaaagtctataagcattaagtgcaataaaaaagaggatggttaaacaaaagtcttagaacctaaactaga

SEQ ID NO: 27774 - DNA, 1076 bp, Arabidopsis thaliana landsberg
aacctcgcttcggcggcgaaacaacggcggcgcagggtttggcgatttccctctgcaagtttgtctgtataaacatatacaagaagacgtgaacgtttttgatttttaattaaaccggaaccctgtaaaccagagagacggtttagtgctctcttttaacaattttaattatagtctcggactcttcaaccggaatagaccggtctaaaacgtttttaatttcaattgtaccgaaaccctctgactcagaaagagtgtttagtgctcttttaacaattttaatttttaaatcgtcttgggacttttaaaccggaataaatctttcgggtcaaaatttccgaaccctaactttagccccaaattagagagagatgcagaaacgggagcttgggaaatccggcggtaattccggtggatcttcgggtccaccagcgaagagaggccgtcccttcggtagtacaagtgctaactcagctgctgctgctgcagcggcggcagcagcggacgcgatgtcaccgtcagctttacttggtccttctcttctagttcacaattccttcgtcggtaagctcgcaatgaccactctataattcctctctattttcttcttgtgaacgagtttttaatcggtaattttcattgggatcattggaatttatagagcagaacaatagaagaatagttcttgcgttgcagagtggtttgaagagtgaggtgacatgggcattgaacacacttacgttgctttccttcaaggaaaaagaagatattcgaagagatgtcatgcctcttgctaagatagctggcttgcttgatgcccttctcttaattgtgagtttatttaattgtttaggtgttgggattgtgctttcctctctgttctttgaaccaacatgatgctaaaactttggcagatagatgattggcgtgacatagctctcccaaaggacctgacaagaggaactagagttagaactttaggtacaaatgcttcagttacgggatttggcaatgagtatgatgctctagcctctattcaaccccctgggtgagctaatatcgatactgctttgata

SEQ ID NO: 27775 - DNA, 1413 bp, Arabidopsis thaliana landsberg
aaacccattatgtatatctattacacagacatggtatgtggatgaacatagccagcatattttgtgaagcgggctgagtaataccttctgtatagccgcgagctgctcatttagcaagtaacgacggtgctcaccgctaatctgatcttcaattgcttttgctatggcttgctataaaaggctcaaaagattagaaccttatcccattcaaacagttaccggataagtagtgccgtagtgggaaagacacaagaataagggaatgaagtacctgtatcttgctaatttccatttctttttttatcaattccagcgtcaaccgcagacgtttgtgaacctgggtcaacaaaaacagagatgagagattgaccaagaatcatacaattacaacaataatgaagctccttacatccagttcttcaagaacttcttgagcttgatgcctatttgcgccacatatcgccgctccaaaatcagctagtcgtggataagtgaaatcacctatatgctacacaagttgaaagacatctactaagacacttgtaccctgagacctttttaccagaacaggtgaaattatgacaagaacatgcctgggtatatgtctgaacgtgatctctccatagtgaacttgtcttcagtacatccctaagagttgaaataacttcaaaagatgttgccttgacgacatcatcgtccatgtcaaacggattatcctgcacagagagtaagaaaaggttcctgacttcagagtttcaaatagaaaaagcaaaatcaaagtagtctcatattataagaggaaaagcctaaaagcagaaaaatgtaccttaagatgatcgactttgacggtaagtggttcttcgctcacctgtataaaggaaaaatttctcccttaaaccaaaagtgtcttgatcaaccaaagaacagatgtgaagatgtactttcgaggatttggaactttcatggttgaaaattctacaaagtacgaacgctgttataccgacttaccatctcttttatgcgaagtcgcctgtgaccaacaaggataacttggtctccttggatacttgaaatctggaaaatcaataaggaaatcgtaatgctagtcatgctttttaatttgaacaaatgcagcatcacaatacctgagcaagtgtgccaacttcgtgaagccggttaagcaactctttccctttcagctcatttatgtttttttctgcgtcagtgcttgaagatgaatcagctgatgggtcatccttcacaaggaaagctcctgcatatggagcttgtcgtcttctgctctcttgtaaggctgcgagtactttaggatcctgcacaccagaaaacgcacatgctggtcagagaagcaaaacctgacatctcccaaactataaagatcgtgtcatcgctgtg

SEQ ID NO: 27776 - DNA, 1473 bp, Arabidopsis thaliana landsberg
aaaaaaattaaagaatccattaacgcttactatgacaagtagtagtgagatccgaatgttgcatagggtttcctccataggcatgacgcggccaaagccagccggatcttctataggaatcatcaggttctgctaagagaacgttgtaacctctcgttctcaaagctttaagaaaaccgtccaacatttctattttgaaaacgagaggtttatcaacctttagctggtcaacttctaaattgtagcttctcgccatcaccaccaaatttgatcttttaggatactccacaggattgttcagtgtgaaaaaacaaatgtccataaacattttatcaactctagcaattttacaagataacccttatttacaagagctgatttgatattctgtaaaaactcatcagtagtgacaccattagggattgggcagtcctcgacgtcccagaatacatttgtttctgcgaggtttcaaaaaaacattagtttagtatatgacagattgattaaatctgctggtctacgtacaatgacagatcaatcagatgaaacctgatccgaaatcaacaccaacgtgcactccaagcaatattagatatatgtatattttggattgctcgggcaaatggatagagagaagtcttaccattgagtcctttgtacatggtttctggtggccaagaggctgcggatgaagtaaagcttggtttgataaggattcctcgatcaaataggcttgtggaaagccatatggatgagcttacagtttgaagtagcaatggtgtttcgacattaaaatgctgtgctaagagaacattgaaattattcaatctcagagcttgaagaaccctgatgagctcgggttcttgtgagatgtttttaaagactaccatcaaatttgatacaagattatccagtggccataaacaaatgcgcactatcatttgaccaactctcgcagctttatcgcctgacactatattatataaaaacagagatctggattacaaagtgtaccaaaggagaacgtaagagagttttaagttattaaagaagaaagttcacctccgcgtaacatgattccggcattatgatactcaatgaacctttgacaaaaccgaacctcggatatgttattcttctcataataacccaagattttcacttcaccaccgtaccttattctcaagagctgatttaatattttgaaaaatcgtatgaggatagagattagggattgggtagtcctcgacgttccagaagacgcctgtccttggctctagaaaacaaagaaaatatacagttacgaaacagagaaagaaacaaacaaacaaacaaaaaatcagattttgaagttatacctaaaaaccattagtttagtatattgaatgcaatgcgctccactaccttgcaccccaagcaatatagatacacgtattatttagacctgtcgcagggtcactaaaaagaacagac

SEQ ID NO: 27777 - DNA, 1942 bp, Arabidopsis thaliana landsberg
  unsure (1)..(1942): unsure at all n locations
gtaatcacatggattggatgtcactgaaacgtgttccttgtacttgaaaaaccggcaagtattatagaacctctcataaagtccctctaattcctgtggcaattttcttggactattgccaggaatagacttgttggtgatagagttgataccaaatggaacaagtgcgtttaaggttgacaaattatcttcagaagaatcataaccaagttgcttagtatccttaggaggaagcttcaaagcccattgaactaccggtatcttatgaggagtaacagattgtcctaatgtagaaacagcacgacgaagcaaaggccaacctggtctaggttcaggcaatttcctaaccaacatagttacagaaccgccttaatcttctgaaccattcacaggcacaatctccattgctttgttgcactcatcatcatcttcactcctatcaaaatctgaagctccagacaactttccaggagtagttgtatcgttcggagacaaagaatcaaaaccacaaaccgagcaattctccaaacagcagccgctaagacttgccgtagattctggccacaggcttgatcctcctcctcctccttagagttagaatcttcctcagaatggctaactactttagtagtcttattcaatgtaacagatctctgaagcacattcaacaaagtaatcctccgaacatcttcctttcctatataaccaaacccaataacagtttcttcaaccactaacaccaaaaacaaatcattcagatacaaaataatgtagaaacttgaagaaaaaaggtcaaaccttgagattgattaatggtagatgatggagaaccttccttttggaacaagattttaccattgtttacagcaataacccaacaatcctttgatagtttcttcgctatgtacttagctacagaagctgatgaacgaatcgcgtggtgactttttgaaatcccaactaaaacnnnnnnnnnnnnnnnnnnnnnnnnnnnnnnaactaaaatctttcgagcagaggaaccacgacatagcttcagcttcagatccacctataaagcggaaaaattcaacatttcgtttctcttctgaagaagctaaagaagtaagcaaactagcaaaggaacaaaattgaaaaaatccagactttgatcttattttacctgtttcaaattgcagaaaccttcataaacgtcaagaacagagtcgaaagttctaaccagagagagaagcgaagagttccctgcgcgatccacaatctctaaacaaaacccaaaaccgaaacttttgtgttaacaaaaacataaaaatcaaagctttttggtaagagaaattatattaaggaaaagctcagaaatgtaaccatttccaaggatatgaagagcgatcacagtatcaccaggctcagcgactttaaccagagcccaagtgagtaactctctgctcggagcgtcaagcttcacgccgacaagaatcgtacggccaccacatccttcctcgacggagctctgtttatctccgccggtttctatcatctctgattgttctgaattttgatttcaagtgtgtccttttatcctcctgacgtgtgcttcacaaagacaaaagaacatcgtttttaaggatttatataaccaaacaaagacaagatctttctctctctctctatctacctgcagagacttaagttttaaccgcaggtttggttttgcttttgcttttgatgctctcgtcgtcacaaagaaagagaagagcagccatcttattagattttcattttcctttttcttaaaaccccacttgtacttcttttttttaactcgcttttttgtaaattcatttgttttgcaattctgacatagtcttactatggcattgaatcacaatgacagatacagttatgttcttattaatttgctaaggttaataaattatcaaaactt

SEQ ID NO: 27778 - DNA, 1542 bp, Arabidopsis thaliana landsberg
attcgtgtttttagatccagcctccaatgatacgaattacaaggaaacactagaaattagttatattcgctgtgttaagtatacaaattaacacttacgaaactgaatttgttaatggttttataactatatctgaaaaccaaaaaaaaaatgcaaaatcatcaaattgaaaatgtctattctagcaacatgaattgtgaataaataaacaaacatctataattcaaattttacttgaataacaatttcattttgactctatttttggtgaagacaaaaagtgtgccttcaacttcaagtctttaatccaagtagccagtttaggaaacgggtaaaaaaataaattatatagaataaaagaatttgatgttgcaaacttgaaaataagtttacaaatcaatctatttaatgttaactaaacatgtccgcttgaagcaaaacctaaccgatccggacatatcatatattatctagttggtgagaatattaagaagtgaaactctggtctgaatcagtcgccggaaaatacactccaactcgatctcaagctcctcaacagtgatctctgcagcctccaaccttgtacttgcgctccgcatcgctacttcgtcccacgcatcatcaaagcagcaaaactgcatcgtaaagatcgaagaaaatgaccctatgctcggttttctctcgagccaaggaacacaaccaagtgagaacaaagactcaaccatagtcacaacggctcttctcacttctttcaaaacttctgtgacaaacagaaggttctgttctattggcatggccactcttccttcgtttcctttcatgttcttcaaacagtttaagcatttcagtgtctccttcttgagcttgttcttataccgattatacgcagctatcttctcgttgacatcagatgattcgttgccacgtagagtcagttgtagatcttgcaagctgtgtttcacgagtgccatgacatctttcgacacattacagacatctaacattattagtgaagcttcagagacttgctcgatccagttctctttcccttgttggcacagagactctcttgcttctggacagtgatcgagaagatagtttgcgcagtcttgtagttctctcaaaccttccaagtccagtttttttgtacataagtgaagacattagtgttggagacaggtcattgagttttcaaattcaaactagttgaagttagtggtatttaggaaccttccgtttatgtaagtggcactagattaggctacattatggatttgcttcgatattattgtctacataacaaaacaaaatacaattttaatttaaattataatcggatacctttatcagaaaccatgcatgaaccaagccagccagtgtttgtaattatctgaataaaacggaagaattatttatttatatctgaaatgttccagaattttgtttttgtattgttggtttaatagtttgtcgaattcatcaccttttaaatactaaacacagagtcatgttcatgattggaatgtactatcttattattaa

SEQ ID NO: 27779 - DNA, 900 bp, Arabidopsis thaliana landsberg
cgcaccgcgcgcagcggttttggctccttctgtcctgggccagcttgcatgacgcgtgggacccagcccccgtgtcgtagggggaggaccttggagcgtgttggagaagactcggtccgcgacggctgatgacacaagtggggagagtcgcctttaaaaggagggtgacccccttggatggcaaccatgtcttcgcactctcctcatgcatcgcgcccttctgccttccgagcccctggatggggagcacttgcgtcgctttcgtcttgctgtcgttggaggaacgcaacttcacggaagttggtacctttcagccatcgctcggcttcaaggattttcatcaggcagcccggctgcatcccctcgccgatggtcgcccaagacagtgaccaccagtttgatggtggggagaagcaagtcgggttgcggcctccgccctccctcagcttcaaggatgttcatcatcagtgctggggaggggagtgcgccgagttggggcccgtctccgcgtgggcagcgacccgctccttccctcagtgatcggggggaagggcgttcgcgtccgtggcgctggcagctgccgcgtgtctggctctccggcctgagcggcttcgacgctgtttccggtgccacctcccaccgaggcatccggaagaggtttctccgccgacgagatagttggagccacccacggactgacctccgactctatggccttctgcttgtcctcgcccctcgagtggggacgcgggcgagggccttgttgcagcagcgtctgccctaaggtcatcgctgctgctgtttggccacccggagcagaggtcgttgtcgctgctgccggagcgggcggcggcgagcaacccggggttttgtcgcccgcaggcctccaatgtggggggt

SEQ ID NO: 27780 - DNA, 818 bp, Arabidopsis thaliana landsberg
agattgtgttctcgtctgattccaagcgtcaacttctaaacaagtaaggaattgagaattccctttattgtctaatgtataagattctgaatttggaagttgtgtctttcactctataggctgatggctccatacatatcaagtggtatcttctgggaaattctgaaacaatgggcgagtggagctaaagtgatagttgtcgatatccctttgttgttcgaagtgaagatggataaatggactaaacctattgtggttgtgtgggttagtcaagagacacaacttaagagactgatggagagagatggattgagtgaggaagatgcaagaaacagagtgatggctcagatgccgttggattcgaaaagaagcaaagctgatgttgtgatcgataataatggctctcttgacgaccttcaccaacagttcgagaaggttttgattgaaattagaagaccattgacgtggatcgagttttggcgttcaaggcgaggagccttctcggtccttggttcagtgattttaggattatctgtttgcaaacagctcaaaattggctcttaacatttcacttctgttactgctaaaaaacttgttataatcttaaagctttgatttattattctcttgctctcttcagcattagcttattacactattcactagtttgaattcactctcctattcagtcagtactcaggcatctattatctatatacaacttgaatctgtgattgagaaaaagaaagaagtagcaagtgaccattaatcataggtggcgatgaacggaatgaccatcaacatgaagacatcgtaag

SEQ ID NO: 27781 - DNA, 1906 bp, Arabidopsis thaliana landsberg
tggaatgtaccggtccttggggatgtgtatactaatgagagagccatgcatgagtgatctataagggccactaatggatgatatgtaagcgatacttgcaatggcaattactacagtactatcttatattgctgtgccaaatatctgagcttactactttatcacagaattgagaccggcccttatccatggagatacgtttataaaattagatcgacaaataagtcaacaaaaatgacaggattcatagaagaaggttggatattcgataataaaaaaatttggggttgttatttttcttgtccgtacgacaatatcttaacgttcaagttcaataattaaccaaccacatattgtagaatataaagtaattaagtgtgctagatatttaatttaagtatgactttgccttgagaatagtcgctagttgttctattacatatcattttggtagggtcatgaaaatgaaaactatatagctttttcacaaaacaacaggactttttaaaacatttttgtttcgattatcgtgaaagttgccatcggttactattacatagaccttaaaattatttagcagaaaaaacactaacccaagttgttttgcagctaaaacaaactcaagattagcaacatgaacatatcaaaatagacaaataagaataaagaagatagactatactatttccatttggttccggttattgtaccatgcctagtaattttctaatttcaagtcacattcaaaattaaggaagctttcttttcattaattttttaaatgtccattgaattggttattttgttgttgttgttgataaatagtcgtgttcccaagttaacttgaaatatcatatcagctatattggaatagtgaaagcaaaaaaaaaatccatggatcgagatgatgcatgggaatggtttgttacaatcgtaggcagtctaatgactctcctctatgtatcgtttctcctggctttatgtctctggttatctactttggtccaccacatacctagatgctcaatccattacttttacattcctgccctaaacaaatccctcatttcatcagacaacaccactctcaacttcatggttcgtcttaaaaacatcaacgctaaacaaggaatctattacgaagaccttcacttatctttctccacacgtatcaacaactcctctcttcttgtggctaactacacagtgccaagattctatcaaggacacgagaagaaggccaagaagtggggacaggccttgccttttaacaaccagacggttattcaagcggttttacctaatggctcggcgatttttcgtgtggatttgaagatgcaggtgaaatacaaagtcatgtcctggaaaacaaagaggtacaaattaaaggctagtgtgaatcttgaagtcaacgaggatggagccactaaagtcaaggacaaagaggatgggattaagatgaagatatcagattcgtctccacaacgactaacatttttccaagtttgcttttcgattatttgtgttttgatgaattggctcatcttcttggcttttcgttaaatgacgatgagagtgattttcattttccataggacttttccttttgactatttcttctgtttgaatattattacatgttttttgtttagattgtattagtgtagtgtagctttggtttgatgcatgtgtattaaccgtttttatccccttgtatataattaaggtcagttccaacgctttctatacaggtgtgggactgaatgccagaaaaatatatataggcttgggactggttagatatcgaataattagatatcggaatttttttccatccaattagatgtttcgaaaaataatcataaataattaaataaactgatctcatgatagttgcccaaaaaaa

SEQ ID NO: 27782 - DNA, 1389 bp, Arabidopsis thaliana landsberg
tttagatcataatctttggcttatgttatttatgctctaacccggcctacatagcatccaggtctaaaatatcaaatttaatatcaactataatgcaattaaaagagactggatgatgaagaaatcaaaccaaaacctcatcaagaaacacaagccggaatcacttttagacttgcaccagaacgcaaggaacccaatggtcttgtcatcaccaaacccaacatcgttttagctcgataccgaatacgagcccaataatgaaacaaagcctcaaacattctaacaagacctatataattggatcatccctacaaaggtggtttgtttttttcaactttttttttttggtcaaacattctacttttgttatacaatctgattttaacaggtctacgactacgtagtgaggaaaaataataactcctacaaatgtgcaactccaactagactcccattttagcatcttttacccatctccacataacatatgctcctacttttcatctgttgcatccaatcacaagtctactattccaaatcattagattcaatccaatacttctgtgattgtttcatttaaggtatatttcatttaaaaaaaaaactctttaatcactaaagttttcgtttattttttctttctgaaataaaaatctctccattcagctttaggaaaaaaaaaaaatttgtttctaagaacaaatccaaaaaatgtcttcgcatagtgatgaaatcgaagaagaacaaatatcaagaattgagaaaggcaaaggcaaagattgccaaggaggaatcgagacggttatatgtacttctcccagcattgtctgccttacccaaaaggttttcaaataaaattttattgtaattattgcatagttatatgtttataatgataacaaaattttgcgcaaattgatttatggtgttttcctttaaaattaattacagttgatagcagagatgattgggacctattttatagtattctctggatgtggagtggaggcctaaaatagaaccaatagcatatttttagcatatataaaaccctagaatatttctttttatgaattaggttggttgttaaaaggaaaaaaggattattttttacccggccacaaagacgtttaacattatagtcatccccaccgcaattccagctaattctccaacctgttaaaaacatattaagaacaatccaacgtttttaagaactgaagacgaagggtgacctatacgagaatacagtcaactaaggatggtttgaggaagtggttgcgtgaagaagtgaggtaagcatctagtctcgttttggcattgtaatatgacacaaatagctcaaaagtttcaactttatatgacgcattcgttgtaaaaaaaaaattt

SEQ ID NO: 27783 - DNA, 1441 bp, Arabidopsis thaliana landsberg
caatctccggcgataaagagcggtggagatggtggtaggattccggtagaagagtggctgccgatcacagaatcaagaaaaggaaatgtttatacggcgacgtttcatcttctctgttcgggaattggtctccaagtgattcttcttcctgcagctttcgcagcactcggatggtaataactctaatcatagttctcttagtttctttattttgtccgatttgcgaaatctctgctttgagtaccgttttgattattttatttatttattttttctagggtatggggaacgataatcttaacggtagggtttgtatggaagctctacacgacgtggcttcttgttcaactccacgaaggggttccgggaattcgtatcagcagatacgtgagactcgcaattgcttcttttggtatgtaactatttaacaaaaatcctaattctctcttgatttgtcgtttctgcgttttggaatttattaagaacttcagtttcgttaaacgataccgtttctgatgttgttgtaatgaaacaatataatcaggtgtgaagcttgggaaacttctcggaatattccctgtgatgtatctctcaggaggagcttgtacgattctggttataaccggagggaaatcaatacaacaactgttacaaattatgtctgtagacaacacagcgccacttacttcagtgcaatgcttcttggtttttagttgcattgcgatgatcatgtctcagtttccgaatctaaattctctctttggagtctcgttgatcggtgcttttatgggaattgcgtattgcaccgggatatggattttacctgtagctagtgactcacaaaggactcaagtcagtgtctcgtacgctacaatggataaaagtttcgttcacattttcaacgctattggattgatagctctagtatatcgcgggaacaatctcgtccttgagatgcaggttttgactaactcgcagttaaaacatgatttagacgttttcaaaatatattttcttctttcgtttagtattaataatgtggtttctatggggtgatatttgtagggtactcttccttccgattcaaagaacccttcatgtaagacaatgtggagagcagtgatgatctctcatgctctcgtcgcgatttgtatgtttccattaacgtttgttgtatattgggcatacggagacaaggtatatgtcaaaaccaaacactattccattttttgtaagtgtatatgtttgcatttacattttgaatagattttatttttttttgatagattccggcgacgggaggtcccgtgggcaactatctgaaactttacacacaagagcactcgaagcgagcagcctgtttcatacacctcacgtttatcttctcttgcttatgttcatatccgataaacttaatggccgcgtgtgacaacatagagat

SEQ ID NO: 27784 - DNA, 1144 bp, Arabidopsis thaliana landsberg
  unsure (1)..(1144): unsure at all n locations
cattcttaaactaaaactctaattttgtaacaaccagtggtgtttcacgaaacttcctatacctatagcgaagagtaactggagaattttcaaaaagtaaaaagctgacgtggctagggcgacagaaacggcgattttagggtttttggattctcgagcacgtctgttgccgccggcagcacctccagnnnnnnnnnnnnnnnnnnnngtacaaggaggatgcaaagatgatgcggagttgagaggtaaagagttggaagactattttaatagcaagatggaggttgatggtagacagaaagaagatgattttgagcaggaaacagagccgatgggtgactcaaaccctgaggtttcttcagcatcggaccaagcttcattgcctaggaaatcctacgcaagtgttgctcataagcatggatttacaaaacaataattcgtagtgcatgtagtcgatggccaaggcagaatggttgttcccatagaggtttttgtagtagctggtcctctctgggaagattttgtggtggggaaatttctccacaataaagctcctcatgttggggaaattcacagggttatgaataaaatttggagattgggagataaatcaacaatgatcgatgtttatgaagtaaatgcaacaacgattcaattgtgagttagaaatgaagtaatgagaagaaggattctgaataggggaatgtggaatattatggctcttccaaaggtggtttcgaaatggtctccttatgaggaagaagtgcaacctaaaatgaaatcaatcaacttatgggtaacactgaaggatgtccagccttctatgtttacggataaagggttggaatttcgttggcaaacctgtcaaacttcatccaaaaacagaaacatgttcgagtttcgatgaagcacaaattttagtggaggcaaatcttacaaaagacttactgactgaatactcttttagtggtgaggaagaaggagagttagatgtggtgatcaagtatttatatccttggctgccaccaagatgtaattgttgcaagaaatggggacactttcaaaacacgtgcttagcactggactcgaaattgtctcacagtaaagtttccgatatgaatgaggtggatagcgaacgaattca

SEQ ID NO: 27785 - DNA, 1286 bp, Arabidopsis thaliana landsberg
ccagcccatgcttgtaagttgtccacttgtaacaaaaggcccaagtttgtagcgattaatgggcctatcaataggctggtgcgtccttgtgcttccagcaactaagaaccggcctcgtacacgttcctcgaacaaaaaacaacaaactaaaacagaattgacaacttgtataacgatcaaaccaactaaacagtttgtgggtgcatttaatttctttgtccgagccttaatagtcacaaaaatagcaagagaaacataaactaatctgctaatcgtttttttacagaataaaaagaaaagaaaaaaacaatagaataaaaacacaaagtatatatctaaaaaaaaactaaaaccctaaaggccaaagttcaaaccaggttttaaacctcctattagacatagacacacatatcttacaatttacaacatcaacctttccatgaacatatataagcaatccaagtataagataaacaccattaatcaaacagaggattttcagtaaatgaaaccatagactatcaaatcttcacattccataccaaatcctcgtccactgctttttctacacgttaccttccggtactggaaacagtcgtttaatcaaccaattgattggtcccaaaacatgaactttctttttcctccagaaccaaatcgctgcactgtactgttcattgcgtatctttgtcgttgctgctctccaatcatatttctcggtctcttctcttgccgcttttccaatgatctctcttgtttcacggtcgtgcagtaaagttctcagttttgtcacgcaatcttcaacatctccagggttgaacaaaaatccggtttttccctcctgatgaaaacatcagaatcagaaaaccacaagctcaatataggttgacccataagaacaatcaatgcaagatcattttgtgtaccagtctatgattgaataaagtttcagttcggttacagctcgcttataagaaaattggcagaaattgttttttcaaccatttcggttcggttgatatgctcatcaatatggtttggcagttaattgtaattcagataattcactgacctgatcttcagggattatatcagggattccaccggcacgggccgcgacgacaggaagtcctgaagacattgcttcaagaaccacaaggccaagtgtctccgactctgatggcatcacaaacacatctccacttgcgtaacgttgtgagagttcatcgccttgtaacgttccagtgaaaaccgctggcattccggtaaacaacttctcaagatcc

SEQ ID NO: 27786 - DNA, 1452 bp, Arabidopsis thaliana landsberg
ctttattgttttaattgtttacttatagtctataagttatatactcttgttttgttcggtatcatgttttacttatagactatttttctttttttttcgttttagctttggagatccacgattctgcggatctaactaaaagtgataactttcgaagaaaaaaacttaaatacaattgtttggggaagatgtgagtggaccaataatgagtaagaaagaaacctagcatatgaatataataatagttaattgtaaaaaatttgggctataattaaccagtcatgtaactgaaatacgaataaatttatgattgatcccttaattgttaaattatatatggttaggacatttaaaaatataatcttctcgttgctcttatcttattttatgtgtgagctcgtgtgctagaccccgcaatcttcaaggaatattttttgttttgtttcttatgaccgcggcaacatcagttgaaaccattaaccacaattttttgttgcataccaactgaataacaatactcttttcgaacttctggccttttgcagttaaaccaccatcagttaaatttgagataattaacgaggcaagtattttgtaacccaaaaccagaataaagttaaaaagccagatcaaacgaatccattaacgagtgcaataatataatcctaaaatatggagcggatttgattccacaccaatattccaaaccaaaccttagagaacaaaacccaaaaaggaaaaagaaagagaagcttttgcaaagtcagattcatctggctgctgcttgaagatggttggttctgcttaggctttctcataagattagaatcgatatttctacaacacgaaaaaaacgctggagagatgttcatagcatctcttgcgatcttctcacacagcgactcactttcttcctaaactctgctctgttgtctctccattcctttgcagcttccacattcgctggtgactcatcgttgggacctgagagcatcgatatgatactcaacacaatgctttctacctgcatatcatacacagacccaacattagcttcaatgtacctctagtttctttcctcatgatctaataagaacactatcgattaagaggtggtacagggcagataaatcagaaagtgaatcatattccactcaagcaccctaacgacagaggttcaatctaagttgcactatcctccagagtattcctaagtcctgacttataaattccacgaacatttgaaaagcaagcactgtataagctcaatatcgaacaaaacatgtctgtttctacaagctatctacacaagagaaagctagctgtattcgaagaatgttaggctataaagcagaccccaagatattcgaagccatagataactcaaccctgcaaacaaattaccagagtactgaagctaaacggtaaaagaaaaaacataccgaatggaca

SEQ ID NO: 27787 - DNA, 8100 bp, Arabidopsis thaliana landsberg
agatttgctcatactggagcatgacgctgtaagagcctgatggctccattgatgtttcgttcatgcgttataacacgaataccttcgtaatacacggtcgtgggattattagctgcaaaacaccgtaagaaaaatggtcgatgtcggccttcatcagcggatccagagggattgtggccccctccagcttggaagtcatcgggcgagttacacaaggtgagaatattggcatctttgaagacatccggacggtagacaatgtctcttccacgagtgcctgatcgtaccactggaccaaggtcggaccagcattggtcagccaggttcttagctatcttcgaggataaatcgtcgggaagagtcgggttaaccatgtttgaaatgagatagtcagagatcgtcagtaatttcttcactttaataaccactactgtgaatttggttggggcaattacggttgaaatgaatgtcatacttgtgttggtaagcgttcgctgtcaaatcaatttatcacttgagttatgttataaagttaatatgcagtgtacgagacatatagatatgtacgtacacatttacattatataattagaagtgaacgatgtgtacgacaatatgatagaatatactaaattaacttctgacaatctccaaattaaatgtagttgcaatcatatatctaagataggtttgttcataataattagttgcaaagaacgagaatattgttcttggacgattaaagcaagtgcatagtaccggcctcccgcttgccgtgctcgtagatgtcaaccgagtatttctgacagtagaagaccatatctgcttctcgaatggttgtcaattccgaaaaagggtgtccaaacgcaagcaactccaagaacttcatcgtgtatggcccgcaatctcctgtagttgggttttgagaaaagaaagggcaacgcacatactcaaaaggttcaactgagtacggagaaatcaatacatcctggcacatcgctctgactaagtacggcatcatttcgcaaataggagtcattctcgccttcacagccgactcgcgcgtgtgcgatattaaagcgtcatacacagttattagccgttcattaaggttgattcccaaagcaacccaatgttcactcttccagttcatcggagcatacacaacatcgacatccttcagccacttcatattgggttcacggtttatgtgaactccattagcaatgtcggacagtaatttaccccatttgaacccgttcttattaatacacttcttgaagtcgcccacccgcttggtaagtagatgcgtcagcatcatgtccaatacaatacatctgtttgctatcatctgttccccgttcttgtgccacatcaacgttgccatcatttctaaatgctgaaatgttcaaaaaatatatcagtgtacgtacacttccaccaaaaatttaatcatctatgtacaatttataacaaggagtgtacgtatataaatgcaacgtaccgaactttcgacccattcaccaggtgttagaaggttcgcaaaaaactcgttgggcactttgcgaaacccgaaaagagtgtgaatcttgtaaatccagaaaaatatttgataacaagcttaagacttgcaaaaatgatgattgagatattaaataatccattttaatataatgtacttacacagagggtcctttaatgatattgctgaattcctctacttttgaagggtcaaccatgtccagggggttgtatgagacatttccagccctgagaacaacctctgtctgttgagttggtacatcgggcaccaaaactgtttttgccttaaaaccatgaggatgggcatcatcctgttcatagacaagttgcttcttcactttttttgggacctttggggatgcttttttttcttcttttgcttcgacagcagcagcattgtctgattcatcctgttaacaaatatgattgtcaacaacagttttatacgtttttctatgtttaaaataggtacatacattatttttaggaatatcggtcttgtctgcttcatctgaccctgggttaggatcctcagttcctacagacccctcgacaatacccagctcttccatcactatctatgcaagttaacgtacacaagtctatataatgtacacatataatcctatgtatgctattccgagaataggaattgaaacacaaattgttacctccaaaatagtggctgcagtcaaatcaccaacggctttggtatccaactcccgtatgacctgcataatataaattttatacatttgaacagttaatagtacattttatttgttgcaagagttagcttacattgttaactacttgaaatggtgacgggggatcactatgggtcttctcaggtatttcaacttccatcactgtcactaatttggattctcctgccgcctcaacctgtagaatttagcatcggaaagaaactttttagtaatgtatgaaacaatatatatgtacacagaacatagtgacaaaaatgtacgtacacttgtgccaggtacgtgagctgtatctccatcagaaggctcataagtttcttctgactcgctgccattagcttcagtcgttgcactggcatctcttgcttcttcctgaaacaaaaataatttgcaaagtcttatgggcgtacacatatggaaaaagaacaagtgactaacacatacctgtgcagatgttgaaggtaaacctgatggattgtctaccatctctatgtcagcatcagctatttcatcggcccctgtatgggtaccaactaagccaggttcagcaacatcctttggtccattatcctgaaacataggctaccatagagttaagcgttagataagtgaagaaattaatgtaatatatatgcatatagtcatggaaatctgtatataacgattaccagaagatctacctctgaaactcttgcagacacattagatggaacttcttccatctcggtgtcaacagtagcttcttccacaggcctctcttcctgtgttacaaagacagtcccagacattgaacctaagaagacagtcttaccaacaacaacatttcctctatcctgaaacatagtttaactaacttcttaagcgaatatgtacgtacaccatttaaacagattgttaagagtattagtagacgacataccagatgggattgtgtggatccagcataaggaactattaaaaatccagtgtctaatatctcttcttcagcggcagaagaattcaatccatcatttgcagtaaaatcactttcattattagcgccatcctgtatcgaagcagacagtacagttatacatatggattataaaatatttagcaatgtacgtacatgacttacctgttcatcaatgaatccttgcatatcttccttattggaatcaggtagctcagtagtgtcaacagcaaaagaaacatttttcttcggctttgaaggttttcttcttccgccgaaagcagtggtatgtactccagggacatccaaatcttcctctttggaattacagccaacagaaagtgcaggagtgtccacatcatgagaaacacgagtcagccttgaagactttctcgttccagtgcttccttttgtagacatccttctcgatggcttcttcgcagtaaccggtgccttatccatagaagtaggtggttcccgcgaatcatgggaaggtatggtttgttctggccttttgccttttggatcaagggcagcacgtatctggtcacggacaaagtctttcatatcttcatgcatttgatacatttggtcttccagctccttgaaagacctcctcatttcaacaataaacctctcaggcacaggctctccaaaacaatcctcagcagtctcttctttatcacagtccatttcagatttctgttttttcatagcaggttctttagggctcgggcccggtgcatttcgtttcctcttaacatctacaatagaccagttgctgctattaattggttttcttctgggtgcaataccaaaaaaatttgtaaaaacatttatacttatacttacctgtctcttctaggtgtggtgggcgcgactgctttggtactctagcatagcctccaacccattcatcctcctgccactggtgcccatctatcaacagtgcctcaatgtaatcaacccttggatcatcaacttcatcatcccatgaaagagatggaggacaaacattatcagctggtttcacaatatagttgacctcaacctacacaaataagtatgttaaccatagataatgtacatttacttattatgtacgtacatacacaatttaacacacctcatcagcagcctcacactccaaaatgcgagatgtccggattgctcgcagagaggcaagacgatggatagacctctcagcaaatgtcctgttaggtacatcatcaggtcctagcttagcaattgatgggattgtttcgaaagctaaaagctggagagctaatgggaaaccatggagtgcataagaccctacaagtataccccttattagtttctgagcatcgtaaggagtttggaaatttgctatcctccccaaagtacgggtaaaggacacccttccccatgggtatttgcagaagaactccaggttcttagtcatctcgacagtcttcgaagtaggcctgttggggttactgtgggccgctaccacaccgtcaaccaaaataataagagatagtgccagttgcttccacccctccatgctttcctcctcctgcagccagctcaccaaatcagcaattgttggaaccgtgtccccaaacctctcatcaaacagagtcttccaaacactctcacactcaggtttcacactgataacatcatcaacgtctttcttcttgggatacttcccacattccagcccagttaggatactaaattctcttaatccaaatctgattggatgaccgccgaatacaatccacatctcattcaccttctttgtcactaactgacggcatattagtccaaggacaagcttagcattgaaagatgccttgtttttgggtattttaaaaagttccccaaatggagaatcgagaagaaactgcatctctggtttcccctttagtacttttgctatgtcagaaatgtactccggtttagagtacgcgttcatctttgtctcggaagggtaccggtctagagcaaagagtcttggtggtaactcttcaactgtaagatcttcagtcggagcaacacttggactacctgcaattaaaagtcatatactgttaagcaaaccgaagtagtgtacgtacacagacattttccagattataactcaaaatcatatttttggcggaaacagagatttccaattctacttctcaatttttcatcctaaagatatgctaaattccgacaaattctaaccctttaatcaaacaagctttacaattctgatacacccaaagacaacaaacggtaaattagagattctaacccagttcctccgttgcctttgtcgcagagcgttttctccgcggggaaactcttaatacccgcttctccttccctggaccatgctgcttcctcgggactttgtcgttagctttattcccagctatagctaaagatgctatctcgccggaggttcaaattttgccgaaaaaaacagtaactttctcttggcttcgccgggaaaaacagtaactttcacttcaccggatgtgggagttcagtggctcaattcaactacccaacaattcgaagttatgtcgaattttgaagcaatggatactgaatttcgtttcgctttctgattctctctcaaatctctccgttactctcttctctttttcgttttctcggtttcttcgtttcagtttttttttttttgtctttttcaaaactgaaccgcatcaactaaaccgaaaccaactgctgtgcggtttggttgctcccattaacaattgtttggtccaaaaacgattgaaaagacaaacggtaaaaaccatatctcactttatcaaactatgagaccaattcttttttcatcgacttatgtgatttttttatattataaatcacttcctaataagtagatatcataaatcgttttatctcgatgaaaacatagtttcttttacgtgatataagcgaccaaattagttattttattcatctccacatgcacgactattttaaaaaaaccagagttgatgtgaatcatatagttacctccaacaatatgaacccatatcacttcacattcgtctaaattaatttatgatatcacttataacgttatgaccgccattgttaaaacctgttatggttatattcaatttctcattggtttaatggttcaattggatctttgagaattgagtctggttattgctggttagtggagtggttaaaaccggttaagcaaagttgaaggatcagagagtctctaactgcagtggagggtttctgttacttaacaagattctgttgtgaatcatcgcttatattctcattctttgtatcttcttctttgttcttgtattcaagtgagagagagcagagagagagagattgatccaccattgttgacattgtaagatctgattttgagcaaaacacttcttgatagtgaatttgccggattgattcggctccagacgtaagcttgatcacactgatcagctgaaccgggttaacaaactcgcctcttgtttacatttacttccgtgttgattctgattctcaagttgcgtgtgtgtttgtgttgaagacgttgttcatttcattgagattgattgaagtaaagttagatttaatctataacaacatggacaagatatacgttcagctatctcttgacatatttcaaagataccatcttttaccataattaatttggaaacttaaaattttatgtaaaccatgagggtttcttaccatcagctgttactttaccctattataagggacatcaactgcccataccttctcagttgcttgtctaatgcttcatattgtttgatcttactagaagtaaagtgtaattccagtctttacccataattcatgtgtaatggataatttttatgaataatctacttccatttgacaagagagatcatcccgtgacaattctttttgatagggttcataacttctcgattagcctttatttgtaaaatatacatctaatttgggtcttcatgcaacattctttacaaaaacaaaaaaaaaaatcgttttttaattatacactttctttgtgttcatttgcatgacgggagcccataattacatcttaattagggatgctgaagtatttgtaagtgtcacatgttactaccggaactatgctttgtgaccatcgggaacactatagctgactacaactagttagttgaaagacctggcataaggttttggtcttattttggggttttgtattctaatttcttgtgtttgtgaaacacattacagatctaaacttaatgcatgtaatgtaatatagatagtaatctatataagatggttattatgatctctaacaaacaacctaactaatcccggaaaccataataagaacctcttcaattactaaacctcactcaattcagctacatttgagtgctttaacatcatatgttccatctagaacttacatcatttaagttatgtgtgagagtgtgatcccccttagttcttttgaccgatacacaaaccaccctagcatgtgtcgtttcagctagtcttctatcactttttgtggacttcctcttcactatgcacaacacttagcatatataagatctttcgacctttctctgttttttttttttttttcagttaacatatacaactaattaatattttcaatgagtttagtgcattttttcaacagatagaacattcaagacttacatgtttcaacttaagaagtatatattaccttaagttatgctgcaattgtaatgaattatgtcaaaaggggaaacgtacgataagaaaattacatgtgtgaaaatctgaaagaaagaaagaaatgagagtaagttgcatcaaagttagagctggtttctcatgatg

SEQ ID NO: 27788 - DNA, 767 bp, Arabidopsis thaliana landsberg
  unsure (1)..(767): unsure at all n locations
catatccaaaggcaataccgcactcgatacgctacgcagatgtctaataaattttcccaatcacccgacacattattcatgatcttattccacactaattgtaagatcaaggcacatcttccaaccattctctcattggttgcttaaatctgcagttctcatctaccttattttagtcccacttcacaaaattcagttttggtttttgtgaacaatttataggtctaacgacatatatcaatgcggcaagtgtctatatagcttaagatattttctgaaccatgtatattatatttatataacttaacataaaatctaaaaataaaataaaatgatagtgtatataatatatgtatataatactttttctgttcctttttgtttgattgtttaaaaaaaaaaattgtttcaaaaagattgattttttaggttttcaatgcaatagttattagttataattgataaattgtaaatttcaatacaaattattgaatatcattggtttagagttattgaaaattataaatcacaaagaacaatacaattaaaaacaacatttaatattttttcttaatatttgtatttttcccaaaaaaaaatcaaacaaaaaggaacagagagtatatctattatacgtcctgataaactatanaacattatttaaatgttatttctacctaatttcattttcacataaaaaaattgaaaaccaaatcatcatggtgagaatttcagctgtaattggtacttatagacataactcacgt

SEQ ID NO: 27789 - DNA, 1716 bp, Arabidopsis thaliana landsberg
  unsure (1)..(1716): unsure at all n locations
atcaaagattaaacaaatcaattcgtaacaagaaaaactaaatttaaagtaagagcatcttcaatgtaaatttctatattttctctattttgaaaaactctattttggaggagattttgctccaatatataactctaaaatagagttttgtcttacaaaaatggaagagacattggattactctctctatatagaccaaaactaaatcaaaacctatttagtatcttttcaaaccaaatcaaaatttggcaaacctaatgtgttttgagttgtcgaaacggatattttgtgcattttaaatgaaaattgtgggattgatgattgcataaacatacccaaaaaaaataccaaaaaaaaaaatacaatctgagtttctcccaaaaaggccaaggccgtaaatttgactagtctcggctcatgttttctcttacaactattaggcctattttgggcccatattatttcatgcataaacaaaacaaaacaaaaatgttgataatctgtgttcaacactattttagtatttttggttaacgaatttttaacactcattttacacaccatgtatgaataatgttatgattatttaggttttagagagttttaaagcttatttatgcttatttaaaattaataactaaaattaacttcagatgtgatgaatatgtgattttctcttgtataatctaaccgtgtgagatttctttaaatagcattttagtgcatagattatacacaaattaaaacatggtgcattacgaaaatgataaaaacaactggaactgaaaattggattaactgttactcggttacaatcaaattagaactatataataaaattaacattaagaaacacttttaagggaataaaaatgttatggatgacaaaaaaaaataaaaaatgttatggaactggctcgaatagttatatgaatctggtgaaatgtgttctatccaaaattaataaaagaaggcacgtggggcgattaatgaagaccattaaatcggcattttaatttatggtcccacgtaaatacattaccacctctaattttatttttgcttaactcttcatatattnnnnnnnnnnnnnnnnnnnnnnnnnnntaatattcgtcagaattttacagccattcccaattaattatgaggtctctgctacaaccaattacactatgacttttccatagaacaatcaatcttttggtccacgaatgatgaatctgacaattttaatactgcatttaactctatattgaaatcaaagaaacttcagaaccatatacgacataacatagcaacactcgattctccatctcacattggtaacactaatcaatgtaaacattacaaaacccataatgccatcacaaattccaaaaaaaaaaaggtataattcactaccaaactttatactgatcatttttaaacaagattttgttcgctcgtggtgatattgttatggtaaagaaagaaaaaaaactcatctacatgatatttgcaaaacacctagcggcaatgtaaattcctaatctcccttaatcccaaaattcatgtgcactacatgtaagaataataatcaataacctttttctgcttttgttttcttgattcttcatggacatctagggttttttacctggacctccatagtaaaaatagttaccccacacacgaatcggcccaccctcttatattataacaacttgggacggg

SEQ ID NO: 27790 - DNA, 1192 bp, Arabidopsis thaliana landsberg
ctggctcgcctagaaacagagaaaacgcagctgctgttctagtccacctctgttctggagacccacaacatcttgtcgaagcgcagaaactcggccttatgggtccattgatagatttagctggaaatgggacggatagagggaaacgaaaagcagcgcagttgcttgaacgcatcagccgtctcgctgaacagcagaaggaaacggctcagtcacaaccggaagaagaagctgaaccaacacatccagaatccaccacagaagctgcagatacttaaagattgtctttgttttggatcctctggtcatctctttcacgtacgtatgtttattattctcactttttgtttgtgctactcatcctccctcgaggtaggattcacggtagacgcggaagaggaaaatggcctccttctccgatctacttttaactttatggtgatatctttgtgtggacagagcaatctcgtccactggagagaaaagcaaatatgcatacatacacgtcaacttgtatcattgtaacactatgtttgtaatcatttccacgagctttttttgttttcaatacaagatctctctgttcgctttcttaatagcattaaagagatattaattgaatataatgcagattccgatttttcatgaacagatgcgtaaactgcttgtagagtcgatagattccatgcaaaatgtttcaatacaattatacaaaactatcaaatagcaaaatctcaacccgttttaaattttcttaaagaatccgtagaacaaatatgtctccaagcacaaatagaacatgtaaagtgactctactacacttatcacaaatacagaaccattccttcggatccatagagagagagagaacacatcaaatacatttccagtgttatagatttattatatatgtcgaactcctttactagctgtattgtgcaaaatattcaaaagactttccttaggtctttttgtacatgctcaaatccacttgagaatcctggtaacgttgggtgaggtacgttgaacatttgatagctggatatctacgcacacataattaattaacgtcgttaagacattgttacatgtccaatgtctcaatgtaacaaggtaattaaagaagttcagtccttacttgggagggttgttttcagactggcaggtaggaagacattctactatacagtca

SEQ ID NO: 27791 - DNA, 2026 bp, Arabidopsis thaliana landsberg
  unsure (1)..(2026): unsure at all n locations
caaaaccatagattccggttagtcacggtatgattaccaactttcaaaatgtatatgattagcaaatgcttagttttagacgttttgttatacctgaatctgactcgacgtagctctctagtcccatctgataattgtctgatggtaatgtaaacaccaggctcgtcctcttcaatccactcagcttgcatttcactagcattgctcatggaaggtggatcatctctggaagaagttgtggttcttgctgcatccatcggtggtcctccatgataacttcctggtccatagttgctagagccgccataaaagtgatgcgggacagatcctggaggtctgaaattgtgtctctttgtgtccagtctctgctttctcttgctgaatcgattcttgtgtaagttgaatctctctgcgactgttagaagaaacaaacagaagttgaaagataagattactcataaaccttctcttaagttgtgatctaaagagtgatgtgttttacnnnnnnnnnnnnnnnnnnnnnnnnnnnnnnnnnnnnncggctaaatctttgaacattgtacagctcaactattctatcataggtctcaccccaccacctctgagcctgccacttgtcgaaaacctcccggcttcaagaaagatacaagtatatgttagcttcatttcacattgaatcattctatgtccttaagtgaaacatattcttgaaaatgttatggagagaatgggtttcaaatacctgaaacgtatccgtttaagatcatttcctccactgggtagtgagacaaatgtgatatgaacaccaggctctacttgagccatccactcctttggctcgtcatcttctagtaccacatcacacgactgagcagagatggattcacgttcaccgccatacattgatgtgaatcttgagtctggccgtccagattgatggtaggaggatcttggtaagtcccaagcaggagtggagctcgtgcttccaccaggataagggtatggaacactttctgatgcagtgtcaaaatccggaaacttcctcaagttgctgctcgaagagcccggagttggcttgctttgtttatgagaacctgagaatttcgatgccatatctttgatctgcatagcatccgtacccaagaagctgattaaagtataatatcttaaaacataacatagtactaggtgatcattggacatcagcataatgttggatagaacaggtaacaaacagtaagcaataaagtctactgccatgaaaaaaagagtcaagaaatggatgatttttcttttatcccaactaggaaaaaggagtctagtatcatcattcataaagagcatgaataaagctagaagatctgatataatttgaaacatataatatagttcatcttgtcttctccatgactagaacataatcatagcttctttttttgcttcttttgatttactatatacttgccccaccatcctaatctaaataagaacccactagggacttattctaggaaagtatatagatcaatcttcaataacaagcaaaaatcatgttcaacaaggcgtgactccattagccttttccacacaaatcatcagccactacattggtaaattcaatgtgaaacataattttgatattttaattattttactaatttggttgctagattttttatgtctagtcacatagagtgcagaaaataaaacactgacataacctattaaagagagatttgtaatagattccagagaagtgatgttgcatcactgtaaaatcttgtctaaagatcctaattttgtttgtaacctgcagccttaactacagtaacctctatacttttgtacttgacagccaaatttcaaaactgtttatttcacttttcactacaattgttaaaacagtttaagaggaccatttttctcaatttggctttgtttatttcaagacaaaggcaaataggaaaaaagcaacaaaagtaaagtgaaaaagagtcttaaggatcaacaaaggaaaggattgatc

SEQ ID NO: 27792 - DNA, 1137 bp, Arabidopsis thaliana landsberg
tatatacagcccaagagcaatgccctctgctatagctttggagagagcacacgcatctgcaaatcctagatttactccttgaccagccaacgggtgaactgtatgagctgagtcaccaacaagagccacacgttttgacacatagtcttttgcgtgccttaaagacaaagggaacatcattctctctgaagaaagcttcacaaccttgggaggagtttcaaacctctctttggcagatatggtcgcatctcctgtaagccaagagagactatcccgtgaacttgtagtctctggattaggaccatatccagaatccagagcatcatttacagctttgatgaagtcatcctcgttcatcaattttcgatctgatgcctcttttgggtccatggtccatactatgttgctaaacttgtcaccaatgggaagaagtgcgattgggccattgggtaaaaaccgttgccatgctgtgtagttttcggctgtatgctcaacagtacaaattatagcgttctgtgagtagttccatccagtcgttttgaacccagccaactcccttactcgcgacttagacccatcagcgcctacctgcacaaagattgttagacatcctaaaattgatgagattcaggagtcgttccactcaaatctagcaaacggagaacgaaaacttaccaccagttttgcgtagacgcgatttccatcgcttagctccagcttagcaaggcgtcctcgcatgaacaagtctgttgtggatggtacttcaccaagacctgtcaacgaagagctaggtagcatatccatcgcatttaacctcgcgggataaacagtcttctggagatctgattcctgcaaatatcacgccctcccatttaaaaaacagaaaacatgccaaactgatgaagtcagattatctgattatactgtagaactaataagcgattagaacgaattcttcaaaatagtagcagtctttctaaatttgagcacagagtgttcagatgaagatcagtctaagcaatatggataagctatctggatggttgatttttaagctatgcttcatttgttggaaaatcaaattaaaaggtagctgaaagttttgagcgagcaaatactctagtggacatgcgaaag

SEQ ID NO: 27793 - DNA, 1749 bp, Arabidopsis thaliana landsberg
  unsure (1)..(1749): unsure at all n locations
ttttggataattcttcatctttcacatttctaagtatccaaatgcttttccaaaccatatgttttcgggcttttttttttttatcaattcggtaagaaacacattgacggcattaattaacataaaactaataaactacatgttttctatgtttttttgctaatttttcctaaagctaatccattagaaaattttactattcnaactatcattgtatgaaaaaggtattatctaattgtattcacaattctataggaaaaaaggttaacatgtcattttcttctcctttttagccgtccactcacgactaagaacttattcgtctaaacatgaattacatgacaatgtcaaagcgtggttaaaacttcagaaagaagtataaacctacctcaagaagtcgtcgtcctctttctctaattaaactattatttcccataatagaaaacactaattttttgcctttttggtaaggaaagtaacatagttgttagtaaatatgaattaggaaataatatacaaagtcttggtcctcttctcatcgactttaaaatctctttctcccattacaaaccaaaaccattagaagatttcgaaaaagaaaaaaaaacacctccacaaacaaaacaatggcggtgannnnnnnnnnnnnnnnnnnnnnnnnnnnnnnnttgtgtttccaagatccagacaacatatattctcccaagaagacaaagaaagatgatggtgaacgtgtgattaccaaacagaaatcgtttcttggattgtcgattctagacataagtaatccaagttccactaccttgtccgaagatctctcaatctccctcgccggctcggatctccacgtgttcacacaagcagagcttagagtcataacacaaagcttctcttctagcaactttcttggtgaaggagggtttggtccggttcataaagggttcatcgatgacaagctccgtcctggtcttaaggctcagcccgttgccgttaaacttcttgatcttgatggtcttcaaggtcaccgtgagtttatggttcgtacattcatttcattagtcctctgtttaagatacaaaaatattgagtctaaatgtctaactaatattatttttggggtgatttttttcagacggaggttatgtgtttgggaaaactaaagcatccgaatctggtgaagctgatcggatattgctgcgaggaagcacatagacttcttgtttatgagttcatgcctcgtggaagtttggagtctcaactcttcagaagtgagttgacttttttttattgtaaccatcaaatagaaatgatcatttcattttaagaaccagaactgatgaaattgtttcagggtgctccctaccgctgccatggacaacgaggttgaacatcgcttatgaagctgcaaagggtctacagtttctacatgaagccgagaagcccatcatctatcgcgatttcaaggcctctaatatcttgttagattctgtaagcaagcattcttcttttttgatcttaagggttacaccaaactagaccattttagttttagagcggacaataacctaaaatggacatatttgtttctttctattcaaattatggtggaaccgcaaattacatccatggtcaccattcaaaattataattgcttttggatttgaatagacttttgatgttttgatttcttttttcaggattaaacaaagaaactctcggacttcgggctagcaaaagacggaccacaag

SEQ ID NO: 27794 - DNA, 800 bp, Arabidopsis thaliana landsberg
gttctctatgtggaactaacgcggcagtcatcagaggtgcattgagagcagagagaccagagctgcttacagtaattttaccccaaagtttgaaaaaacaacctcctgagagccaagaactattgtctaaagtaagcaaaaactgcttgttcaaaagtcagaatcttgttgcatctctgatctattacatctgaaactcttgtcttcattgctatggtcattttacaggtacaaaacgtggtagagaagccacataatgaccatttgccattgttagaagccagcaggtttgtgaataaaaaaccgttgatatacgttggtgaagatggaaactgaacctttttggttaatatatatttatgtgcaggttgtgtaatatggacatcatatcacaagttcaacaagtgatctgcttcgcgtttcatgacagtaagcttcttatggagacatgtcaagaagccaaaaatctacgcaagattgtcactctcttctacctcgattgattcacattcactctttattttcttctcgttacaaaacagagaagataatcctccttgtaaattatgaatcttgattaaacaaacacacacaaccacaattatattcttttgtccaaattttgatacacatcagtgctatttttataggattatttctcaactactattcgtcagtttacatctctgtaacaaaacaatttagctccggtagattcccattaaaaaatatgacttttaatataataaagcacaaaactttgattagctttctacgcagaaacatttattcactcttta

SEQ ID NO: 27795 - DNA, 1910 bp, Arabidopsis thaliana landsberg
tcttgacaacacaactacatctgacccatcgtattcttcagcctccattgtgaatctcattatcattggtagtgtctgacataacagcgccagatacaacaacatgctgttcatatctccctgtctctgttcttgcagaattacacacatgattagatgatcgatacacattttgatttttttgttgtacgttgttgtcaatctataagatatgatacatatatcttgaatgttgattgagaggagacaataacgtactgggtcgaaagattggtgtttgcggagattagagatgccaccaaggaatagagaagtgcctaagacgaagagaagattggagagaatagagccaagaagtgagagtttcactattctcatcttcctttgcccaaccgctagaatcgctattatcatctccgttgcgtttccacatgtggcgttcattaatcctccaacttcattcattcattcaattattttcattaattttcataagtgagagaaaatgcaaacactttcacagaatcaaaaatccaatttccttcatgtatatagcttgcatgtcaagttatcaaagatcaatgcactataaaagacacctagattaaaccacaaaaataatgcgttgatttaatttaagaattcggttttgtgctgcgaataacccggttcgattcacatggcaacaaatataaagtcaacgaaatctaaatgatcacctgttggaccggtatggaaagcaacttgcctgtttaagaagagaatcaaaatatatgtttgtaaatgaactaataacgttattttagatagaaagcaaataaatggtaaaagaagaaaacaaagaagaatacattactcggtgagaaaactgatacgttcggccaaaggtgtcaatcccagcaagctcaacgcaaagacccacgcctgtttttttgttacaccacgcaataacaattaacaccccatatggtttaagacgaatgtttggtaaaatattccgataaaataaagatatatttgttggaacttacattttgacagtcatagcggtgagcgacgacggcgagaggaacggccgggaagaggatgaacaatttggtgccgagaagaacttcttgaagattcgtcaagattcgtctcataaactcccaacgaactctggagatcagtttcagatccgatctcttccttatcaacgacgacgccgataccgttctccgcacacgcctcgacgtctccgccgtcggcttatcacttcctcctccgccattctctaacagacacagattagaagacgattccgtactgattgaagacatcttcttcgttgactctctttggtcaaaccccacaaaactttgtgttctgtttcctttgaatctgatttttgaaaatctgaaaaatttccagggatgtataaatgtatactttatatagacaaaaacgcgtgtaaacgaacgtttctctctatatcatttttttgttggtgttgacgtctttctatatcatttttacaacttttagtcaatgtttttgcgtctgtcatttactatgtcttatcatttttatacatataataactcgtatataagaagaaatcgcttcgatctttgcaagttgcaattatataattgatttggaatttttgtgtgtctccttgcacatgttcatttttaacgatcaaagacttcaagacttttgagtaatcttcctgtgtttttacttatgaaataaaatatcgatgacggtcaaataagtgaaaaagtagaaatttggagttatgcacgatgattgttgactcatctaattaagttgtgttggtctatacgtgtcttatcccaaaagaaatatacgaatatatataatcatcgttctataaacaactaaaaacatgagtttatgtcttgaac

SEQ ID NO: 27796 - DNA, 1547 bp, Arabidopsis thaliana landsberg
  unsure (1)..(1547): unsure at all n locations
ttttcaagaaagtaataaccaatataaagcctagattaaactaaattctaaaagaggaatgcttttattacaatattactttttgcaaaaggacttggttaataatatccacaaaaccttagacaaagtccaagtcttttttttgtcttagtgagaaaggcaagagagtaggaagagattctaaccactcccttgacaaaaatatgtttcaatctttgttgactttataacgatactcttgttcttgtaacctaagcaaagaaagaactcttgtttgctttgtctttttctatcatagcacatgaatctggtgaaaacaacattctcacggtgaagctattaactttttgacctctttctagaaggtagaaaataaacatacaaagcaaaatccagaaatcgcagatcacaagcgtgccataccatggcttgaaacagtacctcttgtgaggcacttgacaaaattagatcgcaccatatgttctttcacttggtctctgtgttgttgtcgcttgagtagaagatgcggaagagcggtcccatgagacttcattggcaaaagcattgttgatgtcttcagttcttgagtagctttgtccacttccactcacctgtttatcaagaccaaaatcaattagcttacatagcatttgtctcttgagagatccataaattgtaaccaaagaccacagtgagctttctcttagattttgcataaatggaatccttttgagttttcttgtaatacttacagtttctagnnnnnnnnnnnnnnnnnnnnnnnnnnnnnntgcatcagttccacgctgcatccatacgagtacatcagcgattgagtgtgtgtatatcacgtgagacaataactacagaatggaagtggaatagtataaagatatgaagatgaccacacgctctactcttgttttataaataaagcccccccagcagaaaagtgcagatgcagcgaggaatctgatcagaataaactctccacaacacaaagagttgagactattcttcagttatatgtccccatggaagatcacaaagcattacttacacgcaggaaaaaaactccaaatataccccatcctttcgctgatcctccttcgttaccttgattgtattctgaaatgatatcaagcaatggaaatatttagctcaaggggaatgccttgtggatgatcaagccgagtctataataagctcaccgcagagttttgtaaggaaaaactgaacaggatcataaccatccactgggatggtgacattgacttcatatggagttcgccgagatttctcacctttgaaatttccaggagaaaaaaagtaaaggttacagattaagtaacaacaaagatcaaaggcacaatgcaaaaagtaagataacaggaattattacaattccaatcaagtactaaagttgacggtgataaagttgttggatgattcccagtcaaggaagaaccagctatattaacatcaagaccattctctggggaaaccttgatgataggcttcccgaccaatgttaaaaagaagcaatt

SEQ ID NO: 27797 - DNA, 1275 bp, Arabidopsis thaliana landsberg
ttgaattaaaggcaaactcggctgcttatgatgctgagatgattattttgtgacattgttattttttgcatgccaactgggtctatcataccggtggaggttgatccaggcatgacagtgctgagcaagcttgtttatgggtcaacgcacgttagtgcatctgattgggctgagcccgaccaatctgagctagacgatccatctcaaggttaaaagagactagtaaactgccctagtataacttctgcggtatatgaatcatttcaaaatgagtgatatgttgctcacttttactaataggaagacccgtgaaggtggtccaggatattgatatgacttcccctagcccagcaaccactctatatccaacaaccggtggcaacattcattgtttcaaagccattactcattgtgcaatctttgacatcttatctcctccatactcttctactcatggcagacactgcaactacttccgaaaatccccaatgctagacttacctggtaaaatatcacaaacttcacgaaataccagtttataacttcttaaaagtgctactatatttcgtaatgtaacagctttcataacaattttggaagaatcatggtttaaaccactaggttgttgattagagaaaaggtctcatactctcatagaacatgctcattatctgtattgctaaacagatttggtttaagactatcatttgttactatggcaatgttgttgatgacatcatatgtgaaaccaggtgagattgaagtgatgaatggagaagtgatctcaaatgtgacatggcttgaagagtatcaacctccagataactttgtgatatggagagttccgtacagaggtccagtgattagaaaatgagaaatacaaaaaggattaaacatattaaaaaagagcagaaagagaaaggtgcttatgatcaggagaataattggtaaaccattcagaggctggctgcataatggtcgaggttcttacataattgtgaccacattaagttccagcctatgtcgttgtatgataatgattacttcactagtttaatattataatttttttcccctatttttatatgcagctacacaaaaaattgctcataaacagtgttatatttagttatcataaattttgtttccattgatcttttgcatttccttatttcatgtcttctctagatcatatcaacttttaattcttcttatgactgaaagacgaagcctgaagtgctgtgctggcttgcgagtaataaaaaaactcatgca

SEQ ID NO: 27798 - DNA, 1107 bp, Arabidopsis thaliana landsberg
gcactcttacatatgtgcatacgcagataaatgtgaaataaattgtgtggatgttgatgagcgccttttgaaactgcaggagatactggaacagataattgattcacgaagtttaaattccttcactcaagctggtggcttggaaaactctgttctgcggaaatctggagttgcatctgaaggttgttctcccaagataaacgaatggcggaataaaggtttagagggaatgtttgaggatctgcacgagatggacactgccttcatagacgagtcttacacatatcctattcaccttaagagccatgtaggggccaaattttgccatcatgccacttcatcatcaacaggtagcatcacgtcagtatcttcaacaaatacccccagaacaagtcactttgactcctattggctagaacggcattgtccagagcaagaggatcttcaactggttagttttctgtttccattatattctctttttaggtagattaagtattggttcagcgttatatgttgctttactagtttactactgtgccttgcagtatccattcttatacattgaattaggtcatatcatgctgagtttttgatatatagattggttgttgctggaatcttagaatccttaatgtcttaatcaataaaactttggatgctcaaacttttgcgagtattactgatgccattgatgggttgagaatttctcctcttgttataacctctctaggttatagcgagttcctagcttcaacttcttcttattcattactttgttacttgtccatggcgggtctctattctccagatcatatagatatcattttcttacctgtttcactgatctttgaataaataaacatttcgaagcataatatcttccagtgttttttcttcgttttcttcatcttgcagatgatggacctttctgatattgcccgctgtggagcaagcacagatttctcgaaagaggggtcctgtgactatataatggcatgcatgcaagacatacaagctgtcttgaagcagggcaagctcaaagcacttgtaatagatacttccgggggacggatcgattaacttctctggtaaattcactggcaa

SEQ ID NO: 27799 - DNA, 1548 bp, Arabidopsis thaliana landsberg
  unsure (1)..(1548): unsure at all n locations
agactggatccagacaatctttctctgccgctctttgaactccatcgctattttaacatcccaatccgcgttttctctgtaaaagggtaaagaccagacggattactaagtaattggtcactctgtttcagcttttgtatatcatgacaagacaactactgatacctgtcgatagaatctgcatcgccaagattttgcatcatgtcgtcgaatgtggattggagattctcaagtactcctatctcaacttccaagttcttccataacttaaaagaatcaagaaatgagaaaaatatcttaagtgttagattcatagagatatagatgtagttatacgaaggtgatgaagaatatatacatctgtttcagaatgatgaacaagaccatgagctttgcgcaagtagttcaacaatggagtaggcaagccgtagtggaagatgttgtgattactcgatagccaagtcccgcgtaacatgtgagttgtccaagaaaactcggtctcnnnnnnnnnnnnnnnnnngacatcaaaatctgcgaggaagagatacaacttaaagcaaaaaaagcatgccagcctgagtgatctcagaatgaggtaaggttaaactacctaagggaatgacatcatacgggttatccccttttggtagaaatccgtaaaatgttaacagatgcgaactagagtagtttccgtagctaagaaaacattgttcccctttgttgcaaggccttgagactgggaacttcaaggaactcgtctcaatgtctacttttccatatttcactatgtgtgggtatatctgcaaaacccgccaaattatcatattccggatagtgataggaattacttagtataccagaggcagaacgagagaagacacatacagaatggttgagaaaaccggcgacaggaatcaagcaagtcttcagctttccatctgggaatttgatttgcatgctatttgagtaatacaactcacaagcccataagtaatgttcccatgtatagagctccggtggaaatacttcccggtggttcgataaaagaggaatcaattcatcatacctctcacgcaaaagctgcagatatacaaacaattgccaatggaatcaagaacataatacaaatcacagaaccaaaagataagagatgggatcaagtcacacctctttagcttgcattatttcatctaaaagcaatgtaccatcaagctccatgattgcatcaaccccaaaactcaaacctgcaatgagagaatcaatgtttgttgtctctttgaaacaaacactgctacaagaattgaatatttagttctccaaacaattttaccggtacaaaaattctcttgcagagagtcaaagtatggtttgaatttcgagtccaggttatgcttttccctcatggtccataagagcagcattgtctcagatgtaatgccatcaaacgtctccaatattgggtactgaagacaagagaacactcatcatatagcattgctatgatgaaactgacgcaatctttaaatcaggatgaactcaaatgatata

SEQ ID NO: 27800 - DNA, 1184 bp, Arabidopsis thaliana landsberg
tcgtgttttacattgttccttaagacatttcgctgacctttgaactcctaacaagtaccaacacgctcctgccgcctgtagttcataattaatagctagtaacacataattttggcagattaatagattttggatttgtattataaatttataattgattgcatttgttgtacggttaatgattgattaaattctcgtatgatgttaagtcaaagttgatgagtcattgagggaaaataaaaatgaaccgttaaatttatagtatttgaaaacaagaagctaatgattgcatatttaataattacaacttaagactttcgtaaattaatcatacgtaaaaccaaggcacgttgtgtttagtttcattaaataatttgattgcgactttgtgatggaaagaatcataccttcctcctaacaaatctattcttattttggcattttctgatgtattcttttcttttaaaagactcccacagcaatggaaaaggtccatgtgaaaatattttaggtatgatatcttaaataatcttacaatcaaaaccttataaaatataattatttggcacctgaaaatcaacactttctcattgaattaacttttctaaaactttccacacaagaaatgaagcattaaaagcatctaactagagtttttttacagtagctattgacatagactatcacaacttcacaactagtctattaataagttgaaattttgtatttaccaatatgttaagcaatacaaaacagtttatcaaataacttacatgagccgcgacgaaataagcgaggatgttgagtgcaatgccccacctaacggggctcaaagatgttaccccagagagtagcattgcggcggttatggcttatagagtgatatatcgtcggtagatattggaagaggaagtgaaacaggcaaaactgtcaccactaaagtcacagagcctatctttataagagaaggtttagtacccacaacaccatctgcgtgcagtatatattcataacttttaataaaatacttgtgtcacgaaaacaaaaatgtacaataccaatagataactgaaaacgaatgaactgtattattcttgggccacacacgaacatgattaggtcagactaagtgagagctcctttacaccatatcagtagttagttataaagtgttttctagaata

SEQ ID NO: 27801 - DNA, 1285 bp, Arabidopsis thaliana landsberg
cttagtttcaaatcattttggctgagcggctggttgaccaagatatagcatctatgtttttggctagctttcctcgtaggcaccttataggcttgtactgcccagtatagatcactagtttttctgaaacatcttcatgagtttttttagagttccctgattaaagtccttgatcattgtcatgatatcatgatttttgttgttgtttgtgcgtatttataattgccatttttctctaaagtgctgcagttacttttggtttatgttgatactaatcaatcatgatttggaatcaaatatattcttcactactatgagatgttcaaattgcttaataatttctctctgtgagcaatattcaattttcttcctttcaaattgcaggccattccgcctgtaactcgaatggctctcacccgtgatacctgggtaactgtcctgtgcagaaaaataagagattgctggcattgggtaatgattgcttaacttcgttgtcctgataaatcaagtactttttgcattatatcatcttctgacatgatcttcacctactcatttaggttgcagaaggggaccttcctattgttgcctcgcaagggtgagttgtcataattttcctgaatatcatggtaacggattagtgatccatttatgagcttctcttcttaaccttataggcgggagattgaagtttacaaaaatcttgatccagccatccgtgtggtgattttaaaagcgttatgtgatattcgtgttgaggtattgttgctactgtatgacgatctattatccaaatcttgataccatctgtattgttttatcctctaaaactttttgttatttgtgaaacgcactagagttgaaactgaattttcattatgttgtatatctgtattgatgtatatagggtaccatgtatatatgtttacagtttatgatgtccattattaagctctggagctttctgatgcgatgctaatgactgacttgaaacaaagtggttttaacacttatagttttgattggttttgtgtatttcttacagcaagaggatatcaggagctacattgacaactctcttaaaactggtgttcacctgtcagtttttcgcaaagatcgtgttgggggtgattcacatggagttaatttttggtatggagcaaagaaaaaagacctaaaggactcctttgtttgcatatatctgatattacctgtgtgcttcttatgtcaggcatgaggaagatcccttaaattgtcaccgtttatatcgggaaataagggaagc

SEQ ID NO: 27802 - DNA, 1497 bp, Arabidopsis thaliana landsberg
tatcagacatggataagcctattatgaccggcattgctttgactgcaatggatgaattgctcaggcttcttcagacaaatgaacctctatggacaagaacagatggctgcagagacattctcaatcttggtagctatgagaatgttttcccaagatcaagtaaccgagggaagaaccagaactttcgagtcgaagcatcaaggtcttctggtattgtcttcatgaatgctatggcacttgtcgacatgttcatggattgtgtaagtagctgagacatcctcatcatcatgttctgtttcacaattggttgcagcatttcttataaaaatattgtcttcttgttgcaggtcaagtggacagaactctttccctctatcattgcagcttctaaaacacttgcagtgatttcttcaggaatgggaggtacccatgagggtgcattgcatttggtaatatttgatactatacttctattctccttttatttttgtttcattttgacttatatataatagtaactttgcttggcttggttatgtagttgtatttagaattggaagtgctttcgcctttagtagcgggacgcgaattctgcgagctacgctattgtcaacagactgaacaaggaagctggatagttgtaaatgtctcatatgatcttcctcagtttgtttctcactctcagtcctatagatttccatctggatgcttgattcaggatatgcccaatggatattccaaggttaaacttctttttcctctgtcaactaaatcatgttttcatgttagaatatccctaaactgatgaattgaaacaggttacttgggttgaacatattgaaactgaagaaaaagaaccggttcatgagctatacagagagattattcacagagggattgcttttggggctgatcgttgggttaccactctccagagaatgtgtgaaagatttgcttctctatcggtaccagcgtcttcatctcgtgatctcggtggaggtaaacataattttccattgcgaacctcaaagttttaaactccatataactaacatttgttgagcaactttttgcagtgattccatcaccggaagggaagagaagcatgatgagacttgctcagaggatgatcagcaactactgtttaagtgtcagcagatccaacaacacacgctcaaccgttgtttcggaactgaacgaagttggaatccgtgtgactgcacataagagccctgaaccaaacggcacagtcctatgtgcagccaccactttctggcttcccaattctcctcaaaatgtcttcaatttcctcaaagacgaaagaacccgtcctcaggtaacaacaacacaagattcaaaatcttcatacgtaaagattcatttgataatgtatatattgtttcttgtttggggtactagtgggatgttctttcaaacggaaacgcagtgcaagaagttgctcacatctcaaacggatcacatcctggaaactgcata

SEQ ID NO: 27803 - DNA, 1218 bp, Arabidopsis thaliana landsberg
actcgacattcaacaatataatgagaatgatgaccggaaaacgatactacggtgaagaaacaaccgatgaggaagaagcaaagcgtgtccgtaagttggtagcagatgttggggctaacacgagttcaggcaacgccgttgactacgtccccatcctcagactgttttcaagttatgaaaatagggttaaaaagttaggagaggagacagataagtttttacaaggtctcattgacgataaacgtgggcaacaagaaaccggtactacaatgatcgatcatttgcttgtcctccaaaaatctgatattgagtattacactgatcaaatcatcaaaggcatcatactggtttatttcttcttcctttattttttctattaattattagatcttttgttaactttgattataagtaagataaattgtctgatgttattatgttaatgcagataatggtaatagcagggactaacacatcagcagtcactctagaatgggcactttccaatttgcttaaccatcctgacgtaatatctaaagcgagagacgaaatcgataaccgggttggtttagaccggcttatcgaagaagcagatcttagcgagctaccatatctaaagaacattgtccttgagacccttaggctacacccagctacaccattgctagtcccacacatggcatcagaagattgcaagataggatcctacgatatgccacgtggtacaacgttgttggtgaatgcatgggccatacatagggatccaaacacgtgggatgatccggatagctttaaaccagagcggtttgagaaagaagaggaagcacaaaagcttctggcgtttggattaggtagaagagcgtgtcctggatcgggtctggcccaacgaatcgtgggactagctctcgggtcattgatacaatgctttgaatgggagagagttgggaatgtggaagtggatatgaaggaaggagttgggaatactgtacccaaagcgattcctttgaaagctatttgcaaagctcgtccatttctacataagattatttcctaaaattgttgaaactacgaataaaagatgtgtgacatgttaatgcaaatcaatgattctctctacatgtaaaatcttgatggattattatggctatcttaattatttttaataagtgttactagcagatttatagaaaagcaatcgagtattataagaaaagtaaa

SEQ ID NO: 27804 - DNA, 1161 bp, Arabidopsis thaliana landsberg
ttgatccattgattcttattctcaaccactctatttttcttcctttcaatgctcctgaattgcctcaaaggggaggctaggcttgcttcattaacacttctctttctctcatgacttccctttgaggttatgttactgtgttcagcttcagactcattttaaacgttaaaccatctacagctttatcttggttctctctttctttgataatttctctgttttttcttctatggaatctctgaaacaagcttcttctgcttctgggttctgctaccaccaaggcttctcaggtgttctccaagtgtatgttcacaacgcaagaaacatcaacaacatctgcatctacgataaccaagacgtctacgccaaattctctctcacatacaatcctgacgataccatctccaccagaatcatccatagagctggcaaaaaccctgaattcaaccagaagcttatgatcgatgtaactcagatcgatgctcatgctgcagttctcaaatgtgagatctggatgatgagcagagccagacattacatggaagatcagcttcttggtttcgctcttgtcccaatctcagacatcataggtcaagacagtgtaactcaagactacagtctctcctccactgatctcttccattcccctgctggtaccgtgaagctcacgctttccattgttaacccttcttctacttcttcatctaatcccaagattaacaccacttcgatttcttccgaggtcgtgttgcttgaccctcaagtctctgaaacagtagattacacgaggattgagttccctgacatcaatgttgctaacgagaacaaacagatggttacagagtacttcaatgaatccggaaccggttcatttctctgtctcggctcaacacatggaccagaaacggacataacaatggtgtgcttggaagaaaaagagctttatgggaatggaagcttcatggcttcttcttcaacaacaacaagcttaagcgacgaaaagaacacagcagattcaaacgagaaagagaatcgagagataacagaagtatcaagaagaagaagcaaagaaggtgaagaagaagaggaagagaataagatgaatgaagaaacccacatgcagaaacagatagcagagatgtatatgaaaagtatggcaca

SEQ ID NO: 27805 - DNA, 1214 bp, Arabidopsis thaliana landsberg
aagttcaaccactaatatccaccacacacaaaataaaactgcatcttagagaaacaatccacttttgtttattaaggttaaatttatgaaattttcaaaaaacaaagcctatttcatacactcaccacaagctgcttcacaattcatcataattcataagccacgcaaaagaaaataaagtgaaagattccatggcggtaattgtgtggtggctactaacggtggttgtggtggcgtttcactcggcgtcggcggcagtagtagaatcaacgtgggaggttgagtataagtactggtggccggattgtaaagaaggaatcgttatggccatcaacggccagtttccagggccaacgatagacgcagtcgccggagacacggtcattatccacgtcgtcaacaaactctccaccgaaggtgttgttatccattggcacggtatacgtcaggttattcaatcaattctaaatttcttccttctatacaaaaatataagtatgtaatgtgacaagaagcatcaacaaacaaacaaaaaatgtgacaatgagcttattctatacaactatatgtttgattgttttacgactgaattagaaccattactttttattcaacaaaaaaaaaatacaaatgctaaccgttgttctgctgattttcagttttattttttcaatttttttgtgtgtgatgttagagcatcattattggtggtatcattattggtggtatcttaaccaaatttttaagttaagatttgtgaagaaagagctcttatataagagtttttaggtttatatttaaaatttttcttcataaatcttagctaagatttggctaagatactaccgataatagtggtcttatgttgtttctaaggcagagccactactagtattatacagtctgtataattaattcacaaaaaaaattattatcaaaaactaatttgtgatcatggaacagaaagggactccatgggctgatggagcagcaggtgtgacccagtgtcctattaatcctggcgagactttcacttacaagttcattgtcgataaggttactttaaacttgttctatttttatattttatgaatgttaagaaacaacattatttggttaattaattgggaaagaatacggtgtaggcgggaacacatttctaccatggacactacggaatgcaaagatcatcgggactatacggaatgttaata

SEQ ID NO: 27806 - DNA, 1677 bp, Arabidopsis thaliana landsberg
gacattctctgagattgtgggtctgttaaatcctggctcccctggcgatccgagttatgctactgtgtccagggatttatggatgcctgatcagagctgacacgtgtgttacgagtgtgattgtcagtttaccctcatcaatcgtaggcaccattgtcgtcattgtgggagagttttctgtggcaagtgtactgccaactctattccttttgctcccagcgacttgagaactcctcgtgaagactgggagaggatacgtgtttgcaattattgtttcaggcagtgggagcaaggtgatggtggcccacacgtctcaaatatcacggaacttagtacttcaccttcagagacaagtcttcttagctctaagaccagcacaacagccaatagtagtagcttcgctcttggctccatgccgggactgattagtcttaatcaaagggttcatcatggttctgatgtcagcttgcacggagtatcttcaatggagacaagcgtaaccaagcaaggcaaagaaacttcaaggaggagcagcttcattgccacagacgtggaagatccatctcgctttgctttaaataggtactcctttcctctgagttctctttggtctcataggtatgaatgaagctaattagatcttcaaacgagcttaggtcctgtggcctttgaccacgtttcttatgcaattccaaggtagagatcggtcaaaatatttcttcggtatgtgaagtatggaacgggaccttttatttttgagtgagaactaggaaatcagagtactttaacttcactagtgtttgggtaacttatttatcttttcttttcagcatcaggagtgatgatgagtacgacgagtatggtgcataccagactgatattgagacgagtcattctcctcgagctaatgaatattatggtccaatggaatacaatggaatgggcattgatgatgtcccctgtaagcatcttggtggagaaaccgctgaccagaaaagtttaagcggctctccactcattcatcagtgccttgaatctgtgattcgggaaggatcagagcagttccagaagaaaagtgagcatgatggtcgtgacgaatgtgaagcttcttctccagcagatatttcagatgatcaagtggtagaacctgtggatttcgagaacaatggacttttgtgggttccacctgagccagaaaatgaagaagacgagagagaaagtgctttgtttgatgaggaagataacgagggagatgcctcaggtgagtggggatacttacgaccttccactagctttggaagtggagagtaccgtggcgaggatcgaacaactgaagagcacaagaaggctatgaaaaatgttgttgaagggcactttagggctttggtagcacaacttttggaggttgataatctacctatggtcaacgaaggtgatgaagagggctggcttgatataattacatcattatcttgggaggctgcaacgcttctcaagccagatacaagtaaaagtggaggaatggatccaggaggatacgtgaaggttaaatgcatcccttgtggacgtcgcagtgagaggtgacttttttgaaccctttatatgggattttttttaatgtgaatgatgtttgttctagatacagtggtacatttgggttttcaaatagtattcatg

SEQ ID NO: 27807 - DNA, 1631 bp, Arabidopsis thaliana landsberg
  unsure (1)..(1631): unsure at all n locations
tttgtatcaccatatatatacacatatatatatcttttatatttttacaatgtgtacatagtacatacccttcttgagacatttccctcacatgaatccatcttttggttctttacttaattctttttaacgttcacacacattctataaactaataacatattagtcctatgattagccccaccattagattgggtcattgcctcattggcaaaaatatataaatttggttagaatgagaaagtaataaattaaaagttaatatgtaaaaatcggttgaaacttatgaaatttcggagtctacaagatccccaagacttaagaccatgaagaaaaatcacgaaattacatgtaactttagctataaaaaaagaagtctaaatgattataatgattttttctccatttattatatgatgaaaacgcggatctacagaatttaatgtcattccaagatgaaatcgtacgtatgataatacacataaggaaagtgtcattgatttgttgaacgatgtgggctaaatgggctttcccgtgggccgagcaacttatgatcaatctacaagcggtcacgtgaataaatgggcttgaccgtgggccgaggaacttatgattaatctaaaagcggtcacgtgattcccagcggtgagcgcacgttagaatagttcccagttccataatgaggctaaagtgagccgaaccatgtctgagagtcagagagatgagatcataaattaatggagatcttacaaatatggaaaattttaaatacaaaaaatcgaaccaaagaagaagaagcctacggttgttctgttcctttcgatctcaccaaattttcatcttcaccttcaattttgatagattctcttcaccgaaccaaatccgtaaccctagcttcttcttaaattgtagagaaaaagagttaattcgaatctggatgaaattggttttgtctagatggaaatctagatgtgtctgattccgaaatctgagtctgagagatgctaggagcgattcatttgggagtattagcagcttgtttcgtcctcttcgttcccatggcaatggctggttggcatctgagcaggaacaagatgctcttctttagtggcgctttgtttatttctctcgcggtttgtgttcatctcacgccttatttcccttccgtttccgacatcgttgcctctgtttcctctgttgttgtctacgatcatcgtatctcttgtatcaacgaggttaatcagattgtctgggatgttaaaccggtaccgaatccggagnnnnnnnnnnnnnnnnntggctcaacaaagcttgattatttcgtgaagaactgggattggatgaaatcgaggaaagttttgagttgtgagtttcagaaattggataagttcgatgtttcggatttgttgaatggatcgtgggttgttgttgctggtgattctcaggcgagattcgtggctttgtctttgttgaatcttgttttgggttcggattccaaggctatggattcggttagaggggatttgtttaggagacatagtgattacagcattgtggttaaggagattgggatgaagcttgattttgttttgggctccttatgagaaagatttggatgatcttggggtttc

SEQ ID NO: 27808 - DNA, 637 bp, Arabidopsis thaliana landsberg
ttgggcttaccttaccacaaattgacgtttattatagataattttttgatattttggaaatatactgcactagaggagaattgtcaattctgtaataaacaaagatttcgtcaaactcacaagcctgagagttgcataacgtcatatgttttatttaccaatatcagatagattgaagagattatatcaatcgaataacacgacaaaagatatgagatagcatgtagagcactcagtgaataacggagaaacgtgtcatccatctaatggagaagcatgtaaacattttctaaaggtataccctaattttgcatctgagccaagaaatgtttaccttggattatgcacggatggtttaaatccatttggcatgtctggacataattactctttgtggcccgtaatcttgactccgtataatctcccacctgacatgtgcatgaaacaagaatttatgtttctatcagttctcgttcctggtccaaatcatccgaagagaagtctagatatttttcttcaaccattgatagaagagttgaaagatttgtggtttaacggtgtacatgcatatgatatttatacaaggcagaacgttttcttacgaactgggcttatgtggtccataaggattttccag

SEQ ID NO: 27809 - DNA, 1559 bp, Arabidopsis thaliana landsberg
ctgcactctatctggactctgtgttccgcttacgtacgtctatgattttttttgcgtgcttttctttgaaactatcaaatgaatccttagtggccgagctgccaccatatctcagagttacacgtaaaagcgtattgggaaaatttaatattcatgttgtgcgcctcttaacgcatttgtatctacgattttgtctctgttgttgttgcagcatatccgaaaatagcaccaatgaggaaaagtgagagagcttgctgtccaaaaagtgtatatatttttattcaatttttttaatgctacttacaaatgatattgaaaaataaaagaaactagatataaataataaaacaagtggatggaatgatcaaataattgaacaaacaattctccatagttaacacttaacactattcaacttaactgaaattaatagtttgaaagcgtggaggcttttggtgtggaggcactgagagttttctttgcattttattgcaaatattaatatcattatttactaaacatttgttggagagattgttggttatgattgatgagctcatcatcctcggcctccatcagtattcatcaacttgcgaattaaaaatatatacaaaatagcataaccttaatttcgaagacatgtcacatgatctcacacaaaattcttaatcccacaaactaccaccaagttgtatataggtcggcaagtttttttcttttttcaagttaatttcggatgtatgaacgtatgtgcatacactttacagtatggttttgaaacttgaatatcaaaaatttatctatggaaattactccttagcaaatgatatctgagtaacaaagaataatagtattttgtaacacgcacaaaaatatgaactagtggaatatattaaaaacgatgtctccgttacttcgcctatactgaaactcgcttgagttttaacaaattaaaggtaaaaaatatattacgcttcgcacatgcataaaataaaaatgactgcatccagatcatccgaagctctctcggtaaactagcactttagtgtgagatcagcacctaacatttatttgacataggtcaaccttgacccttgaaatgtggaacttggacttttgacctcattttcctcaacctactagaaaaatcgaccggtataaagaagctacatatagcattctattccaattaccaactcgaaagaagaagaagaaaaaagagaaattcttggtcttttctgaatctttgaaaaagaaaatcaataattgtggggaggacaaaaaaagagggtttgtttttggagatgccacttaagcccagcgtcgctgtcaaaaccccctcaattattgaaagtgggtcttctgattcattcatttccaaaacccttatgaatttataaccaaataattcaaaaatgtatatacaattccacaactaacctttttctcaaacaagatacgtttgtttaattaagggaaagattaagacatggaaatttcactgaaacttctaatgcataaacactaccgacttcgtacctaaaacggatcaagaaaca

SEQ ID NO: 27810 - DNA, 2026 bp, Arabidopsis thaliana landsberg
  unsure (1)..(2026): unsure at all n locations
aacaaaagtcacattagacgacatgtgcattggtttacaaatccgattttatttttttcggatctaaaaaaaacctcaaggggcatgtgggatgagttgaatccaaaaaaagcattgtgaatttatgtaacctcaaaacaaagaagaggcaaaatacaaaagaaaacaaagaatttattctctagttctctcactctcgctcaactcttatttccttcttaactttcttcatgaccgatatctttagttagcccctaaacatctgagcccgttcttgatcatccctagctgcgattcttgacgctgacaacgaacagaatccgacctcggtaacagtactatactgtttctgtttctgcttctgctgctgtgattgcttgcaatgcaagatagctccttggatagaattctcaatttcagaactcgaactcgtacttctcttcaaaaactgcaacggacgaaaccctaaactattcgatgatttgttggtagaactcttggcagcttgcctcctcatagaaactgaaaatgatctcctatggcttccgaaaacagaaccattactctgttttttaggtctctctgttttgatctgtccaaaaggctttactcgcgaatacctcaaaaccgaatcttcgtctgcaactctcgcagcggaagacgcgcatgatgactcatcagaacaacttgtcttaccaaagaacgatcttagataagctctcgaagctttaatcttcgttccgagacttgactgcttcatcaatcttagtttcgtggtccaagatttcttcttctcatcgtcctcctccaatgaatctgaatattctaggaagtagtcttcagggttaagctctttactcacttggcaagactctgccggagagacggtgcaggactcgaacggagtgttgctcgtcactggagttgtaaccgttccggtggctaaaggagtgctgtagaattcgtcgtcgaaggtgtaatcttctagaatcttttggaccatttggagacgtggaggtaagtgaagagggagaagcttgcctttgtagaagagttcgtccgcaggggaagtggttttgtctatctcaagaggacaaagatgagacatttggaactcgaactctcgagggtagttgttgctcagagttttacgtacgaggtttgtgaaagaagttacttccatatcaatgtaatcttcttctacactgtcgcatcgctctagataagccgccatacttttttttttatgtttcttctttggggnatgttttagtgattagagatatgagttgagttcagagttggagagttttgtttttatatatgtaagagagagagacagagagagtttagtgttaggtttctgattggtaaagagggtacaactttggaccgtgttgttttctttttaaaattttacttacatatacgttaataaattacatattatatgaacaaggtatattaatagttcaaatgagcttcttggatggaccaccacttaaaacttgtactcaatattttcttagcaaaggttttgccaagattaaatatcctactaatttcttgtactcaaatataagatggatgaagcaaacaagttattttatgacacccttttcttttgtacagctattttgattggctctagaaagttaatgggttcatattaaaaaaaaaaaaaaaagatactgggttcatcatcgtcatcagtggtgattaaaacataaatttatgaaagaacgaatcgggagacaaagtttagaataaaacaaaagtttccgatattattggctgggataatttagttacttattatgtttctaaagatttgtgtatttggatttgttttaatgtggacaaggacgatgatgagagacattaatcttggtagaagcccacgtgtaagataattttctgtcttattggttactcgagaattaaagaactgcgtaaacaataaccaaatatgattaagggtgccctgtatatgattaacataaaagtgaggatcaacaatatgatt

SEQ ID NO: 27811 - DNA, 1530 bp, Arabidopsis thaliana landsberg
tcatggcgaatgtaagatcgcatgatgttgttccataagaaagcgatcggatattgatcgaggattcgtgaacggaagatgtcaccatggatccgacgaacacgagctaggctagtgcagtttgataacagagtagctaagagtttgtttcgatcttgaggcgaaagaggcgtaaccgaggaagatgatgtagtgacgaaatgattcaaacggtgaaagatcgtgaagtgatttgttctcttagtaccatgaacatgaagcttggagataagaccagagaagaacatgtgtcttttttgttgttgtcctgattcaaaactaagattcttaagtacacaaagttgtaacagtgaaaaagaaactaaaataagctcaaaagatctgatattatgaagctgaaagattgtattcgagtagtttaagagactcacaacaacataaatactgataatccaaagcaaactgttttaacagatccaaaataacaagttatatattgaaatcaaagatcagttactgagctttttctttgtcttgacttttaacgccggtcactgcgttcgaaattgatcttggttcgaccagaaccgccgtggtcatcgtcccttgaagagctaccaccaccgccacttgctctcatagttccaccagatccgatcttgtccaaaggtttcttacccttctttaaatcagaaacccacttctcaagaccgaaaggatcttgttcctcttccttctcaaactcaacaggtcggtctctcttactacccaccctctctgaagcccctgtgaaagctttgtcaggcttaaacctctcagtattcttgatcttatcgagctgctcatcagcgtttccatacatttcttcatcgttatccttctttggcttgtacaaagtcgaaagagttggttgtgcagtgaacaagcctttgtcgtataagttgtattggtcatcagcagcgaaaccagagtccattcctttgtcttggttaaacagacgttgatcatacataacttcaccaccaccttttcctccagtagatgccattccaagagcaactttctcactgatgtcacggtataatgtctaaggtgatcttgctcttcttccccatggcagcatctttggcatccaaccttctctccctctctctttccctgcgacgctcttctcgtatcatttctctctgaatccttttttccctctcctccctcgtctcttgaggctcttccctttctctttcccttcctctatcctggtcatagttgtcataatcacctcttgggtcaacactttcactcctacccctgtcagatgagacaggcatactcatagcagcgccggttctttcggagcgagctttttgggcaagagccctcaattcctgctctttcctttccttgtccttcatcaccatctcattttgcaccttggaacgcattgaagcagcctatattgcatatgctcagctacatagagggcctctgataacttggcaaagttatcattgatctgaacgtaatgtaggc

SEQ ID NO: 27812 - DNA, 1887 bp, Arabidopsis thaliana landsberg
tgagctatatcaaaagtccaaacttaaaaacggtcaggcttttacttagtccatgcttcacattcctaattgcttatctagaatgcagcaaataatgatcataaaatttgaaaaaagcgttatagaaaaaactccaaagagaacacaaatgaccacatagatattatcatcacaaccccatgaaactgtacatctaaaacattactgaaatgcaaaaaaatatccaaaacaatatttaagtatcacaaaacatcatttaaaataatactctagaaaatagagaataaaagtaaaaatccaaatcaaaccggagtaggtgtagtattagcaccagaaggagaaggagatcgtggctcaactctcctaagctgaatggctttgtgagactcatcatcatcaaagtacatataagcaaaaccaccgtgcctggtcatatccataccggccatctcatcctcggacgatatccgcaacaatttcattttcttgaggatgaagaaaagtgttcccatggtcgcacttacccaacccgtgatcacaatgatctgaatcagctgagctccaagtagttttcctccaccgcccataaacaaaccgtgtggccttccgggtttgttgccgtaaatctggttcaagtacttttcttgagcgaagagagccgtgaatattagtccccacgcaccgcaaccaccgtgtagttgtgctgcctcaagagggtcgtcgtatttgagcttctcagcgagcttgttgcatccgaggaggactagggccgccacgaacccgcagatgatcgcagcccatggctcaacgacagagcagccaccagttatggctgcaaaccctccgaggaggccgctgcatacatcagtgacgttccaatgtcccgagagtagacgtttcccaaatagggttgtcagcgccgcggtgcagccagctaacgttgttgtgacagctgtccgtccgaccgcgctccactggccgttgtatgtgcctgtctcgtacgtgactaggatcttgttgaaggaggcggggttaaatccgtaccatccaaaccagaggaggaatgttccaaggacaacaagtgacgccgagtggccacgaagagcgatggcacggcctccgttatcgaaccggccaagtcgtggaccttcgatgagcgcaccccagagtccagcgatacctccgaccatatgaacaacaccggacccagcgaaatctatcgctccggtgctgaaaagcaaatctccatcggtacggaacgggctggcccatccatcaactgaccagaaccagtgagagacgaccgggtaaacaaacccggttaagaaagaggaatagattaggtaagccacgaactgtgtccgttcagcgatcgagccacttgtgattccagccgcagcgattgcaaaggcccattggtagagaaagttggagtagtcagcagaggccgtggggatgtctttgagaccaaagtagtgtttaccgatgaaaccattggacggagatccaaaggcaaaggcgtagccaaacagataatagaagagaccaccggctgcagcgtcaaggacgttggtaagcatgatgttcatagtattcttggctctcacggaaccggcacagagcatagcgaagccaagctgcatagagaagacaaggtaggcggagaagaggaggtaagtgttgtctatagcgaaagcggtgtcgatgaatttgttgttgacgtcgcctagctggccacatatgtagttggccgccgccgtggcattatgacccaacatgacggcgagatcggtggccgagcaagacatgttgagagtttagagaagaagatgaaacagagaggctgagaaagaaagtgtcttggttctctgtctatataaaagatag

SEQ ID NO: 27813 - DNA, 1790 bp, Arabidopsis thaliana landsberg
cctcgcctagtcccgatctctacattaaccacagtccaccactctgatccactgcgtctacttgataagaattctcttagcttaagccatgataaattcttctcgccctatcaccacctgcgtgagtttcaaaaatagcgagaatgtttgtgctaaacttcttcagaatgtaacaaatcgacctgcggaaagtgggtttattggcccccctacaattccagaatagacaattcattgataaattccaaaacaagattagaactagcggggcagactattattctgccatctgacccaccaccaccaccttctcctctggattctcgagcatgagtactccgccattcgacccaataccatctggatccggttgcgaaatctgatctccttccactccatcacgatgcgttttgaccctaaccatatgctgtccaatttcactcgtgaatctacctcctagtttgctcaagctcaccccctcgactctcaatctttttcccgacaagaccaattcactttctcttcgtgtcgggccatacaccagacctctggtcgggcgattaattttacttttttttaattttggcctattcggcccattctgtttacctgagcccatccctttcactttcggcccatctctggccctacttttaccattatccaacgacccaactgtccttccacctatgtcttgtgctgcacgtttaccatttcctctttgagctctagcgttgaaatttttcatatctgctcctgattgaatattcacttccctcaagtccggaataatcaaatcttcctctaatcctccaaaactattagataaggcaatattctcttgaacgtttatttttgggattttcttaagaaatcttcccgaattgccacccgagcttcccgctgtaactaccaagttttttactagagcagccatcctactcgcctatcttcttaccgtcgtaaaaccatcttcatcatgcactccacccttatatatctcaacaccattttttttaggtacctccgcattattcgatggcatcgctctgctttcctcatggactctctgggaacacatgtgaatcaaatgtccatacatcccacaacccgaacatatattcgttagtccctcataagcaacataatacctttcaccgttcaccattatcgtcccttttaaaggcttagatagattcacctctacacatactcttgcaaatcttcccctttcaaattataaggtcgttaagttcaccttaatcggtttccctaacccctttgcgatacccatcaagatggacttatgatacaagttcaccggaatgttgattacctaacccagacaggtgtagtgatgatatcattcctcataggatcaaattccggcgcccaagcttgtacggtaagctagctcccaaacactctccatggacctccagtcaaggctgccaagtactcttcctccaactcaaagcggatcataaaacactgacgaggaagatccatcacatacatggcccctcttggtttccacagttccctcaacttcctattcaacaccgcaatcgacatgctttttccaaggacttttactatcatatactgcccccacaaaccgttcatcgcctccagaacctcttctccgatagtaaccaccggttccccaccttctccatcacgaaactcaagttgcatccttgctgagacaaactcatcatccaaaatcccaccaacagcactaccaaccacctttcaaacccacgaaccaacaacgtctggtgggtccc

SEQ ID NO: 27814 - DNA, 2349 bp, Arabidopsis thaliana landsberg
cagagtgctcttccatccaattgggaagctgggaaaattttcgactccggtgtttaaatcactgacattgctcaagaaggttgtgatccttgcgatgctcacatctggaactaagttatttagtggcacacaaacaaacatctttcataggtttatatataatgtgtgacagaggttattaatgaacatagttaaagaatgcttaatctaataattctcatgattctacattgattaaacaagagaacattgagccattaacaaccagaacttttgattcgaagacagattcataagattactttacaacggagaatgataattaaagcttaataaaacgaaagagaaaccctaacacaagttatgacaacatcagaatcaaattcagagtatacaaaccctaatttactaattcaagagcttgtgaatttggtaacagccttggttccttcagaaacagcgtgtttagcgagctcaccaggaagaacgagtctaacagcagtctgaatctcccgagaagtaatcgtcggcttcttgttatacctagcgagctttgaagattccgatgccaatttctcgaagatgtcgttgatgaaagtgttcataatacccatagccttgcttgaaataccaatatctggatgaacttgtttcagaaccttgaagatgtagatcttgtaagtctcgacactcttcttcttcatctttttcttcttgtcgcctccggcaccagcttccttcgggagcttctttccggcctttggtttcttctccgccggagctttctcggcttttgatttctcctccaccggcttctcggaagctggtttcttctcagcgggcttcttctctgctttcggcgccattgatacggtttttctcgaggtttctaggtttaacgagatctgagattgagtaggtttaatcgctttggattgcttgatgacctagaaaaaattgagatattgcttttatatagatcctatggagtgatatgattggatacattaagttgacgcggatcgatatctgtaccgtttgatctgctttttaatagaatgatatcgacggttgaaaaggaatcttgaaaaggaggaaagctctcacacgtgacggttcttattggatacatttggtggccaggactattgacgtgtcccagattggcgctatctagtgaaattttccattcccgccatcctcgaaaaattctgcatcggcccatgtattgtaatgagcccagttgtaggcccaattataaccagtgagatcgacccgacccgtccgggtccccagatatcggttcgttgttgcgacactaacacagaccaatgctggttctgattttcacggtggacctctttgatgaagctcccttgcacgattcgatcaataacaagctctcattctcgcaacagctttagaaatgtgagctctgtgaacgattaagcacaagaagaatgtagaatcgctgaagataagcaattcgtcgatgctgtcaaaagaatcgtacgaggataacggagctgggagatcgcattgagcagtgagctagtctcgagaagattgaagactgttcatgttgaagagattctgattggaaccattgatgatcccaaattgggtttgaggtttttcaatttcctcggtttgcatcgaggattcgaccattccacggcgtcgttttgtattttgatccatgctctggtcaaagctaatctcttctggcctgcttcatcactgttgcagacgcttctgcttcgtgcgctgaagccaagtgacgtttttaatgtgctttttagttgttatgaaaaatgtaagcttagttcaagctcgagttttgatttgttgattcagcattatgtacgaagtaggagagttctagatggagttttggtgtttaagatgatgataacgaaagttagtttactgcctgaagtgagaactttgagtgctcttttacatgggttggttaagtttaggcattttggtttggcaatggagttgttcaacgatatggtcagcgtggggattcgtcctgatgtttacatttacacaggagttatacgtagcttgtgtgagttgaaagatctctctcgagctaaagaaatgattgctcatatggaggcaacaggatgtgatgtgaatatagttccatataatgtgttgatagatgggctttgtaagaagcagaaggtttgggaggctgttgggataaagaaggatttagctggaaaagatctgaaaccagatgctgtgacatattgtacattagtctacgggttatgtaaagtgcaagaatttgagatcggattggagatgatggatgagatgtgtatgtttgaggtt

SEQ ID NO: 27815 - DNA, 772 bp, Arabidopsis thaliana landsberg
cgatctagaccgtccgcacaacgatcctttagtcattacactgttcatcgttgatttcaacgtcgaacgagtcctaggggacacgggaagcacactggacatcattttccttacaactctgcgagaaatgaaggtcgatatggcgcaaatcgtaccgactccacgaacagtgctcggattctctggggaaaccactatgactctcgggaccatcaaattaccagtccaagccaaaggggtaacaaaaatcgtcgatttctctgttaccgaccagccgaccgtgtacaacgcaattatcggcacaccatggttaaatcaattccgagctttcgcctcgacgtatcatctctacctgaaatttcccacatgcgacagcgtgaaaaccatctggggaaatcagaataatgctcgcatctgcttcatggcagcacacaagctcaggaaccccgtcactgaatcgacggccgacgcgaatcataagaaggctaagcttggccgagctgaagagaagtcaatttccgagcagttatagcagttaaggatcgaggaggctcgggaattcgcaacaccaactcccgatccggtaatctccatctgccttgacgacgaaaagccagagcgatgcgtagaaatcggcggagatctaggagaagagttaacagctgaactcaccactttcctcaaaaaccacctcaatacgttcgcctggtacccagaagatatacccagagtaagtgttgacatcgtattgcacgagctcaacatcgacgcg

SEQ ID NO: 27816 - DNA, 1167 bp, Arabidopsis thaliana landsberg
tgagctccgataacattacacgtctagagattacgttgagaatgtgtaacagcctggaaggaacagcagagaagcgtttggtgatctttggcacgagatcttccatggagatatcatcatgaaatccaaggtatgacacagagagccatttagttaatactaattcaacaaactctggcattgattgtttgaacgccagcattgcagctaccatatcccaaagaactagaggcttattcaaatagttgaattctttcaacgaccagagaatattagattcccaatttgcgaattcattctttgagaaacccagaatagcttcggttaccgtctctgaagaatcttctgactcaccagattgttgtgcaccattccagaggaattctacagcagccttctgcgacctggaagcaagaaggaatgaacagtcagcttttgcaaggagcaggacgcagaaacagttctcaatgaatgaatgaatattacctggcttggtacattggattcaagagttcaacgttgaagttgcggacctgcaaaatttcaatgagaagtctaagttttctaattctgaaaagagatagtttaaagtcacagcaaaccaggtttcggggaagatcagaccaaagcaacagcaaggtttccaggtgacaatgccataccaaggcatgatagaaaatcatcaggaagctgtagaaaattttcattgtttgtaaagataaactagaggaagggataaacaaagagacaagattaaaaacatgacatagtgacgtacatcagtcgtgctactgagaccaggagtgtttgcaggaattggcacttcagagatggtattctcacataaaacccagctccggacataattatcctgcatattacaaagagtaatgcatcttaaaagataagaagaatatgacagttgttgatagatcacaatgtagtttttttgtctctcagaagacaagcattacaaagctgtttttacagagaagaaatataatacctgactgcaactgtacaaacaacggccatcatatgaccaagctagacctgtaacctaaaaagagtgccatatgtatcaataaatcgaacacgtatattttattttataaaaggtttaaagtaacagaataatgacttaccacttggttatgagcattagtt

SEQ ID NO: 27817 - DNA, 3653 bp, Arabidopsis thaliana landsberg
catctcccttgagacattcttagaaaaaaagattttggacttctccaagctaaccttttggcccgacgcagcacaaaacctttccagcacgcccctgatcacccgaatttgttcaacagaagcctctgcaaataaaatcagatcatctgcaaaacagatgtgtgagagctttggcccagtctgagatattttaattggtttccatttcttccctgcaatggaagcttttatcaaatgacacaaccgctccaaacacagtacaaacagatatggtgacaatggatctccctgccgcagcccacgcaacggattaaacgcatccgttcgctcaccattccacaataaccgcatcgaaggaccttctacacattttataatccatctcacccaattctctgacaaacctgccgtaattaatttatcttccaagaaatcccatctgatgcggtcataggctttttccacgtcaagtttcagcagcatccactccttcactccttttttacgccgcatagagtgcactacttcctgaaccactacgatgttatccgtgcttaatctgccagggataaaacttgtttgtgccggcccactgagcttcgtaataacacctttcagccttcctaccatcactttggtaatggttttaaacaggacattgcataaactaataggacgaaactgtgttatattctccggcttaaacactttcgctataagcaccactaaagcatcattaatctccggaggaagataaccggttctaaaaaactccagcacaaactttactactgatgcacccaccccatcccagccccgctgatagaagacgggttggaaccgtcaggacaaggagacttgtacttgcccatactccgaatcgcactttccacttttaaaggcgagaaaggttttgtcagagaactcaaatcagcctctgagagagctgtgaaatcctcctgaggtagttgttccaccacaacgtccaggtcatccagtgaatagatacgtttataataatcaatggcatgcgtttccagctcttgcgcattcgataaccaacgaccatcactatcctgtaacatttcgttcgattcctgcgtctcctgatgattgtagatgtgtggaagaacttcgtatttcgatccccatgaacaaaccacttctctcttgatttctgcatccaaactacctccttcttctccagaacaacgtcaaaatcctttagcaactcctcttctttttttaaaagatcatcggattggtggagatcaagcagctcatgcactctcttaatgtcccccaacagtttctctttttttttccggatatctccgaagacttccttattccattgctgtaaggtttgctacaaacctttaagcgcctcaggagtagagatatccttattccacgatgtaagcagtagctccttaaagcccggatgcgaaagccaggctgcttcaaagcgaaacggcctccttcccctattaccgcttacctccggagtcaactgcacgtagagaggggcatggtctgatgcaaggaaaggcaaatgcagcacactcgcttcctgccacttcaaacgagcgtgaacacagcacaggaccctatccaatcgttttgccacaaagaaacgttcttctctacctcttttccaagtaaacttgttccctttaaaacccaaatcaatcagagagtgatcattaatccattcgccaaatgccggagagtcactggacaaacgaccatttcctccagaccgttcatccaaccgcactattgtgttgaagtcccccccaatcaccacaggtccatccataccacggatgacatctcctaacctgtcccaaagtccacttcttctactggcgatcggagcagcgtaaacaacaacgaaattgacactatcctccccattaacaactttcgcatgaatgaactggtcagttgagtctactactgaaacttcccctattcccattctccacaacaaccataacccgccactatgaccaaccgcatcgactcgaaaggagttctcaaagcctaaaccttgacagatccgactagcttgatcccctccagcatgagtttcaaagatagctaaaacatcagtaatatacttcttcagaatataacggattgagcgtctaaattgaggtttatttgccccccgacaattccacaataagcaattcatgattatcttgcaaatatcaataagaagcaccggggagagctgctatgcagatcgagacccagtattcgtcgttggcgatctctcatgggtgacatccccagatcccaacgtaatcgatcgcagctccaacgcatgactatccatctctgccggtggcctctcatgggtgacaaccccagcccccgacaggaccaaattcgaccccattatgactctgttaggactcgccggcggcctctcatgggtgacaaccccaggtcccggcgaacgtgatttctgcccaactaaatcactctctgctcccgtcggcgatctctcttgggcgacaaccccagatcccgatcggactattccctgacccatacactcctgctcgttaagcgccgtaacaccgacctccattgctgtagcagcacctccatcaaccaccgttctggtcccaaaaaagagttaatacccattctgagtgcatttgcatatccaaataaattataggacatttttcatacctaaaccgtatctttatttgaattttatacttaaatttaagaaaacgtatttttttgcaaaacaaaggttccgaacccacgatctctttgtcaatatacgggatgttaaaccatttcgtccaacaaatttcactggtatatgccaaacattatccatagacaataatgggcataacatggaatagattgtgagaccaaaagggataacgcggacatgaaggttgagttggttcacgttgaatttgaatgagtgcttttcttttggttggtgatgcaattcaccatctctccgtctcccctaagttgtaagaatcatgattgattccatttccatcgttcatttgtttccatatattgatcagaaaatcaaaacaaataggtagtttaaactaccattaaaaagggattttgtgtgtgtttgttgcttttgggacctatcagattgtgtttctggctgtagactttagagacaattagtgtgtttttctgcaacttgaaacgcccctatattgctagcatttgtttactgggagagttgactcaaaccgaaattatcaatccttaaatccataactttgaacaatatcaaaaatagttaaagttaagttaattagagttttttaattgccgcttgattacaactttttggaacacattccggtttgcaatcttcaaaactctcgagatatctaagaattttgtaaattatgattttatatgcatatggaagcctttaggattaccaatcacctcagcttttgtaaattacaatatgattttatataaatattgtaaaagagacatttaaaaaaaaatcctatataatgataattaaaaatcagataacggtactagaaagtatacgtagtacatcataaattggtgataccgttttggtatataatcaatttttattagttttgatatttgtagtcatgctt

SEQ ID NO: 27818 - DNA, 1588 bp, Arabidopsis thaliana landsberg
  unsure (1)..(1588): unsure at all n locations
aaaaatgattagggaaggaactcacaatccttcccataccttatatatgatacatcggaacatcaatctctcgtcttcgtttccgacgagagtaaaagtgaaaggagcaaacttgttaccatcgccttcgtagaacttgttctggtactccacccagtgaagnnnnnnnnnnnnnnnnnnnnnnnnnnatgtctccatcacaagaagcactcccacagtcgcaaatatgaagacgagaattccaacgatccagatgaagacattgttgaaactgtttggggtcagatagagattgttattaacaccttctacagcgtattagttgacatttgcatacggaggctaaaagattgtagatgcatttacttacccccaagccataagaaggaccttctcatagaagactgacgacaactccgagtgggcgagactgaataggaatcccagcaaagcataaagattagtcacgaaatgcgcaaaccaatacttcgacattaagccatcaagaaccaatgaattcaacagaatactactgctagatgatattgacaagtgctagttttggtaggactatctggtagatgacaatcaggactatttgaaagcaagtagtattttgtacctgagagcccagagacgaagataagaagcagtgttggaaacagctccaagcacaaactcaatggtgtgaatgagttggtgcacaaagatttcgctgaattcaaactcttcgtgtccatgtcctcccccatttgtttctacttgaagactctcatctgtctcgtcaagctgtgcatatgacagtccttgatgtctctggagaaaacataaatcacctttcagtaacggtcagcacaaatttcaatatcaaagcttttaagtatatcgacgagggcagggactcacagcttcatgttgttttttcaggatgaatggctttggcaacaacatccacggcacagaaaccagagccagaaagaggaatgtgagctggaataggaaaggaattagatgagactaaggcatatgatttttgatacagagagagtacatcgttaggtatcaatgcaaacctgtactattttctggttagggaacagctgattctctcctaaatcatccatagggctcagaaacatgtagatcattacatgatacaagtctgcttgagatccagtgcaccacttgatgatgatgagcagtgaaaggtaaccaaataagctggtgagaaatattatccgaaagtataaactgatacctgaagacacatcacatagacataatcgattccgggaggcttaaaaacataaatgacttcagaaagtttggatgataaatgacaaattacataaaccttacatgcaatgaaaagccgaaaaagcggtcaacaaaaaaaattaactctagtccaagaatcatttgaacattgactagctgaatagacatatttatcttaagagagaataggtagggcatttctgtactactgtcacgcaaactattatcgtactccaaaagggtatggatcacggctcttgatttaaaccaaccaggttagcattcccggataaaaagtgatacgcatatc

SEQ ID NO: 27819 - DNA, 3485 bp, Arabidopsis thaliana landsberg
tagcaaaataaaatagtagtttttatttgaaaaaggctccgtattttgcttcagttactgatagacggaaagtgcagtaacgtctgcgagagtggatgatatagaaacttattgtattttgtgggtgatgagtgagtgaggcactcaataatcaatcagtacaacgtgtgtaatcatggttaagggagtaataagaattagggttccttactctcgttgttatcaagttacccgattgaaaccacttgtgcatggtcatgatggatgtgcagttttcctcatggttggaagctgtgtacgaggttgtagccatattgtcggttgtgttcaacatgtaaaaagatcgcttcaatctaatttgagttgctattcagacgcatagaagccaaaaataaaatcttatcgatctcaaagtggaatcaatgctctaatgcaagccaatggagccaaaaaaattcaacttagaatttgtagaccagtctagttacagagctagtttgcaagttctcatcagccaaattctaaataaaaaaagaaactacactctcattcctttatttacagcaaaacaaagaccaacatatccacacaccaaactgtttgattcacatcacacccaaatacaaaaaaagagaattctttcaaaattgcaaggtaaaaaaaagaggtgcaaatgtatatattactaaactagagaagcctcctcctgaaggttctggtagttgattgataagtacgaacgagaagaccgacaccaatcccaagaccaacacagacaccaatctctttgtaattcgtgtactctgttgcttgcagacaaaaggaatgatacttactgaaaaaggaatgatgatttctaaatccatgtggggtgaggaaacaatggttgaacatctgaggaggaagacgaagccacaatactaggggctggagcagtaacataaatggtctgtgaatcatctatgtttatcatagtcattccttcttcctcatcatcagcaccatcgtcattttcaatatttaccaatgaatcctcttgagacgcaagtatcttttccaagtcggtaaacacttttctcatacatggccgcttctttcccttagaattcaaacatctccttgctagatttgccactgccattacttgttccggtttgcagccatctcttattcgagcatccatgatctcaaagaatctgttctctttcatagcaactctgaaatgatccgctagacctcttatttcttgagaattcgaaacggttattacaggcttctctcctgtaataagctcaacgaggactacgccaaagctataaacatcactcttatcaatatatttgctagacccgtagtactctggatccacatatccaactgtacctgaaataactgttgtccagtgagtatgatctattgttactgatcttgaagttccgaaatcagacaccttaacctgatatttctcatccagtagtatgttggtagtcttgatatctctgtggtatataggaaaagatgcagccgagtgtaggtacgaaagtgctcctgcaatctctattgcaatgtgaaggcgcacttcccatgtcatgatgtaatcatcacattcatctcgaagacgcttgcataagtcaccgttcggaacaaactcataaaccaggactggaacttccgtctcaaggcaacatcccaagagtttaacaatgtttctatggttgatctgcgctagaacaacaacttcattgataaactcttctaccttgtcttcatccatggctttcgaccttttcactgcgacgattctaccatcaacgagcatacctttgtaaacagtaccttgacctccttgcccaagaaccctattcgtgttaaagttatcagtagctttctccagactcgatcgagctaaatatctttgacatctctacattgccttcttttctagctaactgatgttttaacagcatccctccattacgcctgaagaacactctcattcgactgctcctcctctgcttcttgatgaacttggacaacccgaaaattcgaaaggcgaaaagcaacagtgctgaacctataagaacacctgcaccaccaaaaaaccaaacagtaaataacagaacgttttgcaagacgctcaagatagtaataaaatccagttcaattttaccttgaatcacccgcttgagctgctctggtttcttgggctggcagtcaaaccaaccgggcagattcacacagctttgatctttacactggttgcgtcctatatctagtttacattcatccacgtctgcaaatttgtttcataattagcgacaatcttatatcaggccacaagatatgataacgttcagaagaacaccaatatcttacctacacaaccacctggaaggaacggattccctttataacctggggagttacagtagcagtccctatagctgaatccagaaaagtagccgtatgagcaactacacctcgtatcggaagtgtacggtgttgtatctgacgcatttttacaacttatgggttgtgtatcacgagaatcggaagtatcaaagaaccatccaagctcgaccaccgcgtatccatgaccatgaaacttttctggctctgtaacatttaaacttgaatacttgtcgctcgtcaaaaacgcaactctgcatcctccttctcctgttgtgttgttaccttgagggatctctatatccacactgattacttgcggctgcccttctggtatcctcgtctggcaacatttataaccattgcagattttgtttcttccttcttggctgctactgtttctctcgttacaactcgactcacaactggtgatctgcgatgtaatacccgccataacagccttgaatttgcaaccaaccgccacgagtaggttcttgtccgtgaggaaataggggctgccttggccagcaacgtttaaaggcggcggtgtaagtggctgagatgttcctgtagaacagccggaggaagttacgggagctttgatgtggacaactccattgagagagatgttcaccaattctctgttgatccttgagaggaacggaacagagttgtgctgttacagtcaacctcgtccacgggttagatagcaatctttcccaccgatgccaaacgggaaaggaattgatatttctccgcagactctgttacaccgatctggaggttgtcttgctgatgagacgccattgatgaacagagataggacagagatcgctagtggaatgcattgacggttgtgagtctctgtcttcatactgatcttgttcttgttctctcaacttgccagctctatctgatcttttgattctagtaatgttgtttaatgaagggagaaaacaaaaatcaagactctgcatagacgacaatgtcagaaatgagataagatggatgatgcgtgaaaagagatgcaaaacaatgttgaccaaaatatagtacttattaagagtcaacaaatt

SEQ ID NO: 27820 - DNA, 580 bp, Arabidopsis thaliana landsberg
aacgcatcctgcgtcaaaatacttaaattcctcagaccttacatcaaagcaaatgatcacacaagacggtacaccaagagtctgagctaagtaatacaaaactccattgatacatattccttcactcaaagaacgatcatatgcaggacaactaatgatattactcctccagctcagttcctcagttcctaatgtcagaatctcatgatgttccctttgatcagaaaatggataagcctcagacaataccttgaattgcttaccaatgggatcaaaccctagaaagcctcgagcatttttgtacctcatcagatcaggtaagctctcatacattcctgtggtagggttacaaatcacaggcgatgcatcttttgagagccacaaatcagggaaacagagcatacctgagacatagctacaaatgaatcggcttacgtctcctgagaattttgtatgataatccaaatgagaagacttctcatatcgattctgtggctgcggcgacgagacgaagagccactcaccatttcgttcggcagcaaacagcatacgtggacgatacaggatctgtcaggaagag

SEQ ID NO: 27821 - DNA, 1466 bp, Arabidopsis thaliana landsberg
tctggacaggtctctctcagttctaatttttattgctttgtttttgccattccatttgatgagattgtgtgtgtgtttggcgctgtcaatttcatcaagcaatccaatgttgctcatagaatccttattttgtatttgtgttaccactcttatggagaaatcaaattaaaggttaacactttatactttctatcactcctaaatatcttatcaactttaactcttttttttctgattcatataggcaagcatggaagaagatccgttgatctgtgttgatgtcatcaagattccactgctctactgtgcaactcttaagctgcaaaatatgctaacttgaaacctctttgctctcaaaagaggtaaatttgtctcctttgtgtcactaggctctatctcccttgacccttgtgataaattgaacaagcgggtacttaacgagataaagttaacattatagacaaagacagcgacaacagacaacttgctacgttttctttcttcattgctaaagcattatctcactattttgcctagttttagtataagcatctttgattcttgttaagaaaacatatcaacttttagattataatttttaccaaaaaaaacttttaaattataataatacaaaaaggagtttgttagtgttagtatggtatagcttttgcaagaatgatctatgtataagttgggatatttcaactatataatgtgggggtatgtctctaattagatatcattctgtgtctctgctgtaatgagcagagtaaaaagaatatgaagtgacaaactaagaaaaatttgtatgtgttatgttgttttttggctttgcagccacaagtactgctaaggcgtttccacttgattttccttggtcgttggccgcaataaactaggcctaaaccctccttctagcaacttttccacttcctcaaactgaagccctttggtctcaggcacaagcagccagatgaagaacagcccgactgcggatgaccctgcaaatagaaggaatgttcccgatgacccgactgcgttcgtcaatgtcaggaacgtctcactcactacgagatttgacatccagtttgagactgcagcgattcctcccgcgagcccttgtaccgaaaagatagatctctgagttgacaatccatggaactgtgcccataccgggcgcgtacacaaagatgtaaaggccaggaagacaatggccaggtacccgaacttgctggggcatccgtctttgaagaaggttctgcctttcgagtggcacaatgccttcatatcagcagactgaacaatgcatgctccaagtgcgtactgtgacaaaacacatataaccccaacatgagtcttaattcatctagccagtactgttttggtgtgtgtgttttgagtaaagagactttattacctcctgtgctccgtggagcaaatccgatcgatgagaccttatacaattc

SEQ ID NO: 27822 - DNA, 1675 bp, Arabidopsis thaliana landsberg
aataaaatacaaaagacgaaagggtcagtagaaaacgacgtgagtggttccttggcataacccaaaaagcaaaataataaatcagcaaagaataaaaagacaaaattcctaaaatcaataataatttatacaataaaacgaatttaggaagtttcactggtgaagtggttttcttcacccactgatttctattgtaaatctctctccctctatatatgtgattcatataagtattattatttgatagagaagctaagtgtgtgtctctttagtgctctctgttttcttctgcttatgaaaaaacttcatggcgaattttgaggatatggaagagaatcagtggggatgttttgttttcttttctctttctcagttcatcgaaactataacccactaaacatacaaaaccaaattatttataaaaagcaaaagcaaacaaaaacaaataaacggatcaatttctatcttttgtttgtttcttcttcttttctccaatctctagtgtaacgtttcatgttacaacacttgataaataaaatattttaggaagaaagtgcgagaaactcgggagttatacaaaaaaataacatttttgtagaaaaaaagctctcgtcttttcagttacttttctcttttgtcacactttcatatttttttctctaatcatggaggcaacagaattgcattagcttcattttctctcatacttccacaacctgtaactttctgatcttccaggttagttcacacaattttgcatgattgagttacaaagttatgatttttatgtgttattgagttacatgttatgatctttttgtgtaattgttataaagttttgattgttataaagttttgatcttttttgtgtgtgtgtgtgattgagcagtgaattatgctaaagaagagatcaagaagcaagcaagctttaatggcggaaacaaaccagagtcagaatcagaaacagagtaaaacgacgccgtttccgaggctcttcacagcttttagtagctttaaaagcttcactgaaaacgacgccgtcgcgagtccaacttcaattctcgacaccaaacctttctctgttttgaaaaacccatttggatccgataacccgaaaacccaagaacccgaaacccgtctcaaactcgaacccaaaagaatcggactcgccattgtcgattctcttatccaagacgaaacacccgaacccggaccgagatccgggacaattctattcgggtctcagcttcggatccgggtcccggattctccgatttcctcgtcggatttcgggatcaaaacgaggaattctcaaccggagacgaagaaaccgggttccgagtcggggtcttgggtctcccagaatcatctccggctatttctcggcgagcgatatggagttatcggaggattacacatgcgtgacgtgtcacgggcctaacccgagaaccagtcatatattcgataactgtatcgttgagagccaacccggcgtcgttttcttccggagctccgacccggttaatgaatcggattcggattattccccacccgacagttttctcagttgttgctgtaactgtaagaagagtcttgggcctcgtgatgacattttcatgtacaggtttggcttattttcatatttttacatttcaattaaatggtgacatttaca

SEQ ID NO: 27823 - DNA, 1184 bp, Arabidopsis thaliana landsberg
  unsure (1)..(1184): unsure at all n locations
gttgattaaggatttgcagttgcacggttttgaatttgaaaacggagttagaggaagctcgtaattcaaatgtagagcttgagttgaataataggaagctttctcaggatcttgtttcagctgaagctaagatctcatctctttcttctaacgacaaggtatgaagaatcttactgttgaattgacttagtgtgactacggaattaagattgcttttgattctgcttctgcacatagtttaggcttatgataaggttataatctctcaagtgtttttggttgaatcagccagctaaagaacatcaaaacagcagattcaaagatatccagaggttaatagctagcaaattagagcaatccaaggttaagaaggaggtagcagtagagtcatcaagattatctccaccatcaccttctccttcaagattactgccaacaccgccaacgccgccattgccgaagtttttggtgtctccagctagcagtttaggtaaaagagatgaaacttcttcaccctttgcaccaccaacaccaccgtcttcgtcaccaccaccaccacctagacctcttgctaaagcagctcgtgctcagaagtctcctccagtttcacagctatttcagttgttgaataagcaagataatagtagaaacctttctcagtctgttaatgggaataagtctcaagttaacagtgctcacaacagtatagtcggagaaattcaaaaccgttctgcgcatctcatcgctgtaagcaaccaaattttcttttatggagtctgtttactttaacctgagtcttagctaatctcatctgacactgttgagctccattttcttcatcagataaaagctgatatagagacaaaaggggattttatcaatgatcttatccagaaagttctgaccacttgtttttcggatatggaagatgtcatgaaatttgtggattggcttgataaagaactggcaactctggtaactcctaattcctctttcaacatttttattacacaagtgacaagtttttgtaaactcggccatgtttttggtgtactnggacgaaagtgtatcacttataaaatatataaatgatcgcttctccacaatgagttttgcatcatacttatcttacattgtatgtgaattcctctttgcctattgccttacaggctgatgagcgtgct

SEQ ID NO: 27824 - DNA, 1809 bp, Arabidopsis thaliana landsberg
agttgcagaacggtttaagcttgaaatttcgaaaaatgttggaatctgtctttgtcgatttgatgatttttccgtttttgttttgtttggaattggcataagtctgtttttagggttcttgattggcgagatttttggtgataaggattgggtttattcaaaactcgcagtctagattcagatctccaaggatagctgatgcatcgatgtgtctttactgtggtgattagcactctcatacatatgaaccagattatattttatcactagaaaactagtaatttggcattttttaccaattaacatttttagtgtgtatttgcaggttctgttgaaagtgatctcgatatgcaacaagcgatgctcaccaataaagacgagaaggtacttaaagctttagagagaacaaggcaattggatattcccgatgaaaagacaatgccagtgcttatgaagctcctagaagaggctggtggcaattggtcgtatataaagttggataactatactgcactggtcgacgctatttattctgttgaggatgagaataagcaaagtgaaggttcatctaatggtaatagagggaagaatcttaaggtcattgactctcctgctactctgaaaaaaacttacgaaacccgttctgcatcctcaggttcctccattcaggtagtccagaagcagccacagcttagtaatggtgatcgcaagaggaaatataaaagcagaattgctgacataactaaaggttcagagagcgttaaaatccctcttgtcgatgatgttgggagtgaagctgtgccaaagtttacttacatccctcacaacattgtttaccaaagtgcttatctccacgtgtctctggctcgaatctctgatgaagattgctgcgcaaactgcaaagggaactgtctttcagctgactttccttgcacttgtgctcgtgaaaccagtggagaatatgcttataccaaagaagggctgctaaaggaaaagtttctggacacctgtcttaagatgaaaaaggaaccagattcgttccctaaagtttactgcaaagactgccctttggagagagatcacgataagggcacatatggaaaatgtgatggacacttaatccgaaagttcatcaaagaatgctggagaaagtgtggatgtgatatgcagtgtggaaatcgagtagtacagagagggataaggtgccaactgcaggttacatttctaggatactacattcaatcttatatgctgaccatcctattttaaattagtcttctatatagcttcttggcttgatgtctggctccctcataattttgaactatttctatgattttctccccgttttttttttttaattattattttctcctttcatttgtttgacgagcaaaatatattgtttcaggtttactttactcaagaagggaaaggatggggtcttagaacactgcaagacttgcccaaaggaacctttatctgtgaatacattggtgaaatattgaccaacacggatttatacgatcgttagtgttaggtctagtagtgaacgacatacatatcctgtaactgtggatgcagactggggttctgaaaaggatgtacaggatgaacaagctctctgcctggatgccgctatctgtggaaatgtcgcaagggttgctcactcgcaggtattaatcagcgctcgctgtgctatgatttatttcgtgcttcccgtgatagtaaatcccccttccccccttttgttgatgcagatgcgaaaatgataacatggttgatattgggatagacatagagacgcct

SEQ ID NO: 27825 - DNA, 1857 bp, Arabidopsis thaliana landsberg
atatctatatttgggccttataggcagtgtttaaatagggcccatggacatatataactctctgaccttgaaagcgagcccagtttttcaatttcaaaaaaaaaaaaaattgaataaaagttgaaaacaggatgataaaagaaaaccagtttccgacacaaagagaaataaaagaaaaaaaaaagaaaaaaaaaaaaaccccggtttatgcagttgcaaagacatttaaaagaaaaaaaaacgagaatgttcaaaaaaatcgttaggcgatagctaggagttcgattttaaaaaagttaccaaagtttggcggttggaaacggttggaagttataaaagctggaatcatcatttggatttttaagtactttaaacaatgttcagtcttaatgatcgacattttttaatatgtcacatgataaagggtgaaccatacccgtttgatgaagagttatataaacatgttttatagattatgttggcaaaaaaaaaaaaaaaacgttttacataataagaaaaaaatgttataatattgaatcctcccaattaacctttgaagtattctataccgattgtttgccttgtttagttacaaaatacacttgaaaacaaattccttaataaatatttggttcttttcctattcttaaagatatcagtctaacatttcgaatattcctataaacatcttactataaataactaaatttaaatttaaaaagttagattttgttatgatcaactgattctcttaaatttaaaattaaattgaacttaagtctttcacctttcacggctttttaccattttcactactggtgaaaatctttgtagatctaaaccgcgattcaacacagtgactgacataacccatagtcaagctaaattaaaaacccttcgttgtcttacaccgaagagcaaaaaaaggttaaaagaaaaagcccaaaagtcgatgactcaggacaaaaaacaacaaacattacgagagagacaaatacaattacgtgtctcgtcttagatcaaccaccacaacacttacgttgtccgaactttgtctagccaacgcaagcctcgtcagcaacagcgacgcctcctcacacgctttatctggcaaatctgctcctccaaccaccacattcccggcgccgacacctgtcatttccctttccggtgatgatgatacttgaccattgacttttcctctcaaacacattcgaacgacgctacatgcagtttcgtttgaaataacgtcccaaagaccgtcacttgcgagaatgaggaaatcgtctccgttggcccggtccgtcacggttacctccggtctgctgattacatacggcttcaagtaattatctcctgaaaaaaaaaacgaaaaaaatccgcggcgaaacgagagttaataatcatcattattgaaagtacggaaaaactttgtacaaacattaggatagggacagagtgttttcgtcaagtgtaatcaattaactgaccaatggctcgtgacattgcaagtactccaaggacacgtgggccatcccagtagataacacgaccacccgctgcttgaatccggtctagctcgtccggacggtctggctgttacaacaaatttaaacaagagagagagagagaataatatagtcattgataacagtgacacgaaggattaaagaatctaaaaactcataaactttatcacatcctctatctaataagtaaaaagtcattaaacattcttaatcgtctattcctcgtccaggtgttgcatgcacatttaagaacattctaatttccaataaatgaaataataattaaaaatgcattaaacaatattgataggtaagtttcaacgcaaca

SEQ ID NO: 27826 - DNA, 2323 bp, Arabidopsis thaliana landsberg
  unsure (1)..(2323): unsure at all n locations
catccaaatctgcaagtgcatacaaattgactctaaatatattgaagctgcaaaatcagccaagtacaaaattgactcttaagtatattgaagctgcaaaatcagccaaggttacgcaatataatcatatagcgatcgatgcatcagaataataagttagaaagcgatatcaattgcaaaatagtatagagtagtataaaaatatgaaaacactctgaagttgaatgcaccaaaatctaaatgcattgttttgtctgccaaattgacttctatctagaagcttctagtgtgaagctctgataccacttgtaacgtccaaatcaaagcttcgagttacaagtcaattagtagaatgatttattgtttttgtttcttttacttatgaaaagactctaaagcaaagcgaaggaagagatgaggaagaaaaagatttgcccaaacggcaaaccctaaattatttagattgatgttctattgttcatatgaacaataacgtctatatatatgtgaatctgattcgatagaataacctaattacttgggctttttttgggcttatattgatttatctgacaagtctgatcccggataaagttcatgatttggttaagttcggttcaatttaaagagaaattatattgggctttaaaacccaggcccatataaaaatgactcacgtggtattattaataaccggagccctagacccgccgtgaaatcgagcgattgagagcacttcgcaaaatcagagcgacaaaaaaaaataaaaaccaatcctttcgattccaaattttttgttactcactcgcacgagttttatttggtcgttagttatctctttcgttgaataacggttttaatttaaaccgttactttttatcaatggcgacttcgtcaccgtctctgagtaacaatggtctttcctccgtcgtcacgcctcccaaaactctccgtggtctcaataagcctaagtgtattcaatgcggcaatgtagctcgctccaggtattgcttctacgcattgtttcatcgaaggacttaggttttttacatctggggtttcgatttatggattgttcttgggtttttgatctgaaaggattcgaatttgtcttgtatagtactttttcgttttgatttagggttcataggtttgtgggtttgggtttttattcatgatttggtgattaatctgttggagattgtttaaagttttgagctttagtatcgaaagatcagttttttgagattattggtgaagtaattgtaattgtattgcttggatttgataaatgcaggtgcccttttcaatcttgtaagggttgttgttcaagagcagagaatccctgcccgattcacggtatgtttgccctgtcaaatctcaacttcataattagctaaagtgatcagttttagagtttagtgttgataactttgattggagagttctattctttcacttggtaagtttagagtttagtattcttgacttctatagggttcgtttggttgtctcgggacaaaaaaacctnnnnnnnnnnnnnnnnnnnnnnnnnnnnnnnnnnnnnnnattagctgagagatatagagatgttatcatggactgttttgtgtttcttcttatgtgttttatttcgctgcagttcttaaagtagcttcaacttctggtgagaagacgcaggcgccaagtactccatcttcagagcagaaagcaaccgagggcactcccgggtacatatatataaactaattttctgttttgtttgtgcttccacgggcaagtgaatcttagatgataaaccggtgtttgcttactaatactttgataggagattcttcagctttcttgttttattgcacgtagttgatagtgagatgatatattggtcttgtggaactaaaatatggcgctttatgttgacgttttcttcttttggaaattgtttcaggagtaccactagagtttcgtcaatccggcaactttctagcaactttgctcagtttaataacctgaatgcttcttcccgccagagaaaacctttgacgataaaggtatactaattaagacgtctttcattgactttagtactctatgaaaaatctccatttagttgttttcctcttatcagtttttgttctgtctatattctataggatgctcaagctttaaacgagtggcggtttacaaagctaaaagagtacagagacagaaacattgaagtagaaaatgaagcttttgatcggtacatgagtaatgtgaatttactcgaagaagcattttcatttacatctgttcctgatgaagagagtcatggaacagcagc

SEQ ID NO: 27827 - DNA, 954 bp, Arabidopsis thaliana landsberg
aaagaacaaaaaaaatcattataacccagtacataagtgagatttataagatatccaacacagatactcgtagaaattgtatcaaaacttgaaatacaactcctgatacaactagttagctcaaatccaggaagaaaattcatttaagaatagatacctcactgtattcagtcagccgaactctaacatcagttggagggccatcggttagactatcgaccaagcatgtggatggcattttcattagtttagtcaccaattcaatgctttgatcagcaaactttgagaaaccatgagacttgcttcttcctgagatatgggaacaaactaaactaaacgaccttctgctatataatcaatatttcacacacatctgtcatgacattacctgcaataaaccacagcggcaaaagactaaaacggacctgcaatataatttcccagaaataaaaaataatcctaaagtaagaactactgttccataaagctaaacatctatagtccagttttgtcctaaatttcttagaaaaattcatctatgcataggtgcagaccttctaaacgttacctgttccatcaagttgattgtgttatcttgactactctctggtaagtcagacaatcttccaccggcatcaagccaaataagaagtccatcaacaaggtccatctcactgtcagagtttagtcaaaggtgagaattttaggtatgtttgcactgataagatacacaataggtacaaacttacctgtgtacagtcaggtgaggatgtttaacgcaccacatcaacaactcatatggaacatttccaaaatacttatcagatttcaccaacatctacagaggacaaaaggatccgttattagctaccaagactaccaaattggaagaagttagatctatcaaacataaggtcataattttctatcatacatcctacatatcattgagtg

SEQ ID NO: 27828 - DNA, 1552 bp, Arabidopsis thaliana landsberg
cagtccatttccgcagccgacttcgtttcacaaagcccaaaaaccatcttcttgtaagacagaaaactgggtctcataccccatgaaatcatctgactcatcatctctttagcttccaagttcctctttttatccaagaggccatacaacacctcctgataagtcccaggatttggttcacacccctttaccttcattctctctaaaagatcaatcccttcttcaactctacctttcttcctaagccctgaaatcaaaatgttaaacgtgatagtatctggttcgattcgttccttctccatcctctccaacaatttaaaagcttcttcgaactttcccttattacagaaaccacgaatcaaaggagaaaacgtcatcacattaggccgtgatttttgttgagaaaattcgtcgagcagttggagtgcagcttctaaattcccactctcacagagtcctttgatgagtatattcaagcaacaagcatcgatctcaacacctagcttaggagcactcacaaagatcttatgaatctcatcgaacaacttcgcggaaacaagtaaattcagtatgaaattgaaactcttagaacttggccagcatccaaaatccggcataccgaacaatatctcgatcgctcggttgattcttccggctaagttcccgtaaatcctcatcaaattgtagaaaaactcctctgagaaacgacatcttttctcaagctttatagttctcattacttcttcgatttcatcgtacattttagcttggccaaacttgttgatcataagggcgtagagagattccgttggttgatagtctttccgtttagagtaatgctggtaagctggcagcaggaagctcggatctttgacattgtcgaagattttcaaaacttcgtttggggctaaccagtccttgtgccttagcctggcgagtctatcgtcaccggaatatcgttgcgaggacgacgtatatctatctgaagatgatgatgagagaatacgaacaccagaagatgaaagtgattggcttcttctgggatttgaattcgatgtagttgtctttacaagcctacgaagaatcattgggtgtgtttgctacacaaactcttgcactagtaactgtataaatatgattatgaaaccaaaacggtccaagaagaaattaaaccaagtggttaagtattcagatatttcggttcagaaagtttgtttgattaaattgtggtttagttccggtttacaagacaaatgtaccgaacattttgattcgcttccaagttgtagcagcaattaggattccactttggttcggagcggttttaatgtacaagactcctaattcactatgttgaacaacagtgatatatttggtatgaaccggatttttgtgcagagcaaataataagtgaaatagttacaacatgtacaaaagcagaagagtggaagaaagaaaagaggcatatgttcaacaattccccctcgtccctgcaagaataggttgaattagtggtcttctgataaaagcatcgttaaatagaaaacgagtc

SEQ ID NO: 27829 - DNA, 1672 bp, Arabidopsis thaliana landsberg
  unsure (1)..(1672): unsure at all n locations
cgataaccggttatctggaaaattaccggagagtattttttttttaaccgaattgaggaattttgatgtcgggcggaataatctaaccggtgaactaccggaaaagatcgctgctctgcaacttatctctttcaatctcaatgataatttcttcaccggaggattaccagatgtcgtagctttgaatcctaatctcgttgaattcaaaatcttcaacaacagtttcacggggacgttaccaaggaatctcgggaaattctcagaaatctctgaattcgatgtctcgacaaacagattctgcggtgaattgccgccgtatttgcgctacagaagaaaacttcacaagattatcaccttcagcaatcaattaagcggcgaaattnnnnnnnnnnnnnnnnnnnnnnnnnnnnnnnnttacattcgtatggcggataacaaactctccggcgaagatccggctaggttttgggaacttgctcttactcgccttgagctagcccacaacaatcaattacaaggttcgattcctccttcgatttccaaagctcgtcatctatctcagcttgaaatctccgctaacaacttctccggtgtgattcccgtcaaactttgtgatctccgtgatctcagagtcatcgatcttagccgcaacagtttcttaggatcaattccgtcttgcatcaacaaattgaagaatctagagagagtagagatgcaggagaacatgctcgacggcgagattccgagttcagtgagttcgtgcaccgagttaaccgaattaaatctctccaacaaccgtttacgaggcgggataccaccggaactcggtgatttaccggttttaaactacctggatctctctaacaaccaactcaccggtgagattccggcggagctgttgaggctcaagcttaatcaattcaacgtctccgataacaaactctatggtaagattccttctggatttcagcaagatatttttcgacccagtttcttaggtaacccgaatctctgtgccccaaatttggatccgattagaccttgccgatccaaacgggaaacccggtacattctcccaatctcaatcctctgcatcgttgcactaaccggagctttggtttggctattcatcaaaaccaaaccgttattcaagagaaaaccgaaacggacgaacaaaataaccatcttccagcgggtcgggttcacggaggaagacatatacccgcaattaacagaagataacataattgggtcgggcgggtcgggtttggtttatagagtgaaactcaaatcaggtcaaacgcttgcggtgaagaaactctggggaggaacgggtcaaaaaccggaatctgaatccgtttttcgatccgaagtagagacgttgggtcgggtcagacatggaaacatcgtgaaacttcttatgtgctgcaacggcgaggagtttcggttcttagtgtacgagttcatggaaaacggcagcttaggtgacgttttgcattcggagaaagaacatcgtgccgtttctccacttgattggacgacacgattttcgatcgcggttggtgctgctcaaggactttcttatctacatcatgactctgttccgcctattgttcaccgtgacgtcaaaagcaataatatattgttggaccatgagatgaagccacgtgtc

SEQ ID NO: 27830 - DNA, 1132 bp, Arabidopsis thaliana landsberg
tggtaagttgatcagacgcatctatcttcccataatagcctccactggtatctttctatttatcatcattcatgtcttcgtgtttctaacagcaaggcctgcattctacagctacataatcatcatgttcgccttatacagcctttacctagttgtatctgcgtttaccgcaaacaacgcgcattttggtttctggtaactcttatctgaaaccatcccaacagagaatattgtcttatgttcagcttgtatctgccttttaactcaaaatacttgcaggttatatgggatcatgagtgtttgctaccacgcattataccttcctcttctttacataacgttcctcgcagactttttccaggtaatcatcatcattcatcttctctcactgactctctcactctctctaaaatgcaaatgggtttgctgcaggaagaagatttgaacttggagaatgtatactactcagagatgaaggatgctggatttttcgactctgattgggaataggactagggtaacaaacatcttcctcattttctcaatctgtaaatacacgttgggtaggatctcctagaagtcatggctgctttttccggctttggcgggttacattttagggtctagtcttttgtatgtctgtactttttcctcatgtttctttctcttttataaatccaaaatgtcttgtgaatctctttgttccttaagctgataatctaaaagaaagttttgtagtagtctaaagattgacataataaaccactagggcaaattaagacatacaacaaagcatgacacaattgagcaaacggcaataacaaaagacaaaagcctttggttgtttccttaactaagcagtcttctcttggacgagttcttcaatgagttcagcagcctgttggactgttgcaatctcctttgctctctcttccgccattgttatcccgaactcttcctccaaacccatcactatctcaacctgcaaaaagaaagcagaatttgttgatgatgatgtccaatgagctctgagatacaatacaatgagatgatatttaccgtgtcgagagaatcagctccaagctcggtaaatttagttccggcagtgactttttgatcatcggtgagcgac

SEQ ID NO: 27831 - DNA, 1391 bp, Arabidopsis thaliana landsberg
gttggaaatttgacacgtcagcgagattgatcgatacgcacttagtcgtttgactttttcaaatacccatcggtacacgagtacggaaatttgcgtgcaaccgcattctaatgatacgcatatctacatatcaatccaccgcaccgtctaatctactctatgatattttcaagaccttttcaaaaattcagatccgctagctactacgaaaatctaaatgactaaaataaaactcttaatcgttaactagatatgtttctataataatatatgtatatcatactgttttatttagtttgccgtttttctttgttctaaagtttttttttggtgtgtttaacactagtaatttttttgttctttttaatgttaaaatagatattttcaccatcacatatacattgacatacgtatctagggtttagatgaagacatgtacacacacgatattgatatttaactatgtgtttttccttaatcaacgatttcaatttttcacaccgaaaatgacatatgaaatcaataaaatagttctactaaaagtcctatatatgcaatcgtaagcaatttgaagagacaactaatgtgcagctaaggccactctaaatccgaccgccaaggagatcaattagtttattcactaaaggatcatcttccccttttgtgaatactatttattaccaaaacaaaacaaaaaaaactattcacagttacaatgacaaagataaccctccataattaattaggatcatagactagtaaccattcatatagaaaatatcgtcgccgttacttacgtagcctaaatgataactcatgcagtcatgctgttacagcagttcaaattaagtgtccaggttatgacttggtgaaagaggaccaaacttttaaaccttaagaaaagaagaggaaaaaaacaattagcctatcctgtatcactgtatgtaaccagacttatgtttggtttccacgcaatttgacggatacatgtttctatgataataataatgatagttttattactaacacaaccatattgttgactatccatccataaatcattaaatcgcaagatgagggaagggtagagcggtcatttggaaggatatcggcaacctttggtgataagcgagagactaggaagatgcttgcggcgaaaatggattcctcgaaaattaatatttaaatcgatagttaaccgttgagaatctccaaagaatgcttttttcattgtcaacactagctaggaaccctatataagccatcgtgtgattaatattcagacatcgatcaaataaacttgaatcaaatctcaaacttgcaaagaaacttgaaatattctataacaatgggtgattttactggtgagccggggagcttcatgcatggag

SEQ ID NO: 27832 - DNA, 1653 bp, Arabidopsis thaliana landsberg
tccagaatgtaaacaacctgtatgatcattataaaccaaaaagtttcttcttgtaagttagatatcaaattttgcaggtaatataaaactgaagagttgtataagtaaatgacctggcctccggtatcgggtaatccgagtacgtcttgctgaccaaaatagccgtggacagagaatatcacaacgttgaacactgtgggaagtctgctaaagagcaaatctaacttcccattgtctggtgcttcaagaacttctgaaaggataatcattgtttctttcactctctctgctgtatctccccaacctttctcgaatcccatctccttcaacctaagaaagtaacttttcaatcagatccttgttccggttcctcaaggaacttgatcagttgtttttctttacctttgtgcaaaagtttcataaggtgtgtgttttgagtaagtcgagacaacaatcacagcaagcatgagagatttctggagctttgcaaccgtgttgagatcgtcattgatcatgagattctgcaagagacaaagcatttttaatgagttataagactttcaagaaggtggatgaaaatggaaacaagaaatgattcaatcatgacctctccgtgatggttaaggcgaagcagatagttcaacaaaggttctagtttatcggatttgcctccaagcttagaagatataaacttagagatgtaatcagctccttttccaatcgaagaagaaagactaagacgaggagatgtgaaatcaatcgctccaaagtctatctccagtgcattttcatctttagacctacataacatttcaaaaaaaggttacaccagatgatgaatatagctcaggttattgccaaaacgccgtatgtaagattgtttactaaccatgactcatcgaaaacagattccttgagctttaagtaatcagtggctgtgatttcatcaactgttaaatctccagagttgaccttaacatattcccagaaaccaggatttggccttgcggctagtgcaacaaacggtggaaccactgctgcttcctgataagtagttaaaacagagaaaaataaaccgtgatttcgcatgaacacgcaactaaaccgtttttaattgcaaatggtaatgaagatatattatattacctgagtacaagtgagaatgtaaccaaacagcccctcaaggatcttactgcgttcacggctatcttctatacatttctctatctcattcatcaaatgctcacgcttcatcagcttctttcctcctccaacaaagctacaacatttttttacgcacaaacatttaactaactaaggaatccaaatagcatcaaaatgtagccaaaaaaaaaaaaaaaaactaatcctaagagttaaaagaacctggcaaaacatctcttcatgtggtaccggctttgtttcaatgcatcaggcattttctcagcgatggaatccgacttttgaagcatagcttgagatgaagatgacatgtttttttttctttttacagaatcaacagatgattcaaagtctcttaaagaatattgaatgattgagatatgaagtagtttgttgaaacatggtttaatccacattttatatgtagagatacacaataatatgctgtgaaggggacaggactcacaggag

SEQ ID NO: 27833 - DNA, 526 bp, Arabidopsis thaliana landsberg
aaatgttatttttataataaatacaacagatgtttttttaagtatttctgtaaaatttgtatacatttggtttggtaagagacatgtttcctttgtattagaggatatttttggcctaacttaaaattagtctttgtatagtattttggttatatttgtagatctaattagggcctatattagattatctttgatagggctgacgaagaaacggacccgataaccaacccaatatccgaaccaaaaaaccgggttagggcgggttaaaattttaggaaatttccttattgggtagagttttagtaaacccgtggatatccgattggtccaaaaattacccgttacccaaaaagagtattcaaaaacccaaacattaatttaatatccaaaatattaattatatttaatcgtaatatcatctaattatctaagattataattataaatctaaataagtcaattaattttggacctaaatatccaaaacaactaaactattcaaaaattatttgttatgttgtcaaaa

SEQ ID NO: 27834 - DNA, 1033 bp, Arabidopsis thaliana landsberg
tctaattatacaaaaaaggatgaaaagagtgcttactcccaaggaacatctccaaccatcatccagtcaccttccttatctgcgtacgttagcacgtgactcttctcattgcacatgtcttcttcttcagcccctatatatttccattttttcaattcccatcagttttcatcatttttacaatttacccattacacagtacttacacactgcgcaatatataaactctacctacggaaaaataactctgacatataacgttatccagattttttttttgacaaacaaacaaacaacctatgaaatagtgatgggcgattattacggcgatattaaccttcaaacaaaagaatagtaatgagcggaagtattttttcattccgttaaaaaaaaaaaaaaatcaaaacggacttataagaaagaaaaaaatatcgttagaaatttgctacctctaagacatataaatcattctgatatgacattatgtatacatagaaacttacagagaatggatgcgttgaacatgaaatcaagggttctgatcaagtcgcggtagccattaagagacattagatcgatctttcttccaattggaactccttccatgttcactttcacgtagaagctccctacactgttacactcattctcttcttcctcctccacagccgccacatattccgcatcctctaccgccggagctgcaacggagtacccatagccaccgttgaaatattgagtccctgaggatgtcccgaagctgagtccgagtctcaggtccgtgcttaggtttcgagtacttgacgaagcaccgaatgggttgctcttgctgctactctctattgaagaagacgatgaacttctccctcttcccatatctctagctctctctctctctctctatccttttttataataattttaggttaagacaaatgagtaatgagccgccatgcttggtttgtacgtgtgtgtttatatagaagataaaactaggacttgttttattttattttaaatttgatatggtctt

SEQ ID NO: 27835 - DNA, 1750 bp, Arabidopsis thaliana landsberg
  unsure (1)..(1750): unsure at all n locations
gtagattgtaaaagtttataaaaaaagagaggatcaaattatgtttaggttattcaatcaagagcattcgagtaagatattctagcaataatttgaaatcacattattattattgttatttttaaatccttagtcatattatttatgtgcctttttgccaattaagaaaataggtaaaaattgtcaaaaaaaatttttattgatatacggttaaaaacaggttaaaattccaaaaaaaaaaaacacaccacaaaactaattgaaatgagaaaacaactacaactaagaaagcaaaaactatagaagcaagtttaccacaatttcagcatacttttgaacggtatacaaacttcaaaagtgtgcagattgttgttggttctcctttgaagatttttatcaatcttcaaaggagagaaagaaaagcttggtgtttctagagatctcttcaagttcttgtgagaaaaggctcgaaaaattgtgacaaatgcatccaacaatttggttttagtccatgtaattattctcatattctccaaaggaaacagtcagtgcacacttgtgcacttccccttctctttgcaaacaacacaagaactggccaacagaagtgtaggctaacattctcctacacataaacaatacgggcaaaagcccaaacaaaaagaaagcncaataacttaaatgaaaagcccaatatgtaaacttggaatttttttgacatcagacttcatcaagtgacgaaaaaaacaaaattctaatttataaattttaaaccatttctgtagcaattaaataattaacgaaggttcacccaaacaaatcatattttaactaatttataataaggttttcttgaattaatattccttagttgcgccgacaaatacacgaaatgaaaatataagtttgttataaatttgacggattttaaattaattcgatgcataaaattttcctttttttttgcttaattttgtttttgttttcttctccagtcaaagaaaagctctttgcgcaacaaaataacagaaaacacagagacaagtgagagaaactactagagagaagaatgtcaagctttcttggttctacgttaatggaggtttcgagtttctgttgatttcttttcaacctcaagtaaacttcaaatctcctccgtctacttctgtatctcttcttcttcctccaaaaaccctgaatttcgctccctctgaccaccgtactgactttaccggctccattcggtgatctacggaggtgatagctagctatggccgctcggggaaacaccaattcaatgcaggtctgtctcttagctctatctttgcattgttgcttatcttcttgttcgttagtctgcgcgaagatgtcactgagagttcgagtgctcgcggatcataactagtaatgtattgatctttcttggttcaattgcgaatcaattcactagtgatggtgtttttagaggatctcaaagatgggattcactggatttgcgttttgttggtagtgtaggagaggagataactgatactatttgataaaatctttgagattcatgagttcatttccaattggatctttacatgtattcagaaaccacaagaaaatgattgtacttgccattgttactattgttgttcagagagtgaaggtttatcgtttgaatgaagatggtcaatgggatgataaaggaactggacacattactatggattatatggaggtttgttctcattcctggatccca

SEQ ID NO: 27836 - DNA, 1839 bp, Arabidopsis thaliana landsberg
caagtgtttttgtattggtagatatatagaagtagaagattgatagttcaaaaaaaagatatagataaaatgtgtgagtgataaggagaggaacacgtgatgaaatgagattagagagaaaggttagctggcgaaagaagacagacatacgtgtgcaacttccacatccaactccacctgcacctgacctgctcttcttttccccttcacttctctcccatgtgccttcccttttcctcactttcctcccatttgctctctggctcttgaaaacaaaacgggccttctctctacttatcacaaattgggcctttagatatgtctactcggccttataaccaagggcaaaaaacgagggggagtagtcaagaacaccaaccctactttcactcttcaccacgaaataaagacaccacatgtaaattgatcacgtctttctaagtaatgttttgtctgagaataaccaaactttggcttcactcatcactacaaagtccttcagtttcttcttaaacgaacgatacatattgtatatatagatttcacactaattaattactacttttcagactccagttaacaaaggatcaacatttaaataactacgttgttcttttggatcggataaaggggatacataaaagatgcaacatcattcggaagtgaagcagcctctttgtcctcagccacgccgtgtgtgtcgtcctcctcttcctgatttcatcaaacctctctcatgttccttacactcctccacctggtaacattatatggtctagctagattgtttgtttgtgttttttatacatttggtgtaatttgtgtttatgctttccaaaaagttaagaatatgattctttttgtttgtaaacgtaaacacaaaagttttttttataacaatcgaaactatatatcattttcttcttgtttcttgaaattaatcatgatgattcattcatcatacatgtgtgtgtgtgccttaatcagccaacaaagtaaggagggaagaagcgactttctcatcattatcgataaggccatcgacattcttgcttctttcatcatttctattagacatttaatttgtttatttcttccttttcaaaacaatagtccttttgatctattttctatgaaattatctaatttatatatgaaaattgataaaaatgtaaaatgatatatcagaacttaactttttttgtgagaatactaaaacataaacttgttttaattaatttcttaaaatattttttcaaacttgcatgcatgaatcgatcttgggtgttatttaaatataaatgttcatcgtggtcgtaggtgcagccgatagaaggtggaaccatagagtcaatgtggtacgtagggtctccaccaaggagaaccggaaatcctcttgtgcacgaccttcatttcattcactgcctccatcttctccccaatttctcaagaacgaaggcttgatcatcacatcttcttagactagctacgtacctcgtctatacatatatatatgaatgcatagtaattgcttttcaaacattttttatttttaaaagtttttctccaagatattcgtctaatcttcacatcttgtacatgacttgtgtttccttttatctaatgtagttgttcgtagtatgtgtaagttccagagttctacgtactttctatcatttttgttactatagtttaaaattaaaacttatttcccggaaaaaaaaaagttaagagaaaagcaaatgatggaatcaagtgattattttcatatctgttgggattagagatcaaaagtttatgattcagtctaagatctactaatataagagaaactgtttt

SEQ ID NO: 27837 - DNA, 1238 bp, Arabidopsis thaliana landsberg
gacatgtctgaagaaccgagtctgattttaagatatttcttcaagcattcttatccaaaagaaaaaggagacacgcgaatatgataatagcaaaaggcaccaaaaggagaaaaataaagagaaacgtaaagtgatttggcctcaatcaacgggaacgtatcttaattttagaggttcttctttttacttttgagacgagagagtttgcgagcggttttggttgactaaacattatcatattgaaaccaaaataacaacggaggaatatttgtcaacagtttacacattcacattgtttccttaacgtttaatcaaccttgttcaaaatttataaagttgtaatcatcatcactgtttacaaaatttcgtctaaaaaagatttgaaataagattgttaaagaaaaacttttttgaaataaggtttggatagtgtaaaaaaataatatgaggcaaaaaagaggagtggtccccggcagattgtgaaatgtgatcatctaaaccagccagacgtagccacgtgttctctctagctttatgaacttccttagccagcaccatcgttgtgattgtagtatatatgtaaccctaccttcatctctcccattttccattctccatatagactcctttacaatatacaaaacctatccaaaagcgaagaagccaagcaaacatattataaaaatgaagaaggcggcagatttcgttaagcagataataaacatgttgacttgtctagcaaaggacaagacgaaggagcttaagaggaagacaagagccttcaagacacgtctcgtaatattttcgctgctccacaacagacacatggtggtgggttctttgtctcacaagctcaagagcaatcaaacatcaaaaaagatagatcatgagaacaaggatgttcaagattatcatgataaaaacatggtggttgtgtatagccaaaacgttaacgccatgtctagcactcctgtctctccgcatgtacaatatcaatatacagaggaggaagatgatgaagaaggggaagaagaaaagtatccagacttgagacactcgttgattgaggcagaaggttcggtgatagagatggtgaagcactcccaggaggacaatggaacatagcttatggtggaagacaagatcgacaaagtgactgatcttttgattacccgctttgatagacagatgtggttacagaagcaactgtctctcgagagcccagattcaccgctccc

SEQ ID NO: 27838 - DNA, 1222 bp, Arabidopsis thaliana landsberg
gattgattttttacatttttgattgatgattataactaacaaatcatgggtctacatttttcgaagaaaaaaattatgttaaagaaatgtttttgctaaatctgaaatgtttgtgaatatgtttctctaagtgtgcttattgctttatctgcagattctcttagtgttttggttcactggaatgatcaaggatctagttatgtagaaatttcttagtttgggagatttcatgagattgctaagagttgagtagtactaagttcaggattaatattgtttttgagaagaacactgtcaaagatttagaaagtgatgtgattttttgggttcacatatgttacaccgtcttagatggtttattggattgagtaaaagaagtagagaagccaagacgcttgatgcgaaaccttacatatccaaggttaagccagtactgatggttgacacggttcaagagattgcgatttatatccataggtttcataaccttgatcttttccagcaagggtatggaacttatttatatatatatatatatctttatacttcaacattgttttgaaagcttccgactcttttaacttcatcagatggtatcaaatcaaaatcaccatgagatgggaggatggtgataacgtaactcgtggtattccttcacgagtcgtgcaatatgaaggtaatactgtagctttcttatgaagaagcatgaatgcctgagatcagtatcctataattactatctgaattctgtattattagagaatttgttttgagtagaattggatattgaggattgtttttttttgtaaagctcctgatgccggtgctaatgactcatatggagggtggaggatagttgataaagataatagtttcttaacacagcctttccgtatcaaatatgcaagggaggatattcgtctgtgtatgatgatcacatttactctgccactggaacgatatgaggtaacaatcccttaccattatgcattccattgaattattctccgaaaggaactgaatgagaaccatccggcgtggatattgcgttcctgaaaggtttgaaatgattctacgtatgcaggggtcagctacatctgctgctatattaaagtttgagctcatgtatgctccctctgtagataatgcatcagcgaagcaattagatacttctcctgttgcagttcatgagttccgtattcctcctaaagctcttacaggc

SEQ ID NO: 27839 - DNA, 1104 bp, Arabidopsis thaliana landsberg
ggttactttgttgattattctatatgagatgaactctctagtgtaatcgaaattacaaagattgaatcttttcatctgcagctgcttagttggctttgaggtttcactttaaagagtttgcatctggttatgtagacaagttttcgtggagatatgagatttccaacaagtagtcccctactggttcaggatatcattgtcctgaaaacaaacatccaaagtcttagaaggtgatgtgagttctccatatgttacgccgtcttggatggttaattggactgagccaaagaagtaggcaaacaaagtcgcttgatgctgagccttacgtagccagggttaagccagtgctaatgatcgacactgttcaggagattgctatctatatccataggtttcataaccttgatcttttccagcaagggtatgatagtttctctatatctagttctgagtgaattgaagcaatgttctcttcttgttctaaagagttgttacttgttgtatcttttaattcttttagatggtatcaaataaaaatcagcatgagatgggaggatggtgacaacaactcctgtggaattccttcacgagttgttcagtatgaaggtactcttatccatcagctttcttctgaatcattttcctctgtcttgctacgttcttgtgattgagttcactattccattccctgaatttgatgtctatttgtcctattctgtgtacttggagactttgttttcagtatactaacatataatggctcatatacctgtgtgtcacagcgcttgattcaacctcaaacgactcatatggagtgtggaagatagatgataaggatagtagtttcttaacacagcccttccgcattaaatatgcaaggcaggatgttcgtctctgcatgatggtctcatttactatgcctctggaaagatatgaggtaccagtatttctctcctttgttctattcatcttttttataatgtattctcacaactataggctaatactgaaaaatgagttgcataatattaaacaacatgaattgttaagaaactgttttttctactgcaaagtatctgcggcattgagtttgtgaggttattt

SEQ ID NO: 27840 - DNA, 2417 bp, Arabidopsis thaliana landsberg
cgatacatatgctcagtcttaggataataaactacaaaataaattttcaattaaaattttgtcttgagtttataatagttatgatctccgagagaaaatttactagcttgcacatatatagtaggttagaattacttttttggttcaatctttttttttttaatgggatttcgagttctgatcttttttaaaaataagttaagattctattttttttaaaaaaaatacgttagaaaatactttcatttgtagggcgagaaaaagtttgctaaagaaaaagacgaatagggagcattgcaaaaagatctttgtaagaaaaagcatgaacaagatactcgtacgtatctactaacttctcttatactcaattccacaaacatgaattttttcacaattattaatatcgaaattagcaatttttttgtttttgtcaaaggaaaattaacaattttttgaaggaaaatcgaatatcaaaacgaaaatttgaagtggggtacttgacgggaagagttcgcatggttttcgttttctttgtctttccggacgattattctcttttgcatgtttaggtttataatttcgttgtcgtatgctgaaggattttacctcacgagcacgtgcatgggtacacgtgcattgctggctttgttctcaacaataaacgagtgatgtgacctgcgccacatgatctgtttacttctttgaccgcctcaatttacggtcaaatcaaaatcttaaattatatacaccatgactgtgctttatatacgactttctactaaaaataacattaagagaaactatcatgagatgaacaattaaagaagttaattttacctgaggatgatgaaaaaaagaacggagaaaagaaataatgagatcatcattccaaatagaaaaaggcagacatagaaacttttgtgtgtgtcatgacgcactgccactgaaaaaccaaataatcaaatatttccagataaatatagttaatttccaccgccattaacttttaactgcgaaatataaataaaatgggaaaaatatatgaaagtttaataatttatgacaatagctgcgacagttcttacagatcaaggtgcttatatttttttgtttgaaagaaagaggaatattattttttagtacacatatggggcttaagtgtgtagggtgtatatataaagtgatcacccaatataacttatcttttgtgtttgcctctcattcataactacatcagattctaagtatttctatttattttctcttcattacctttgctcatcctccatctcttatttaaaacttaattaattaccttttcaatctcttccaacaaaacttttgtccaagaagaagacatgacaactgaagatcagacaatttcaagtagtggaggatatgtccaaagctcatcaacaactgatcatgttgatcatcatcatcatgatcaacatgaatccctcaatcctcctcttgtcaagaagaagagaaacctccctggaaatcctggtaacaattaattaagtttaatagagatcacaaaataattcaaccctaatcaacatttttttttctgtttgctgaaaagtcatgttcttttttttttcgatcttgatctacaaacatgcatgctttctactgtttagatctttcacatgatcaaatatgtatccagaatttgattgttatatttcgttctctatagatccagaagctgaggtcatagctctatctccaaagacacttatggccacaaatcgtttcctctgcgagatatgtggaaaagggtttcaaagagaccagaatctacagcttcaccgtcgaggacacaacctcccatggaagctaaagcagaggacgagcaaagaagtaaggaaacgagtgtatgtatgtccagaaaagagttgcgtccaccaccatccgacgagggcacttggtgatcttaccggcattaagaaacatttttgtcggaaacatggcgagaaaaagtggaagtgtgagaaatgcgccaagagatatgcagtccaatctgactggaaggctcattccaagacttgtgggactagagaatatagatgcgactgtggtacaattttctccaggtacttagtgtatatctacacacgtacgtactaatagatgatctttacatttcctcatcacggtatcatatatttttagtggcgtaacaaatattttgatcacctagctgtaagcgcatatcatgtttaattgcattatatatagattcaaatatgattttaacttcttaaccagtaaagttaatcatgtttgaatatattagaatataggaagaatatatatttacttatatacatatcttaaaactcatactaaacctagctagagcttatattttaccgggtgaatacttgatgaaaaacaaaaaaaaaacg

SEQ ID NO: 27841 - DNA, 1261 bp, Arabidopsis thaliana landsberg
agtgtgtttttgaatattttcagatacgttgttttaggacaagcttgttgccacctaggattaatggaggacgcattggttcttcttcaaaccggaaaacgtctcgcaacagtcgagttccgccgtctaagtgtaagcttgtcagatgatagcgtctctctcctcctctctgaatcgtcatcatcatcatcctcatcctcttatgcttttcctccacgcaaagtctccgaatgcgaaaccgtcactaaccttctcgcccacacgaaaaatctcctccggcgtcgctccgccggattcgccgcctttgacgctggacttttcgccgactcgatacgtcacttctccaaaattctcgacggtcgtcgtcgtcccgcgccacaaggattcctcgctgattgctatatgcaccgcgccgccgcttacaaatccgccgggaaaatcgcggaagcgatcgccgattgtaataaaaccttagctcttgagccgtcgtgtatccatgcgttggagactagagccactcttttggaaacggttcggtgtctaccggattcgcttcacgatttagagcatttgaagatactctacaacactatcttacgtgatcggaaacttcccggaccaccgtggaaacgacacaatgtgaaatacagagagataccgggaaagttatgcgaactgacgacgaaatcgaagaaactgaaagcaaaaatggcgaatggagaaatcggaaacgttgattattacggattggtcggagttagacgcggttgcacgagatcggagcttgatcgagcaaatctcttgctctgtctcaggcataaaccggacaaggctttagcattcatggaacgttgcgatttcttcgatcagagtgagattagttccgttaaagatcgagcgaagatgtcttctttgttgctttaccgattgattcagagaggttatacagctttggcggcagcgatagctgaggaggaacagaggaagaagatgatggtgttgactcaaatgtcaacgaaaacggttgaagaacatgaaccggttgaaaaatccggttcaattactttaaccgattttgcagaaattaaaccggggaattcgaacgcgtaccaaggagttttctgccgagatcttgctgctgttgggagtttgttatctaggaccggatttaaccaaccgataccaatgaaatacgatgcgatcagttgttaaccgggaattttagtttgtatataattaagaattttttgtcaccgtagag

SEQ ID NO: 27842 - DNA, 1016 bp, Arabidopsis thaliana landsberg
ctaagttatatgacccgtcttggcccattctcttcccgacgaagacacacacacagacaaacaaatcctagtctttttaccgtcgcgaccgaattcgaaattccggtaacccaattgccggaaaaatccaccgctcgtggctaccgatattgattctaatcggatctagcggctccctttcttcgtccagatctcgtacttcattcgacctcgattcgctgtgcaagttacgatggaggcgatcgatgagttgtctcagctttcggattcgatgagacaagcggcgtctctgctcgctgacgaagatcccgatgagacctcttcttctagacggccagctacttctctcaacgtcgttgccctagggaatgtggtgggttttctctcgctttttctgtttctgagatgtgattgtatttggcgtttgttgtaagttttacgctgtgatcgagtgtagattttggttgctatatcgtggatcttgtggatctcgatgaggtttgttgaaatgttcccgtaacctaggagtttggtaggatgtgttcttcgttcatagcttgttttgtcgcgtttctctttatgatggattatttgattctatgagattcaaacctgggaggtattactgtagtagagaaggctgatgtgtttggtatttgaaactatgagaaatctgttttagaaagtgtgtaattcagaacgaaaaatgtatgagcttttctctgtttcctaaaacacttgtctgttggaagacagaataatatattgctctgtgtttgtgattgaaacttctaaggcttggaaaagaatttttgcttatgtgaagactgaagttatttcacttttcttggtggatcagggagctggaaagtctgcagttctgaatagcctaattgggcatccagttctggtaagttgtgtattgagtttgaatgtgccgcaatttgtgtatgtcactattggctgatacattttcttaaagtcaccacttttgtgttgcctgtctactatgatta

SEQ ID NO: 27843 - DNA, 1396 bp, Arabidopsis thaliana landsberg
actactcatatcaatgtctgtgatacgaccttggtcttcggataatagtacaaatgaggctccatccgatagccctagctctttcgcagcggttactatgagtttctcgagattgcttgggatccaaaccacaactccgtgctttctactacgctcttctttcgcctcttgcgggtggaatggaaacaccgtgcatttccgtctctcaattctctcctctgtttttcaaaacataaatcaaattcaagaattacaagatccatttttgagttgtatcgtctgaaggaagtatacgagtaccttgtaattcacgcaagcttgtcgggtagatagacgactgagcatttttcgtatcttcgagtaacttaatcagtttcttgtttccgcacaatcgagcttcatcaagcggagaattcccccaccttcaaagagagaagttacgaagtttattaactatagttttaaccaattaaaatgattcatttttcatgatttttaccggtctttagaaataacgcttgctccagcttcaaccaacattttagccatcaagaataacccttcagaagccgcgacatgaagcggcgttctgtgatcataatcttcactgtttgggtccataccgcttgaaagcaatctcttgagaaaatcagagtcgcctttagcaactgtcgtgcaaaggaagtttcctgaatcttctaaattaaaggaggctccttctttggcaagcaaaccaatcactccttcttgtcctgctttcacagcctcaaacaatggtgtgtgtccgaacttatctgcgaaaatttgtgatccaaagcgtaaacataaaacaatgtaatgttttccattagaacgattcatattttaccttttagattgacatcaacaccttcttgaataaggaataatgtaatgtcttcatagcctctacatgccgcaagatgctgcaaataacaaaaaaagaatcaaacttaagctcttaaaagaaagattaatcgataagcgaaaaacgtacaagcggtgatcttccatcgtaatcggttttgttaggatcggctccagatcggattaagctcttaagctggtaaaaatctccttggaaagctgcactgtttactttcaatgcaagttctgcttcttgtttcccaatgtgaatcactatgtcagattctagcttctttatcctatcatttgattccttctcctgccaaaaccaagtttgagtgagttgcaagatttctcaatcgagtttcaaaaccctaagtaagagatagaaaaaagagtacctccataatattgtacaagaatgcgcgtccgtcgtgaaaataaatctcgaggatgtttgagacagactgtttatcgagtcgtaaaagatgcatagcttacaaaccctaac

SEQ ID NO: 27844 - DNA, 1718 bp, Arabidopsis thaliana landsberg
acagttgaaaccacttactagctatcaacaaccttactcaaagaaagacaaaatccaaaaggtaagaaaaacatatacctctttgcttagtttggcatctttctcttgtatctcttctagtgtcaagtttgactgcaaactcttgatttctgcaaataacatcacagaacataacattatccaagcagctatatcacatcctcaaaaccactgagaaaaagtagttttttcacacctgattccacatcactgatagttttcttcttctcttgaagctgttcttgaagtttggcattgtcttctttcatttgagcaagttcttcagagtttggaatctcaaactggtcttgtctagcaatgtatatcttctgcttaccatactcttatcacgtgatttttccagcatcagcaagactatcaagtgccttctgcacagcagtcttcttaaggttaaacttttgtagagcatcagctgcattttgagtgtttagaggtttgttttgctgcatcaaaaaagtaccaacaacacattcatcaaaatctaacaacaataatacaacagattgaaacaaaacttgcaatatatatatatatataacctgtatcaatcaatttttaaaacctagtcaatatcaatagcttcaaacgaaaaattcatgtgtaaacttatagcacaaattgaaacccaagtgattaaattcccagattcagaatcatgtgaacatcactgcgtaccttaacctagactcaatttcaaattcgaattctaatttttatggtcgtatctgtttgtgatctccgtttagaattaaagcaaaaatgtagaatcgcagagaagtgcttacctcattgacaaagttgagtacgatagctgcagaaataaaaaattcaggaaacaagtaaataagagagaaatcaaaatgaggaataagatcaaagagaactagcagatttttttcagagattatatcattataccttcggtgttatccgatttaggagccatttttgtcgaaataattggcgggaaataaaaaacctgaagcgagagcaacttttttccttttccgatattttctgaggaagaagaagagagttactgagaagcttcctttatacgagagagatattaaacgaagtcgtatttgttggatatatgggcctttatgtattatacataagcccatttagttcttatctttgacaggcccaattatatggacacagcttgaagatggtttagctgctgcgaaagacgagctccggtctcatatctcgttcttctgattgatagatcgctcggaacttggaaagcagcgtaatcggtaaattctcgatcatttcttcaatttcgaaacattttccaattgtatattgagaatctcaaatcgaattattgtttagatcttctctctttattagtctaagaatggtaatagtttctctctagattgggacggcacaaagtttcagttctccattctaatcattttttagaggctaatgggtcacctttgaattatctcagaggcggaattgagtttaaagtttgtaactttatcgtcttttgtattgatggtgtctatgtatgcattgtgttttattctgactttgtgtacatttgtgtttgatcgaatgtagggagtgatttgagttttggtgaggaaaaatatggaaaatgagcctttatacccgattgctgtgcttatcgacgggct

SEQ ID NO: 27845 - DNA, 1008 bp, Arabidopsis thaliana landsberg
tctcagaatcctttctagattcctcttcagattcatattcatatctctctctagatccctcttcttaatcctttttagattccgcttcagattcatattcaaaactctctctaggtctctcttcgtaatcctttttagataccggttcagattcatattcaaatccccctctagttctctcttcgtagtcctttttagattccgcttcagattcatattcaaatctctctataggtctcttttcgtaatcctcttcagattcatatttatatccctcttcagattcctttttatatacctcttcagattcatattcatatccctctttagatccctcttcagaaatctctattgcagctactttgccaaaaactctataaacgtctatcttgactacaattgtgacttctccacttaccaaaaacccttcttcaccagaaagtttagaatgacgaatcatggttttataaccccaggaaggagtcttctgatcaaaccacaaattttttctatctgaaatttcacgaaacaaacaacactagtcaagcatcacacaatgataaacagaaatacagacacagaatcataaaaatctacacttttttgtccagtgcagtagaaaaactcacatttctgttgggagggcttatacaaattgtgatttacaacttccatgcgcaattctgtgtttatactccatccagaaggcaaatgtttagaatcagcaacttccacatacaaagacatatactttttaatcctatttcccatgggataggctataagacgcctgtaagcaaaacaaatgaatatgtgtcacatgaaaccctagctaaaattcaccggaaaacatcagaaaaaaagacagagtggtttcttaccatttgcagccaccgatcacaaattcctcagaataaattgccctcactcccaaagaggagaaatccttgattacccaaatggactagttgttaccaagtggactccctatactccccattgaagact

SEQ ID NO: 27846 - DNA, 2340 bp, Arabidopsis thaliana landsberg
catttcataaacacttttaacaatgctataacattcgactatgtttatcaccgaagattcacttattaggctttcttctagtacatccagagaaaacttcgcatgtgttcgactggagcaatttaaaaatgaatgattttaagctaagtaaatgatttttagtatcttgagaatatggacaaacaaacaaaaagtttgtaaagaatgacaaagaggaaacccatgaaaaaaagatacaatatatggaagctcacagacgatgacggcatgagagttattatgacatacaaaccaatcgataaatctttaacaatttactgaaatatttgactaataatcttttggttttggaataatgaaccgatcgaccgtcatataaaatataaatgattggatccacgtacgttggtggccgagcctctgaaaacgaatttgatttatctattttgctaactaatcacctaacgtagtttttgtgtctcaatggttgtacaaaagataaagtctcaagaatttattaacaaaagaagtggccacgaagaatggaattttgttgtatcaatcaagcataagtagtaccatagtattttaaaattcgaaatgcaaatcaaatttcaacgtgacaacatatgttgtataatagttaatcatagtaaatagcacacattgcagctaataattggatttacaattgtttgagtcgtacgttttgatctgttgtttacaagaaaaaatacaaagatggaaagttctaacttcaagtgaagttcagatatcgaccgagtcagaacacgacacgaggctcgaagacagaggcatagtgctgagttgttcaacagaagcaagtaaaaaccttttgtctgagagagaggctccgagttaggcataagccaaacaacttgacacgacacataacctttgcttctcgtgtagacccaactttttacccttaccaaaaatataaaataaaatatgcaaaaaacacacccacccaaaaaataaaattttaatgaaagaaagaagaaacttcacatcagcatcagaatctctctttctctctctctccttcttcacaagcaaaaaaacaccaaaccatttttctttcttcattgtgccgacacttctttcccctctctctctctctctccaccgccatggattcctcctatggcgccacaaagttccttctcctcctcttcctcaccacctccattgcgaccgcattacccgataacaaaccagtaccgggtcaaataaactcaaactccgtcctcgtagctctcctcgattctcgttacactgaactcgccgagctagttgagaaggctcttcttctccaaaccctcgaagacgccgttggtcgtcacaatattactattttcgccccacgcaatgaagcactcgagcgtgaccttgacccggattttaaacggttcttgctccaaccaggtaacctcaaatctctccaaacgcttctcttgtctcacattatccccaaacgagtcgggtcaaaccaatggcctgaggagaattcgggtcgggtcaaacacgtcacgttagggcatgaccaagtgctgcatttgagtaaactcaaaggaacaaatggaaagagattggtgaattccgctgtaattacccgacccgatgatttaacccgacccgacgggttgatccacggaatcgaacggcttttaatccctcgttccgttcaagaagatttcaaccgacggagaaatctccgatcaatctccgccgtattacccgaaggagctccggaaatcgacccgagaaccaaccgtctcaagaaatctgccaccgccgtctcagtacccgccggatctccaccagtgcttccgattgaatccgctatggctccaggtccatcgctagctccggctccggctccaggacctggaggtgcacataaacatttcaacggcgatgctcaggtcaaagatttcatccacacattgttacattacggtggatacaacgaaatggcggatattctcgtgaatctgacgtcacttgcgacggagatgggtcgattggtgtcagaaggttacgtcctcaccgtgttagctccgaacgatgaagctatggggaaattaacgactgatcagcttagcgagcccggagctccggagcaaattatgtattaccacattattccagagtatcagacggaggaaagcatgtataattctgttaggagatttgggaaggtgaagtatgaaacgctgcgttttcctcacaaggttggggctaaagaagctgatggctcggttaaattcggttctggtgaccggtcggcttatttgtttgatccggatatcttta

SEQ ID NO: 27847 - DNA, 1583 bp, Arabidopsis thaliana landsberg
  unsure (1)..(1583): unsure at all n locations
gctataaaagggacccgggggcacatggaggagcacaccaagcattcctacaacattcctaagcaccaagacatcaattctgcacctttgattctttgcgatagcaattagagctctagttgagtagtgaactcattgagttgtgttgtgagctctcattgcgacttgtgtgcgtggtgttgctgtgatttcttgttttgagtgtgttactaatccctcccttgctccgtgtttctttgtgaatttcaagtgtaagggcgagaggctccaagttgtggagattcctcgcaaacgggattgagaaaaagcaagcaaaacaccgtggtattcaagtgggtctttggaccgcttgagaggggttgattgcaaccctcgtccgttgggacgccacaacgtggagtaggcaagcgttggtcttggccgaaccacgggataaccaccgtgtcatctctgtgattgatctcttgttggttattgtgttttgttgaagactcctctctagccacttggcgattattgtgctaacacttaaccaagtttttgtggcttaagtttcaagttttacaggatcacctattcacccccctctaggtgctctcaatgttgtttgtgcatctgtcggactctagagtgaagatgaggcgtgctgcatatctgtgtttgactccggttggtgaggtgacaattgcagcgacgcctgcccccgcatggcaccatgcaccgtcgcaatggatggccagatttctctgtggacgggtctggttgagttattggcccagtccagtcgacgacgaagtctgccaggacttgtgacttgatggttgtcctgggctcgaagctgatgtggtagccggatagttcggctgcccatttggcaatcctcaccgatgcctccgggtttctgaataattcgccgagtcccctgtctgaggtgactcggaccttgaatgcttcaaagtagtggcgcagtttgccggaagacataacgactgcgtaggcaatcttctccagctctgtcatgttgcacttggacggtgtcagtacctcggagacatagtaaacagggcactgcctgaccacgccctcaattgtctgctcctgcactagtgccgcggtgacagcatgcggcgacgancngcctagagcatatagggggagcgaggagtcggggcttgtgaggacagccagctccgataagtactgttttagtgaggcgaaggccgctgcttgctccggcccccaagcgaagtctttgcaccgcgaagtgttttgaggaaggggagacttcgctcggcggacctggagatgaatctgttgagagcggccaatctgcctgtcagacgttggacgtccctgacggactgcggaggcgacatgtcgacgatggcctggatcttggttgggttggcctcgatgccgcggtgtgacaccaggtaacccaatatcttgccctggctaacaccgaagacgcacttttccgggttcaggcggagtcgtgcatctcgcatgttcgcgaatgtctcgtcgaggtcggcgaggtggtcctccttattcttgctggcgacgacgatgtcgtccacata

SEQ ID NO: 27848 - DNA, 1982 bp, Arabidopsis thaliana landsberg
ctctccattgggacaaagagcacttttacaaattactacagtattgttactactcttatacacggatcatgaactaaattcgctagactgccatacatagaaagaaaaaagaagaaaaacaagaaacacaatgacaatctgacaaggctaacatttggtttaacttccagggttttttcctacaaatttgttttcattatttcatttggataactagaattcataaaaggttcgtacttgataaagatgcaaggatcccacatggtaacggtgaaattatgtgcctgcatgaaccaagtactcataattagacagacacaatggcactgaagctcaaaactctttcacaactctgaaaactaattcctcagcctatattagtttcactagggccaatcatcctacttgttatgagtcaaacattaaacctgattcggcaagcaagaaattaacataaagcaggaagaagcaaagtcacaaatcaaacatagagctttcaagacttcatataatcaatcgaataatttatccttacatcaatatagtgtcctcacatgcaaaacacttgggaaatggttcagttttctaagtctaactaacaaaaacgagtgcaaaccataaaagacttgtgcaacatagaattgcaaattataaagactcaaagaaggaaagcaaaataaagcgactcacaagaaagaaagcagaaaagagaattagaggtcgggagaggtgcagcagagagtaccctgagtgagagctcggctgcttctggaagttgtgcttaagcatgacgtcaaccgcgcagccgccaccgtgctgtgtagcggtaacagagactgaacacaaccaagctccgacggacacctataatgtaatcacacaaattcatcaaaatgagatcaaagaaatggccaaagtgaagcagatacatggaattaaacactaaacatatgaagcagacctggagaaggagaatcggggaagaggagaagcagctggtttagacggaatacgaaatccggcgaatgaagcagcagccggagaagatccagtgccaatgggagaatttcgaaatgaagatctaatggcggatttgagagacgagacagaggatctgctcatgaatctagaagccattgtaagagctagaaaatgaagccggaaaaagtgagatcgatcttcttcttccacagagtttttatagggttttagaacggacggaggaaagatgatgaggaagccggaaaataaatatctctgtttttttttcctttttttgggtttaccaatctttcagataatttatgggctttaggcccattaacgaaaaagttacgccatctaaactcgcttgatgacgaagaataacacccacaaaccttcacgagggacaagaatgataaggtggacgggtccgtgggtgaaactcacgatttggatgaagcttcccgagggaatccaggagcagccgctgctagaggagcactataggatgaccaaagcaaatttttcaaatctttctgcatgcatcatcatattcttaaaaccgaggtatttttttttttttttgaataaactaaaatcgagatattacatttgagcttgcatgaaatcaatttttctagaatgaaagttagcaaactggtcattatgacttgcaaaaacggacgtgaattcaagcatatctgatatgtgtaaatgttagcaaggtgtgagctgataacaaaataagaaactgggatcgtattactttttcaagattatcaactaagtggaaataattctcttgattgatgtctttgagctggctgaatggtaatgagggagtgaggggttaccgaccctaggcggacaaagtttcttatcaaatcagtagaagacatcagagtagcatttggattcaaacactagatctataaatgaaaaaaaaaaaaaaaaaacttgaattacactaaatctatattcgatctaatgttagtttt

SEQ ID NO: 27849 - DNA, 1286 bp, Arabidopsis thaliana landsberg
ggaatccttaataagaaaagatccgccaatttttaataaatttcttataccatcaaggtgatgtaactatgttagataaatatagattaagggtataaatagagatccctagctgtaaatttaaatttattggaataatatagatcactagctgttaatttctcccccgcatagcatagggtcatagggacaatactaatgatttgaatatattatcaggtctcttgtttttaatgttatttcaaagaccatttcgatcaagagttattagttagtcaagctcaagtcacaatgaataacaaaagattttgcattgacccgaagttgctcttcttgtcttaactcctccaactacaattccatggcggtgtctcttcttctctggactctcttcctcttctcatttatcttctccctccaatcacacagcaaagaagaagaagaagacacaccaatcacacgattccagcaatacttaagattcaacaccgctcatccaaaccctaactacaccgcaccaatctcttttcttcttgatcaagcaagatcaattggtcttacttctcgaaccatcgagtttgttcctggtaagccagttcttctcctcacatggctaggctcaaaccttaacctttcttcaattctcttcaactctcatctcgattctgttcccgcggaatccgagaagtggatacatccaccattctcagctcaccgaaccatcgatggtcatatctacgctcgcggcgcgcaagatgacaagtgtataggagttcagtatctagaagcaatcaggaacttgaaatcaagaagcttctctcctcttcgtacgatccatatctcttacgtacctgaagaagagatcggtggattcggtgggatgatgaaattcgcggcgtcttcggagtttaaagatttgaatctgggatttgttatggatgaaggacaagcgagtcccggagatgagttcagggtgttttacgctgaacgaactccttggcatctcgctatccgagctaatggtatgccaggtcatggtgctaagctttatgataattcagctatggagaatttgatgaagagtgttgagttgatttctaggtttagagagtcacagtttgattgtgttaaagctggtaaagctgcgaattcggaggttatctctgtgaatccagtttatcttaaagctggaactccctgcactactgtaagagcacctccagtcctactctatgtttctctgtaataatatattatataaactcactctatattccatcttaaac

SEQ ID NO: 27850 - DNA, 826 bp, Arabidopsis thaliana landsberg
gtcaagtctcatctctccgttgcgaaagatcctagtaacttttagattgccgaaattcgaattcatgattcaattggtatggatattccgagctctgaagaaacgcctcttttagaatcggtatgtgtttgggtttttgtttcttttctcttttttgtgtaatctcaattttgttacttttgaattttttaggactccgtaccattctagattctccgttgaattcgaagttagaaattgaattggattggatagataaagtcttattctttgataattccgcttgctcttctactcatggatttgttctgttttgtgaattctgtgatggttttgtgatgttatgaaggagaaaaacaactaacactaaacaagctcttatgttacctttgttttcaaacagatcaagagttgttctgcaactactattgaagagcatgttactgagtttgtaccaaatataagctcagggagttatgcagataagggtgactaccgggagtacatggaagatgaacacatatgcatagacgacctttcagatcatcttgggtcttccttttacagatttccggtgcctatggctttctacggtgtgtttgatggccatggtggatctgacgcatcacagtatataaaagagaatgctatgagcttgttctttgaagatgctgtttttcgacaatcgccctctgttgtggactctcttttcttgaaagaactggagacatctcaccgggaagcttataggcttgctgatcttgcaatggaggacgaaaaaatagttagtagttcgtgcggaacaaccgcattgactgctcttgta

SEQ ID NO: 27851 - DNA, 906 bp, Arabidopsis thaliana landsberg
aagtactctttaacataaggtaactcccttagacattcacattagaaagtatcctcttacatataagaatcatgtattcaatatttgatgtcacaccttactctaaacaaacaaatcaaaactatgaaccatataacactcaaagaaaaaaaaacgagaggccgcttaagggtttacactagatttaattccaagcgaagccatctcggcccatcttggacaatgtaatgaaagctactattctattgccagttaatctttcattggacgatccactagtaaacgcatagtttaagatctttcaaaaccaaaaaacaaagctaataaatcaatagaaaatttgttgagtgaaggattttgctttgtatgtttcgtcgatctaaaaagaccaaacccaaacccaaaatggcttttcgtaaatatttcagccaataggatgaggtgactgacccaccaaagacggagatctctatttctcacctcacgatctcatctcatcatcactctctctcactcttgtccgtatattccttttcttaatctcaccgtccgattccaatccaacggtcaacatttatccaactctctctttcctcttcttactcatttccttcttcacttccctctcctcttcacacctctctctcgccgacgacgctacaaccatggcgtctctcgctctctccggctcctgctctctcgctttccctctcaaatctcgatctctctctctccctcgtcctccttcttcctctctcaatttgacgaaacctctccgatctctcgattctcgcttctccttactcaaatctccacttcccgtctctttacgccggagatcatcaactctcgttaaagcctcttccaccgtcgcttcagcttcctcttctccaactcctcctttgg

SEQ ID NO: 27852 - DNA, 4547 bp, Arabidopsis thaliana landsberg
catgtacaaacatagaactaccatggaaggctcttatatgaacgaaaaagaataaagaaaacttccaatagacgctcttagatgcatatttgtttgaaggtcacaaaactgttttacgagaacgaaagcctagattagcaaggatgacaaaaaaatcaacaatgtcacaaaacacatacctcgtgcaatcaggacccactgcctcacaaagttcatatagctgattagcaaccatgtagcgcaccctccaagatttatcctgctctcagaaatcaatacaaacaccatagaaaaacatcagaacagcaagcttttaccgatgaaaattaaacatggaacagcagacaattaactgaaaaatccatgaatgaaaaaaacaaagctcaattcacctgagagaaattaacaataacaggtaaaatgcgtgcaacacaatcctgaggttccaacaactttccaagagctgcacacccttcaacagccaatagtctcacagaatcttggtctgaaatgaaggttaaagtttaaccaatataagcacagataaaacaaacatttctgaagaggtaagtatccaatatatttcatcaaacagcatttattaattcaaatgtgatctctttaccatactcttgggtctatgcaaactatttctaagtgatgagcacatataaagtacgatatattcaaacattaagtaccatctttagtaagatcatcgaacatagtcatgatctcagcaatcaaaaaggtagactcgacagttgtagcaaatttccccaggttagatgcagcagctcttcgcaccattggcatatcatctttgcacaactggctataagtagcccgtaactcagtcttcaacacatcagtgcaaccttggtatgcaacatgaaatataccacatgcagaaactcttgctgcaaaccattcaccacccgctaacctctacaagacaaacaacaaaacaaaaaaaaaagctttgattgaaccaactaacaaaacggcgtaatctagtgctacataaatctcctaaactaaccttcacaagaggaacaaaagattcaacaagatcattctctttcatctgagatccaatcttacaaagcgattccacagctttttctctcacacaagtctcttcaacagtacatagagattccaaaggaggaagaagaacatgcgcaaactcaattcctccaacaaacggaataaaaactcctaactcctcagccattgcaagaagcacctcatcgtcatcgtcactattctcactcaaaaaagggattaactccttccttgtacgctcctctccaagagcacgagctatagtagataagcgacggatcgagttcaaacgaagctgaatatcatcattcttaagctcatctataagcacagcaatgggatacaacggttcatctaccatagccatcttatgtgaaagttcgaatcaaatcactgcaacaccaaaaataattcctatgagctcattgctataagagacgaaacaatagatattttcggatctcgaataaaatatttagtaataaatacgagaaatcatttacagatcctgggaaaaaacaattatagccactcgagtgttatcttcggctttattgatttttctctacttgcacaaacagattaagactatactgcagattttgaaacgaatcgggtatgaataaaacagaagaagcgagaaatgggttcagattcaccggttcgaagttggattaaagggaatgtgaatcggaaaatgaaggtttagagatgagatcttatgattcgttaagaagaaactggaaatcaacttaccgatccaggcgtcggagaagaactgcttcagattcccaggagcgagaaaaggtgagaaagaggaattcgcgagcgagaaaaataatattctgcgtttgattttattttacgaaggatttattaaagggaaagatataaaatgacgaaagtgtctaattgggccatattgggctttcttaggattgggttatgttgggctttaatcaattttttgctttaaaaaattaaacagttgattcaaattgatacaatgaaagaaaaacaaaactttccaattgagtttatgactttgccaaaacaaaacaaaaaggaattaggaacttatttcaagacagcaaacaaacaaagcaataatgtatataattttctatacaaaatcaactatatccctggagctgaagcagctactgagtctggtccagagtccagctttttctatatccgtgtctcgctaacttgttctttgaaatcggctttagtgcttagttcctcatacgcgttaacaatattttggagccttgcaacaaactcgatcaaaagagacgcaaatgtagctagcgacaaagaactcgcactttcatatactttggattctatctcattgatcatagaaccgcctatgaacgagacgcttggccagttttcgcggttcctaagcatcatactctctgttgatatccatagctgagaatcattaccagcgtgttgattctgatgatgagggttgttgttattgtcccatatctggctgagggattgaatcactttagactcgtcgtctttggcttcgtgatagttttgttgcgcttcttcagcttcggctttctctttcatagcagcccagctttctgagttgacaagtaggaaggagttactgtctattttcatctgtagttcctctgctgctctttgaacatccttgagaacgttccctgggcttagcttctccattttctccaccttttctccaaacaacctcaagactttggctccttcgtttccaactctttgaagttcttgacgaaaagcctgccttttttctggagctgcctgcaaatcccacaccaattgatatcacaagtcttatagggcatacgacaagcattgaactcaaagaaaaccattcactagtaacaacagtaaactaggagatcccactttgcacctactcaacaattatatgacaaatatccgacttctcagagtaacagtctagttaatcacgaagaggtactagtagcatttgaagcaggttggtatagtctctaataaccattatagcacctcatttgctatgatagataaagttgtatttaacaagaatatggtaagttacctgaatttccgaaagaatgcagccatgcattgccatgaccatgaaagcgcagtgccttactgcgccactaagtttgacgtagtttgcccatggatggtggaaagtcttatatggtccatgtggaggctcccatactgcaaaatcaagctgaggaaaaaagaggtcatcgtatcttatcatctaaatccttttcaagttatctagttgctgctcaacaaaagtgtcctaaggaaaacacaccagagaatcttcttggctcgtagattggactacagacctgtatccactgtataatggatcatccgaagcttggtaagtgagaatcttcgaaggaatcctctcgtattcaacacattgcaagtacccattaacacatcctgaaagttttaggaaagcacaaacaaaacaagacataaaaaaacagccaaaacccgaaacgaaacaagagaaaacagccatttgacgtatctctctaccttcaagtgaattggccacacttttgaaattcttaacaactagtttatggaggtcttctccagcccaaatgggaagtataaatatgttcacacccaaacagataccagcaccaaccaggataagcaaaaacctataataagcagtgctaaaaaaatctctagagttgtttccagacacaagaacaatacagtatgtcaacaaaaacaccctgaatgcatattcatacgacttcatcgccgggtatagtttcaaataacttgcagaaaaacctgatagacaaaccaacagattcacaagtatcaaaaataaagttagtatgtttatttaaaaaaggttcatttctaataaaaattgagagaaatagtgcaacctgcaatgaaaatactgataatgataatgagttcttcaaattctccagctgaaacagagagtctagctatgccaagagcaagtcctccagcagagagtgttcctatagctctattaaatcctttgaccaatgttgctccttcaaaaaacagagttagagccaaattagatctctgaagacaagtaatcctaagacagatctaatgagaatttagatcgaagaagacgaaagtttagatttttaatcaaaatccggaagatttgatcgaacaacaacaaccccagaatcgatctgaatctatagaattcgtgagtcacagtacctatactatactcaaagacgacgacaacagtaaggatcgcccaaacagcatacttgctagcgtcacggagtggttctttaaggtagatgacgaaagaacagagtgcgagagccatccccatcttaacggagaagtaaactttccgacgatcggaacgacccatctcgtataatttagcaccgatgtcgtataaagctttccaggaagcagtgatccca

SEQ ID NO: 27853 - DNA, 736 bp, Arabidopsis thaliana landsberg
tgaggctttcttggaggcagacttctcgttccttctcttcactcttcctggacggccaccaccgaaggactggtgagggcaaagtcaatgtgcttctgtgaatcaagtctcaccatgaatgatggaatgttcaccaattgctttccaaccctacaacaacacccgaaacaaatatgagtacccaatttttaagatcatatcaaaacacacttcatattaagccactcaagaggcacaagttatcaagacttgcgtgaacttaagagcaaccaataaaacgtttgaagaaagatcaaaccaaaagacagtacaaactcatgaaagactacaatctgttagaccaaagagacagtgtttaaagaagtgtaacacaaagccgaatcattcaaagataatcatgaaatggaaacagagaaaatgttaatttcatttcagatcctatcaattgatataacaaagataattcatacacaagcacaaataaatcgaagagatgcaatacctgatatgcctctgcctgatgaggacacgagagtgatggatagacttaaccataccagacttgaacacaatagtctgaagacgacgctcaagaaagttctcaacagtcaaagccaagacgtaatcgagcttgttctggctctcaataagaagcccgtaacggttcattctacggagcaaagcctcaccttcaaagatcctttttggactcttctcattcagagtcaaaagatct

SEQ ID NO: 27854 - DNA, 1766 bp, Arabidopsis thaliana landsberg
tttgtgttctgttgtgctcattcgtcgcagatcatcgatctacctgaagaaatcggaatggtacacacgcccaaacccaaacttgttggtgagaacgatagtgtctcacaattccaccagtgttggagatgctctgcgttatatctatgaacaacagacagagacgtctcagattcaaggtgattttgttcttgttagtggtgatactgttagtaatatgccacttgctgatttgattcaacaacatagagataggaagaagaaagatgagaaagctatcatgactatggtttttaagaagcagtctagactaggaataggatctgatcaactctttgttgcagtagatcctttaacgaaacagcttcttcattacgaggaatgtaattcgagaggcggggacttttgcttagataagtccttgttggatagtactgttttagtatgcagtgatatgcaggattgttacattgacatttgttctcctgaggtgcttagtctctttgaggataactttgattatcagcatatgcgccgtcattttgttaatggtttgcttgttgatgatattatgggttacaagattttcactcatgagattcagtcgagttgttatgctgcaaggatcgacaatttacggagctatgacactgttagcaaggatataatccagaggtggacatacccgtacgtacctaatatcgatttcagcgggaatcgccctgtaaagctcgggagacgggggatataccgggcttctgatgcagttcaatcacgatctgcagatgttggagcttccactgtcattggatacggtacgaaaattggtaatggggataaaatcatgaactcggttattgggaatggatgctctattggatcagatgtggtgattgaaggctcatacatatggaacaatgttactattgaagatgggtgtgagataaggaacgctattgtgtgtgatggggtgaaaatcagagcaggagctgttctgcagcctggtgttgttttgtctttcaatgttgtagttggacgggactttgttgtgcctgcatactcaaaggtttccctacttcaacagccaacgacagaagacagtgatgaagagctggaatatgctgatagtagcagcgggactgcggatcatttgtcaggcctaaatctgcaaatggagtccaaagcatctgagcttggtcctgatggagcaggttacatatgggaagtatgtgaaggggctcatgatgaggagtggaagcattctgttgcaccaatccccaaggataaactttctgagattactcaggccatagacgatgatgacacagatgatgaaagtgtcgtcccgacttctggagagttgaaatctgatgctgatagtattaacactgatgtgaatgatcccaatgatgattactattactttgagaaagaggttgaagggaccgtcttaagggctgttgaagagaatatcaaagtggaccttgtaactatggagattaacgggctgcggttgtcattcaacatggaatctgcagattgtgctggagcaacatttttctcgatgataaaactggcacttgatactccacacaattctggtagtgagttgtataaaaacgcagcgagtatcattacaaaatggaaggatcttcttggcttctacgcaaagaaaattgatgaacagatagaagtgatcatgaaatttgaagagatgtgtcaggaatctcccaaagagttgggccctttttcacacaaattctaca

SEQ ID NO: 27855 - DNA, 1714 bp, Arabidopsis thaliana landsberg
cgccttatgatgcgatgtgtgcttcccgagctgggtatagaatgtttgtttgtcatattatttctgatttatcccgttgataagaggttcttcattatctgactcccgcatttgaccagtactaaatcaaactgctgtaacatttggtaacatatgcattttttgaatgtagttgcactgcttggagaaaaatggtcgacagataacaaagatggtgtcgtactgttcttatcacaggtaaatgctcttaataccttgcttgtaaaatcttttccatttgattttgtgtaatgaatttgttctcttttttttggtgtagggctccgaatccagatactgtgttaattatacagacgccttcaggggtcttttctgcgaaaagtcttgttcaaaataaaaagaaaacgggtacgaggcttattttagcaaacagagaagaaattgaagagtctgccgcagaggataccatagtaattgatccattttcttctgctcgttgtcgactatataaaagaacggttaatagcaagaaggtatctttgttgaaccttcaaaaactctgtatgcataggtttaaaattcttttttgcttagaagactgatgcattatgtgggtgtttgtgacttttagaggactaaagaagaaggtattcctccctacacaggaggaatacgtcatcatccttacgcagcgatccaaactttgaacgcattcagggtaaaaaataatctttctgtagtgccaatatgcataatgcacctggaataggcaacttgggactgagtcattttgttgaatataatttgtagcatgtggcagaagaacccaaatcattttcctcgttcagggaacggcttcaccacttgcaggtaagcattcctcgcatatctgaaggagactgtactatatagttgtatcttgttgtaataacatctgacaagtttcatgtgttgtgacagaggacagaaatggaacgggtctgctttggtcgatctggtatacatggatggggcctttttgcgagaagaaatattcaagaaggagaaatggtaagcagagccatcagaacatacttcttccaagaaagacaatctatcgaatttcctctgttgtgttgaagaatgttgaaatgtaatttcttttcaggttcttgaataccgtggggaacaagtgagaggaatcattgcagacttaagggaagcaagatatcgtagggaagggaaggattgctacgtgagttgaaagtgatatatcccttgtgacagtcttaacatgtgtgcatagagttctaaaactttattgttttaaatttgttgcagctgtttaagatcagtgaggaagtagtggtggatgcgacagagaaagggaatattgctcgactaataaaccattcggtaagcaacccatcaagtatataaataagttgagtgattaccaacagattagagtcttgagtcctatacctaaatggtgtgttgtgtgatgcagtgtatgccaaattgctatgcaaggattatgagtgtaggagatgacgaaagtcggattgttctgattgccaagaccactgtagcttcctgcgaggagttaacgtatacacatcactctcttgaacataatttaagtatcaccctttgattcactgaatatgacatgcctgtgtgtgggtttgcaaaaaaaatttcatgtttgatccagatcaaccgtatgaattca

SEQ ID NO: 27856 - DNA, 1472 bp, Arabidopsis thaliana landsberg
agggaagcgagaaaaaactgtaggggaccaaagaaaagggagtgggaatctagcttgcaaatattctaaattagccagctaagttgtttgaatgttactaattaacaactgtttttattaattatctcctttctttaatcacttccatttattctttacgtcttaagttttaatgtgtgtgtaataatgaagtatgtagtactttattttctctgtagattagagatctctccaattactatatagtctatagtctatagcattgtacagctcaattctcgtctcgtgtagtctttaattaaccctatgtatctgcttctatacatctatatatgataaaggtaagtaagtacacatatgatgataatattccaacactacataaataagtacattggctaaactgagtcatagcctggtttttggttttcgctcaaaaacttaggcactagattaattttcccaaaacataatcttttgttatatactagtagtagataatagtaaaaaatctcttaacaaaacaatatttccctgcatcagtcaatagcagtttgcaccaccatacttgctttgactcattccctactccgtttgctttagttccgctacttttacatcaacgaatgaacactcgacacgtgtaatcagtgtttcccttcttcgtactagttggtgtgaattgacgcgccggtacagtcttttgtagtccgtcccaacggaacccgctagccgagagagagagagagagacactttgacttttgtttccgttattctagatgctcacgagtcggtcagactttgcattttcctaacatttgactttgcatgcaaaaaaggcttttctaaaacacgattagtttctttataatgtcatggactaatctgctactgtactataatagaaatatcaaacaagtcaataattgtggaactaaagtatgcacaatacttataagaggaatcacactcatgttgcatggccacagataatagatgaaattaactcggctcgacaaaacaaaacaaaacatcaactatacttctaattctaaatagttgagatgactctaataattgtatattagattttactttttagaaaagcaaatgtcctaattttatatgaacgtcattttgtctgaatggaagcttcatgtaaagtttctccttttgatgtcactatgaatatttttcatacccatgaatatctcgtgtctcaccaaaatcccaaattaaaataatcgaacatatcaacatagtgttcacaacaagctacagtatactcagccggtcagtataataatctaattaaagattgttgcttaaccttatggataggatggatacttattattcgcttttggattatgcagaacaagttattgtcaacaaaattggagtatataaacagacatatcatcaaaacatgtgtgttcaattgtttgtttcctcttaaagagagggtaa

SEQ ID NO: 27857 - DNA, 1021 bp, Arabidopsis thaliana landsberg
agtgaaaagagagtaggtgataaagtggttggcagacatcgaactaatggttctgtgcaacgagtttcgccagccacatcaggagctatatccgtgggaggtctctctccagatgaagacaaacgaggagatcaacggaagctacatttcgttaggaatgatcaggagaggttcacgcttcaggatatgctccgtgcatcggcggaggttctcggaagcggcggatttggatcttcgtacaaagcggctttatcgagtggtcgtgcggtggttgtgaaacggtttaggtttatgagtaatatcgggagagaagagttttacgatcatatgaagaagatcggacgattgtctcaccctaatctccttccgttgattgcattctattacagaaaagaagagaagcttctcgttaccaattacatttccaatggaagcctcgctaatctcctccatggtaatattatggaactctctaagtgtctgtttatcttcatccaatgaaatgaggaatctgatgagttttgttggattgattttgcagctaaccgaacaccaggtcaagtggttttggattggccgattcgattgaagattgtaagaggagttacgagaggattggcttatctctatagagtgttccctgatttgaatcttcctcatggccatctcaagtcttccaatgtgttgcttgatcctaacttcgagcctctacttacggactacgctcttgtcccggttgttaacagagatcaatcacagcagttcatggtggcttacaaggcacctgagttcactcagcaggataggacttcgagaagatcagatgtgtggagcctgggaatcttgattcttgagattctgacagggaagtttccggcgaattatctcaggcaagggaaaggagctgatgatgagttagctgcttgggttgagtctgtagcgagaaccgagtggactgctgatgtgtttgataagcagatgaaagcagggaaagagctccaagcacaaatgttgaatctcc

SEQ ID NO: 27858 - DNA, 1493 bp, Arabidopsis thaliana landsberg
  unsure (1)..(1493): unsure at all n locations
aatataaaattgtttgctataggatgaccttttaatagctttcaatcgtgtttaaacaaagggaccaggagctatcgcaaacaaaaaactaacaccaatgtctaaatatgttttggtctttgtagcagcagctagagtaataatactggtacaaaacaaacaaaaacattgaaaagtaccaacatcacagacttaatcttcctgattaacttcaaggttcttcagcttcgattccagctcaccattcccattaccttcgttctcttcatcttcttcgtcttcctcatcatcatcatcttcttctccatcaggatcattctcatccaaagctccaagtaactctggggatttcttgaatatctctttcaattcttcaatgccttcttctgatatgatgttcccgtcaatgttcaacagcttgaaagcttctttcttcacaacaacatgagccaaggctcgtgctccggctcttcttatgtagttggtgctcatatcgatgtattgcagttttgagtgaccctcttctatacaatttgcaatctggacacatccctcatctttcagctcattctcagacaaattcaacttgttcagatcttgttttgctgcaacacaggctgcgatagctgaagcagcttcaactgttatgtcatttcctgccatctctagaacttcaatgggcgaagcagactcctttagagcgtttactatggctatggcaccttcatcctctagatttagataactcaagtaaagctcagtcatgtgtttgaagcttgaaagagttttgctcaaagaaactccggcttctgtgcctaacatattatcccgcagatcaagtttctccatatgagtacaatgctcaagtgcttttgacaaggcgattcccccttttgagccgactcttgtggaagaacaacggaaattctccagcagtggggaacgcttgacaacctctgcaatagcgagtgccccttcatctcccgtcatgttattatgaaaatgaaagaccctcaaattnnnnnnnnnnnnnnnnnnnnnnnagaccgcttgcgcagcttccttagagataccatcattcatcaaatacagctcttccaaaggagctcagagattttaagagtgccccaaacgctctaacacccttctcacccaatgcattatctgataagttgagagacgagagaatactaccttgcagtgcgtcagaaaatatattcataacctcaagagcttcaagctcaggtcgtccagcaacaaagtcagacaagtcaacttccttaagctgatctttcaaagacgccaagataggctcagcgacacgagcagctcccaagccaaaactcctattactaaagcatatcttagtgtaggcattgccaggttccttcaaaggtttgagaagctcctcagcttcctcagcctcaatgaaagcccgtttacctttagaaatatcgaaaaaagtttcgcggggagtcgcagaatcctcagaa

SEQ ID NO: 27859 - DNA, 1087 bp, Arabidopsis thaliana landsberg
catcgccgcgatggaaacgaatagtatcgaaagtcccgtgatcatctttgtcggcagtgcgaccaaaaaatcgtcaaaggagtatctcgcggtgagtatcccgaggaatatgggtacggcggtgcaagcggcgaagcaagaaatcaaatcggagacgatgaatatgatgaacctctgttcatataagtgaaaggggttaccttctgaattgtcgtcggagccaccagatacggtaaagaccgccgcgaaaatgaccgtgatgatgagagccgcgaaagtgaccatgacgatgagagccgcgactaagctgcatgacatggctgtgtctttcatccatttctcggcttcttgtcgcagtccttggtgctcctttgcaaatatctcgatcggtgtttgctcttctgtgtttactctctccttctcgatctctggtgcaattctctccacttcctgcatcattaaggccagatttatttttagagctctgtttcctctgttttggctatgcatgagagaaatagagcaaaccttgaaccattgtaactcgcgttgcatctgcaacgttgcgctaacgaccgtagcgagcttgtaattaggaggaggatagccagcaagatgaagcacactatttccgtcactgtccttgtcggcgagaaacaagtacttcctgtcgcccagaccgtagaggagactaaacaccttctcttgtctgacctggacggcagtgttaaacagagtactagttcccgtggaccatagaagctcggagttgttcttgatcatctccaccaagaaatccacattcccatatcttactgcgaagagtaaagcctcatctactgactcagaacgttccttcaagcccaaggccaatgtttcttctgatattccctttaaaagtttcttggcttgtagatgcatgaccttaagtcggtacacttcatctatccctgaaacatcactcatcaattcagttatagatgtcatgtgagtgtgacgcctatccaataactgtattcgcagacgaaaacctaatatacttaccggtacatttggagagacatttgagcactttccccatcagggt

SEQ ID NO: 27860 - DNA, 1499 bp, Arabidopsis thaliana landsberg
aaggagaaggaataaagcgggatttagggttttaagcattagtcaaatgtgtcataactcataacaaacaaaagtgtgtcgtcaagtaaagctgtgggatcaagtaaaggacaaaacaaactgtgttttttttttttttaaatttaaaattctgatagacagtcaaagcagcctcaaatcagctcacaagcaacttttcaagttagaagggttgctctctttggtcaatctattttacagatttgattgataaataaacgtgaaaaagaaattttcacctgtggaaacacaaaagataattagtttatatacggaagagcccacaatggctgcaactctctcatatgttccaccattttcgcttctccatttgcttagcaagttcatgtgccatggatgcaaagttctcagcattgtcttgaagctcagctgtgcgttggctgattctctggcagataaaacaaagaaaggagatgtttttgtagttagcatacatagcttggaaacataaatgaagatgaaatctctgcagcgtaatatatgacctcgagtttttctccccgctcatgaagtttgtccttcgcttgtgaagctattgctgaggtttcctggaaaaattacccaactatgttagagatggaagcacaaaaaagaagctagttgggtatatcaaattggtcatgactcaccccagcttttctgtatttggacttaatttcatccactgttcttgttttgggttgtgcatcgctggatgcaccgtcgaacagcttttccttatccgttctcttatctgcaaagaaacctcatgaatcgtctcatgcattcacaatgatactagaacttgaggcgtacagatcttttacctttcttttcttttttggctttctctggcaacggcaagatgatcacaggttcatctatctcgatgtcatctacagaaaacaatttttagtcagaggcaggaacccggggaggagtaacttagtgtagatattacaaacctatgtttagctcaacaatcttttcgtcgtcgccaccggtatcagaaggttttaagtatggtggattagaaaagatgttccccaggtgggagaaatcttgtacttggtccatcttctgttcagtgcttgatctgaagcctttgataatgttacttaggaatttgggagcgccatcctgtggtcacagaaacttttctagcaaaacagtggagcttacaaaaaaagggttcacatgtgaaagcagaacatacatgatttttcttatgaacagagatatggctaaaggtagcgtcagcagctgctgcaaggactttgtcatgaagcaaaggtaaagactctgggagcctgagatgaatgaagagttaggtattggttctttaatttcaactttgctagctaagcatacgaaagttctatggaacagcaaccagtaagccagtacctacacccgtttgcgtgggccaaaaacgaaagaaaggcatcttcacaaccatt

SEQ ID NO: 27861 - DNA, 3859 bp, Arabidopsis thaliana landsberg
aagtccgtcgaagcaatactcttccgttatgttcgttacagatgaagccgaaatcgtctattttctcagctcttacggaacaattgtagcttgtgatctcactaaacgatgcttcaccgagctaccaaagcttcttcctccgttcctagagtactccatcgacttggtggaatgtgaaggaacaatgtatgtgattcttctctctgagttctttgaaagcgcaagtttaaggatctggagacttgacaataaccgggaatgggttcaagtcgggatgttgcctcccgcgttgtctcatgagttatacggtaagaaaggcgacataaactgcgttggaggagctggaaacaagatactcgtgtgcttcaatgctagtcctccagaagtgtattgtagatactttgtgtatgatttagttgcagaagagtggaacgagttgccgaaatgcttcaaggatggagaagctgtggattttgtttccgctctttctttccagcctaggatcgaggctacagtttgaaattttttagcttttattgtatggattgtgtgtattctttctattcaggaaaatgcaatgtaacttgatttgtaatctgttgacattggttagaacaggaatgctctgttttatgcaaaaaaatatcaatgctctgttgaaatttagctttactttccagattcaaactaccaataatcaccacatgagcaaataccatccttgaaccggtgaaaccggtttgcatctctaagtacaatctctctattatacacctttgctatatatttcatcgcgttgtgacaatctccacagacgcgtagattcttaatcacacggattggtgtggatggaggagtgctcaaaagtccgaaagcaactgctagcttctcactgtggtagtacagggcacgctctttctcttcttcttccacatctacaagtgtgaaatctgtctcaggaacatacccttcttgtttgatgtctcttatcatgtcttttactttcctgtatatcaactcggtttgccggtttgacctatcatccacgacaaatatatgtatcttgtttttcacctcgatccaactgaaacccgggtcttttttcactttgtgccctttcatcatcgtccgggcaagtttcatctcatcccatttggaagcagcagcatacatattggataaaagaacataagctgatgagtccagtggctctagctccaaaagcttagttgccactctcttccctgtttctgtgtccccttgaactcggcaagctgcaagcaaagttctgtacatcgatgctgaagcttccatggacattgactcgatcaaattttcagcctgtttaacaagtccagcacggccaagcgcatcagccaaacaagagtagtgttctatttcaggtttaatgccatagtctccatgcattgatcgcatatgcttgtatgcctctgataccaagcctgagtgactgcaagcagaaagaacgccgataaatgtgaccttatcaggttttatacccagagatttcatctgtttgaaaagctggagcgtttctttcccttccccatgttgagctaatcccactaacatggcattccaggcagtgatgttcatcatctctattcttttaaacaaacaatatgcatcgtctatgcttccacacttagcatacatgtccacaagtgaagttccaacgaaagggtcattcgtacaattcaacttgagggcatttgcatgaatttggcgcccctgttctaatgccgtcaaacaagagcttgctttcgcaagtgtggctattgtaaattcatcaggcaacactcccatgagcctcatctggctaaaaacatgaaacgctctttcttcttctccattttctatgcatcctgatatcatagtcgtccaagcaacatcgtcaggtacgggaatactatcaaaggcaaattgtgctgcactcatatcgccacattttacatacatatccaaaatcccactgctgacccatagatctaagtcatatccagatttgattgcataagcatggacttgctttccttgatttatggcaaacaagaaaccacatgtcttaaacactgttgcgagcgtgaaatcatcagatctctctccctgtttatgcatcaaagcaaaaagcttcagagtcttatgaccgtcatgactttgggtataaccagccatcatggcattccaagcgacgagatcaaaattatgcctctcaaacaaaatctctgcctctttcatacatctgttccgagagtaggcatcaatcagagcagtagagacaaaactatcagaaacattattgattttaattgcatgaacatgtacttgtttactcaacgacaagccttcaggaagagaagaagcagcctttagaacactcgtcatagtatactggtctggtttgaagaccgcaacgtaacagctgcataaacagacacactgcttctacttctaagccattttgagctattccggcaataactgaattccacgaaatcaaatctcgttcactcatattgtcaaatactgtcctagcgaaaccgaattttctcagtttacagtacatgtttattagactattcgaaacagtaagcatcaaatcaagtcctaacttcaatgccatacaatgaacttgctgccctaatgctaaactatctactttaacagctgtagctaacattaaaataaatgtgacttgatcacattccacgtcggactctaccatatccgcaaaacatttgagaagagctgaatactggcctgaatggagatattcactcaatcctttgttcctgaatattatttctgaaacagaagaagcatcattaccatttgcaaaggatttcacttgtcctgcatcagaatcatcacctgaaattctagcaagtaaacgcagagtgatttcattgggatttaaaccacttgaatgaaatgcagaagagaggtctattgcttcttccttaaaccccatttccagataagccttcaacatcaagttccataacaccacatctctataaggcatctcctcaaacaaaaccttaccttccttaaccttaccaaacttcaaatatatgttaacaagagctccggcaacaaattcatcaccgtccaaaccaatcttgcaagcatacccatgaaatgactctgaagcccacacatacccagaatgcaaacaaagtttcaacattggagacagagtcattcgactggtatacacaacgtcctggcgtaatatcctgaaaagaagaaaagcttgttgaatgttctcgacaacgcattcggaagactgagcataggcagctaaaatcgagttccaggaaacaagatctctgtcaggcattttatcgaacactcggcgagcataagtgagtgatccacacttggagtacatggagatgagattgttaatcaggaatcgttctgggttttcctcgaaggttaggatacgtgcgtgtgtacattttccgagcatcaagtccgacgaggtgattgcattccgaagaaagccgaaccattgtgacgaagacgaggaagatgaagacggcgaagcagcagaagtaaaacgcagaggacggagacattgaacaatgagagatgtgtgaaaggagaaagggatggccttggaggttgatcgcatgatcgggttaaaaatgtaaccttttaaagttgagaggtgttatcttgcaaaccaagcaactcatgagatggtaaccggtttttgcgtaatcttgtctccggagattccaattagcatttgaccaaattaattgagatcaaaattaaacctaacaaacaagttttcttatttaatcgacgcttagacaaccaattaaag

SEQ ID NO: 27862 - DNA, 1372 bp, Arabidopsis thaliana landsberg
  unsure (1)..(1372): unsure at all n locations
acatacgcataatatgaaattttcaattcctattcctttctaattcattttactactacgcgtacggattcatatatacataaatacatattttaaaaaaaaaaacatatttgtaaaacattttaacccatgatacagaaacatatataagacaaaaatacatcttatgaatctatatatcaacatgaaccaagttttatgatattttgttcaccaaaccgaatcgtatgtagtacataaacaaaatgtctctgtatttgaagaactttttaactataacgacaagagcgtgtgccaataacagaagggactttagtgggcgattaatctcgttcatagattttggcttttgatttttcaaccaaacttcgagccaattacggtttttcgttttatattcctgttgaataaggttgacgatagttgaattttcaacgattctattactatcaaatatttttttctttccactatgttagaccatgttcttgatgttttatcacgcggtcttgacatcaaattctgataagagagtcgaccaattacaaagcccgtttttggtatatttcatagcaaatataaaagttgtttatttataccaaagttaaaagagaataagctaattannagtttcaaagtcttgttacacaagataacattatttctttgatttaaattcatatttgttttcatcggtttagccagttactacaaaaagggatcattttaaatcacttattttaaatatttgtattacttataattgatgtaaaaaaaatttacatcacttaaataaatgattcgtatcttgttaatacaaataatttacatcgatttattaacaagtgatgcaacttttccataatatttgcatcgcttgttataactgatgtttattttgagtcggttataaaaactgatgtgatatttacatcattttctataagtgatgtaaataattacatcactttgcataaacgatgttagtatttgcaacggttataaaaactgatgtgatatttacatcatttgctaaaagatgatgttaacatttacttcaatttatttaagtgatgttaatatttgttttggttaaaataagtgattttaaaaatagtaatatatttacagaataataatttttagaataataaaaaattatttaaaaaatatattttataattattcttttatttgtttcatttctaatatatataataaatcatggtagatattttctcccaaaatcactcgttgcaatatctactaaaatcttttcaagattttataaaatacattttttaagaataataaatttttataacaaaaataataataattggatgttcttcatgtttaacacattccttca

SEQ ID NO: 27863 - DNA, 1914 bp, Arabidopsis thaliana landsberg
gatatcctgttcacgagataattaaagaaatggccaagaacagaccaattgacacgttatggatagaagggatataagggtaagaattactgttccccttgttctatataatagtatcattagtgtagacaatttggattacaatggcttatagtagttatttgaagcatctatgaagagtgaggcttttataagggcatttgatgccatcttcaatccgtatactgctgtggtagactgggtctacattttatggttcgtaatatagttttcgtttactttttcatgttcaattagatggttgcctcgtatatctagttttaagagttcttgttcagctgagtgcttctttatacatttagatggttctctgtttttgattatcaacttatcactggtctctaacatccctttatgacctgccaaagtagttcaacttcttttcacatatggatgttggaagatgtctgatacatgcagattttttttttttgtttcggcagtgttggtattaaatgaggttgacaagctctcacgagaagctcaacattctctgcggagaacaatggagaaatacagctcatcttgccgtctcatcttatgctgcaacagctcttcgaaggttaccgaagccattaagtctcgttgtctcaatgtgcgcataaatgcaccttcgcaggaagaggtacataaaatcaccctatgtttttgtaaaatattgtttatacaataaaggaggctttgtgtttagttcggtgttgagaaaccacatcttgttttgtggcttttagtggctatcttagagcaaactcatatcaaatcctgtcttaaaaatgcgcatcctatgggagatgagatctcgaaattgcatttcgtatttttcctttaaatcaactcgatgtagaaatcgatttgtacgtattcttgtgtacatttcactagtttggcaagaaaaaacaagttaaattgtctttatatatctgcttttatccgtactgagaaatttttcatgactgtcggcgttcttgtgattatactattgttcatgtgatttaaaaatatactattaagaatctgtagttgctatcagaaatattacctaagattcagtgtttgcttcatttggcctttgtaaactttcttgcgaaaaccagtatgcaagattattgttaactaaaatgtagctctctggtaccagatagtgaaagtgttggagttcgttgcaaagaaagaaagtctgcacctgccccagggttttgctgctcgtattgctgaaaaatcaaatcgcagtctaagaagagctattttgtcacttgaaacttgtcgtgtccaaaagtaaggatcagaaactttatatatgcagataatcaatgagtttgattcttttgttgtttcatgtttagaaaatttaacgttacattactttcaacttgatattcattttttctttgtagctatccgttcacaggtaaccaagtgatatctcccatggattgggaagagtatgttgctgaaatagcaactgacatgatgaaagaacaaagccctaaaaagtcagactctagtgaatcatttacttttacaaaatagaacttcaaagataactttgactttatcatctcttgtgtgcttcttcaggttatttcaggtgcgtggaaagatgtacgaattactagttaattgtattccaccagaagtcattctaaaggtcttaaacataaccttattcacttatatataattatgtatttgggtccctttctctttcattttactcacagtttatgctttcccagagactccttcatgaattgctgaagaaactggactcagagctaaagcttgaagtctgccactgggctgcatattatgtaagagtatttttaaaccgctcttagtcttagattgcgaatt

SEQ ID NO: 27864 - DNA, 2088 bp, Arabidopsis thaliana landsberg
  unsure (1)..(2088): unsure at all n locations
gaactctaatgaagactgtcctaatatccagagagggttcgaagtttggtggagacgggcgttttggagacggaaagaacagagtcaagagcctgctcggctaagagtcaccgcttcagccactgaaaactcctaagagatctctcaggtctgtttaaccttgtgtctattccccggctacctttgcgctgtttcttgaggatcaaacaatgaggaagcatatgaatcttaattcaaaagagaaggcaatgatgaatggagatgtgttagatttttcggattttattacctcgaccacggttagaattagtatgatacaagttttgcatgaacttgatcgtttgaaagtagttttcatcttgatgagtcggagctcctttttgtacatctctctgaaattttcttcatctccaatgtcttagaagaaggaacttttcaagtttaacccgtatctatgctctctacttttggtacggttttgattgagattctaatattggtaggtttagcacacaatagattacggtcttgtgtgggcgttttcttcgtcaaagtgcaaaccaagatgccatccatattttgacggcttaaaagtccagttctgtgattgcttgtatactatatattcgatgctttggagattatacatcatgatttagggtatcaggtcttctctcgaccttaatgtcttcgtccaacaacacttatcaattatatgtatcaagatcagtagtgatctgaaacaaaattaaaaggttaagagagatttgaatgtgccaagctcttagttgatctatttgggaagataaatttgaatttctgcaaagaattaccaagtatatgagtttgattaaactaaactccctagtccagagattcctgctaaccaatttctatagtagagtaaccatgtattattacaatgaagtaaatgttatacctctttgatctctggttattatccacttagatggttgttacagtctaaagctgctgattttcattttgggaactcaatacgatctcaaccaactgaatgtttccactaagtacagatgccttttgagagggcaagaatgagaagccatccagaagtttaacacactttagtccccattttaccatcaagaactcgattagatgatgcccactgcaaaatcaaaactgaacaaatgaaatccggaagaaatcgtcaccctaaatctgttgcggatatatataatagacgaccgggaagaatgaaagaagaagaattcgtgtacctcctgttgtgataagtggtaataaaaactgcatcaggagaactttggagaagaaatgagacagtcgcaaagagatcatcaaatgcttaacaacagaggtgtccaagttcagattttcaactcattcacaaggggaaaaagaaaaggccaatacccaaaacaaaaacaaatgaaacgaaccacttgaatcatataaaacatcagccccaagtataatgtttggtcgcaggtcgagtatcggtgcatcccacacaccccaggtgagacccaacacctacaatagacaaccacagagaagttctagaagcaaactctcaagaatttcaaatgtaaatagcaatcaacccaacaaccttcgtgaattacatatgcaacatataatgatccgggtaaatgataaatttggcgttgttaaattgaagagaggtgagatagtttatattacattacagttcagcttgttaagctcacagactcttctcatattatccaaaacctgcatatatatatgatacaaacgaactaaataagctcatattctctaaacccaaatagcaaaaatcttctcaacacaagaacttaaatttcacacctctggtttagttgcatcatcagtaagagtgacattagccccaacctttgcagctactaaaccaggcaaggaagtaccagctcctagctgtaaattccatcaacacaagtctaagaaaatgttaaaaaggtcctaacatatttaagattcattagctcaaacacacatatcccaaattctgtatcaattcaaaatcaagggatnnttagcaagagtagttgaaatagaaaataa

SEQ ID NO: 27865 - DNA, 1272 bp, Arabidopsis thaliana landsberg
ttttctaatccttttcaggtctttacatgtttaggatgcattcggagattatggagcattctggagcaaaacagacaacttaagctgcgacagaatccggagacgaaaattgacgtaggtgtcgattgacaaaacccctggtgtcgagcgacaccaatacctgacggcaattgaattgcgcaacttattgatgtttggaagatttccaaatttggcccagaactttctcctatttctaaagaagtccctgcacgttttaggtcatatatatatagttttaaaggtcattgtttagacctaactcttattatctcttttattcttgggagcaaaacactatggagactccctttagagaagatctttctaaactcttttctcttcttaatttcattattgatttcttattcaatcatgttttgttcttctatgatcatgcttgagtagttctcttgttgggtttaaggattctcattagggatttggatgaattagtagatcgaaaaccctgttaggataatttttttagaattcttaatcttagattgttcttaatgctagttttagagtaactaactagaacttgattttaggataataggtatgcacaccataggtatctattactggaactatcttagatgagcctagtatttagatgcgtgctagcgttgattacttaggtgaacttatcaaacctgattataatgcttgcttagttctagggatttacaagagagttgggatcaatactattaagcatagtgagtagcacggcacaccaccggttactttatattagtgatttgtgttctagaaatgtttgttaataatcctagtttactgctagatcaactattctaatatttcctgagaatttccctaaacccgacgtcttaatcatatgaatctacaaccaattttaattgctttcttgtcttttacttttataatattttctatttagttttattcaaaactgttaatctattgtgtgatccgagaactttgtggaattcgatccctaagtggtataacaacctctttatttgagagagtagtcattagggtaatttgactcatatcaaagattcaaatccaaaaactcatacggacttcgactacaccatcaaagctttgagaagcaagaagaagcttagttagcgtttttggtgtgatatatgactagatgttgtgtgtatgatagagtataagaactagtaacgcaactggatcccaaaagataaagtaagtgttcctacggacctttgc

SEQ ID NO: 27866 - DNA, 873 bp, Arabidopsis thaliana landsberg
atttaaattagtagatattgctcttgcatgaatgaaatgccatttcttcagaactcattttttttgatagagcgagcgacagcgaaacagcaccccttaatccagaccacgtgagtatgatggattccttccaatccaacccatagccagaacggcatagcaatgggtacaaaactccaacaacaacacagcgggaaagttggacatacaagtataagaggaaaaggaagctccacgagtttcctgaaaagaacgttacgagtaatgaatggtcctcttaaccccaatatatgtcaaaaagaaagctactgcggtaatggtatcaggaattagcgatgttatccgttaatcatgacgaattctaggagaaaacctccctttacatcttccaagaacaaaataaaaaaaaaatccggacgtagaataataaattgtgaagagacacctttgtgagatattgtctgaccgctatgaacgctttcagcgataataagtccattgctattcacaagagtcgcgcatgcattgatcttgtatcaatcaggtatcggttaaacactcgtcaacagtagtaggattgggaaaacaccagtggatttttgttctagaatcctgccagccagttggaacgtgagcagaacagctagtgagtgtgcaatgtaaggggccatttcccgacaggagttatagggcgatcataaacctataatagatccatgtaacagtttcctggtatgtgacgaaaaaagaacattgagttgtgaaatcccagaagtgaggcagtctttggagcctgtcccccatataggctgtccgtgcaaaagaagggaaagtcctattacgactatgttatgaccaatggcttttgacaca

SEQ ID NO: 27867 - DNA, 1939 bp, Arabidopsis thaliana landsberg
acaacagagacgactgaaagatgtggtggaggcgcatagggtacgccgtgaaacagagtcaagattatggcaccaagagagggtaaaacaactaacttcttacacagtatcttttgtttgatttacgtgttcctttgattttgattctcaggatagatctctggtttggggaggaagtgaacccaggatgagatttgatgaaagtactcagggttggagagatagtgactatgaatccaaatggaggtttcatgagagaactccggattgggattggagagatagtgaatccagaatgagatctcatgaaagaactcaggataggagaggaagtgaatcccaaggggtatttgatgagagaacagagaggagacaagaaccagtgcgatggcccggtgaagagtgttggtgtctgcggtgtcgaaacggaggaagttgccgttacaatcatcctactcatcttccacaggtcagaaactaaacttcatttattttggctgagtcttacttaagttgcaattttggcctcatgggtttactgcttttaaacatcttaataggatgttgcttattacaaggaggagctccctgagagaattggacagccggattgtgaggtgcagtttcttgtatctctcactatctcaaatcttggttgttgtttggatgagtacattgtaaacagttaaaaagaaaacgagatttttgttcagaataaagctaaagtaagagaactgattctagtttgtaacttcacataagagaggtagcaagaatatacattgaaactgcagaagatattcctcatctggtttagtctttcctccaaatgttttccacaaacaactttttcttctacatgcaattttcgctgcagtattttctgaagacaggagcttgtaagtacggcccaacttgtaaatatcatcatccaaaggacaggaacggtgcacaacctgtaatgttcaatgttatcggtttacctatgcgtctggtaatttccatcgttgtagctaaattctttttctttagtcgaatgtggaagacttatttgaatttcttctccagggtgagaagccatgtccatattacctgcgaacgggaacttgcagattcggagttgcttgcaaattccaccatcctcaacctgataatggacattctactgcatatggaatgtctagctttcctgctgcagatttacgatatgctagtggtttaacaatgatgtctacatatggaactttgcctcgtccgcaagttccccagtcctatgtgccaatcctggtttcaccctctcaaggctttttacctcctcaaggctgggccccttacatggttagtctgaattgaagctgccaataacgtaaacctgttctttactgttgatatcacattttatgttgcaggctgcatctaactccatgtacaatgtgaagaatcaaccttattactccggtagtagtgcatccatggccatggctgtggcattgaaccgtggtttgtcagaaagttctgaccaaccagaatgtcggttttttatgaacaccgggacatgtaaatacggagacgattgcaaatacagccatcccggagtaaggatttcacaaccaccaccaagtcttataaacccttttgttcttccagcgagacctgtaagtctcttactaaactgaaagaagagctttggttacaaacaaatgtggtcttacaggtcactagtaaaacttttacaaagattttgaacatctaatgagctactgttttgatttttgctgtctagggacaaccagcttgtggtaacttcaggtcttatggattctgcaagtttggaccaaactgcaaattcgaccaccctatgctgccatatccgggcctgaccatggctacttctctgcctactccttttgcttcacctgttacaacccatcagaggatc

SEQ ID NO: 27868 - DNA, 1391 bp, Arabidopsis thaliana landsberg
atcttctttctggccggtatagttttcgtcatattcctgaggacagtgagaagggatttgacaaagtattaggaactggacaaggaagcacaggcacagatgaatgaggagctctctggatggaaacttgttgtcggagatgtgttcagagaaccagaaatgtcaaagcttctatgcattatggtgggagatggggttcgaattacaggaatggctgttgtcactattgttttcgctgcacttggattcatgtcgcctgcctcaagaggaatgctactaaccgggatgattattctctatcttttcttgggtattgttgctgggtacgctggtgttcggctctggagaactgtcaaggggacttcagaaggatggagatcactttcctggtccattgcatgcttcttcccgggtattgcttttgttatactcacagtgttgaacttccttctctggagcagcaacagcactggagccatcccaatctctttgtattttgagctcttggctctctggttctgcatctcggttcctctcaccctatttggaggattcctaggaacacgagcagaagcaatccagttcccagtgagaaccaaccagattccaagggaaatcccagaacggaaatacccgtcatggcttctagtccttggagcaggaacccttccttttggaacgctcttcatagaactgttcttcatcttctccagcatatggttagggagattctactatgtatttgggttcttactcatagttctgcttcttttggtagtcgtgtgtgcagaagtatcagtggtcttgacctacatgcacctctgcgttgaagactggaggtggtggtggaaagccttctatgcatctggttcagtcgcattgtacgttttcgcttactccatcaactatttggtctttgatctacaaagtctgagcggacccgtctcagctatgctttacattggctactctctgcttatggcaattgcaatcatgctcgccactggaaccattggcttcctcacctccttttacttcgtccactatctcttttcctctgtcaaaatcgattgataccttgacgacaaaatctcagccgttgatctctgctttctctaaagcaatttcaggtgttgttatttttttgtcagtactagacttgtagagtccactatattttacatgtttttattttttcctggacctatattctccttatatgttttttttcttacatctccgcctcattatgtttttgttttgaacttttgagtagaaaataaacaaatttgcctttctgctttaggtttcttttggattgtgtttttcttgcttctctttgtttccactgatgagtacaaatctgttctcaagtggcagaattgagttgt

SEQ ID NO: 27869 - DNA, 1871 bp, Arabidopsis thaliana landsberg
tctacatatacatttctgccgccattttatgaaataaatcgtatagttgagacttatttacaatgggtactactagcttttaattattggttttttggcaataaattgattaacaaacgaaaagcattccaaatatattccaatcctatacgtcatgcaaatttctccaaaatttgaattagatttcggcaactatttaaaacaaaaaatgtttgacaaaccaaaatacaattgcaatccattaaaataagcaaaacgcacctaaatacattcttaatctattcactaaatcttatttctccaaaatttgaactagatttcggcaactatttaaaacaaaaatttgtttgacaaaccaaaatacaattgcaatatcgtaaaatatttattttaattatatatttaacttagcggtataccgcgggtttgtttttatgggacgggtttggcggaacgggtttggaaggacgttacttaataacaattgtaaactataaaataaaaatattttatagatagatataatttgcagaattttatatatactaatttaaaaaagtaaattgtctcctcggtataccgcgggttataatctagtatgatataaaataggaaatatatctgtatatgtacaaaaatattcaaatagaactcttaatataatctgtatcatggcacgaacaactttgcctagaaaaatttaaataaatagaataatccaacctgacaatagggcagaatctaggaaacgtgtaccaaacatctcgaaaaaattgccaagtgaatgaatgatcattagaattaagacgcaaaacaacgtcctagatccaattttaacgccacacatacttcgctaagcaactacgtttttttctttcttgtctctttatgaactaaacaataacaaattcacattaactaattaataaactacttaaatatcctcaaacatacagggatattatcggtaattcagataatgtccactcctgtctcctacgtgaaaaacggcggcaaacaaaaccgcgagccagacatcggcgaggaatacaataatcaccggcgacggagacggcttcaatgggccttaagcatctccttgtacctcagaatcgaatcgagtctctgtaatttcagctgctgtttgaatttgttgatgaaatctgaagctttcgcgtcgacgccatcttcgccgtcgccgaaagacgtcgatctttcgactctcgttgtatctggtcttctccgttcgagggattccaccgtctccggcgcttccgcatggcttcctgcgaaaccaaaacctgatttctcgctagccgattttgtcatcttcgttgaagctttcttcttcttcttcaccggttttttcgattccgatttacttcgtacatgcttgtgctcctcgtgaagaaccggatccggattttgtttttgatccaaatccgggtcggatctgtagaaggaggatagcttaatggatttgacccgttctaagatagacggagctcgagttaaaccgggcgggttaatttgactgttcactccggttccggttggttgatcttcttccgggattctgaattttgagatatcaatcgggtcaacccgacccatccgggtcggaatactttcgaatcgggtcggttctgtgtgatgagcataatcattctcctccgggttatactgctggaatttgaagtatgacatgttgatggatttgacccgatccagaagagaaggagctcgttgtaacggtgccggagccggatccgggtgtaaatctaggtgggagtgggagtgatgatccgacccggttacgtcgtgtgggaacttgaaataagacatgttgatagatttgacccgatccaaaa

SEQ ID NO: 27870 - DNA, 961 bp, Arabidopsis thaliana landsberg
  unsure (1)..(961): unsure at all n locations
ctaactttgaccatttaacggcacttttttaacaaatgatgaagatcaaatgtcgctttgtaccttgagaaaatctagggaagttattctacacctattaccaaattccaaccatcagaactcagaatcttgtttggcaactgttggctttgcttcgatttaaaaaacctttgcccaaaacataaacatacaaaaatgtcaagaatcacttccctaaagcctctagaattaagtacaacaaacagcatataatgcttttgaaagacagaaaagcaaagcgcaacatctgtggagacaatagttctcaattctcatccacttttcttcaactagacttggtataaggatcatgattcctcaggttttggttctactgactgatcaggtaaaacctgagcttcaccattgacattaggttgttgttcatcagattgttcaggaggagcggcagtagcagcagtctgctcttcttctggatgaaaatctataggaaatttagtaactctaggtttgtcggaaagtatgttcctctgaactttatcaatcaaaaccttagttggaggctcttccttgagttgctcatcctcataatcattggtcacgtaatatccaactctcaagaactcttgacccatgtaagaacatgtcaacaatagcacagtaacaccgatgatgtcttcctcctgaatctttgatggatcctgggatcagcctgtaacagtcgtaatagagagtttgaccaagnnnnnnnnnnnnnnnnnnnnngtagtagtgcatatgttacctgaaatacaaagcggagttgccaacattacaggccctacaagcacactgtctagaagttgatcataagtccatcttctgctgagcctcatagataacttcattccaaatctgtaccacaagctagcacgggtctactaagttatcctaccctaaacaatgtaaccaaaacttgtgc

SEQ ID NO: 27871 - DNA, 3613 bp, Arabidopsis thaliana landsberg
gttaaaaggtctcatatataaacctagtacgtttcatacaaaatctgaaaaatgtagtgttgttaactgtgacgtgatgtcttctgtggtctgatagtataatataaaacccagtaaaactaatatatttggcatcaatttatattaatcgactggaggacttggctaatgtggtcgcggttaatcgacctagttccttgttttctctaatctataatctacataattgttgtttggttggttgtccaacagtaatttggttgttatactaaatatatttggttgatttacgtacgcatgttgtttacaaaaagaaacttttctcatccgttcatgtcactataactagaagtaacacacatgactagaggcccctctcgaattaagaggaaaattacaaacgaaaaataggcgatcgttgtattcacaaagaaacgaaaatgtgtactaaatcaactccgtcctttttgtctccttatgtccatcatcaacgtaacatcacatgcactgaaaatctagatgctcataataataaaagtctagccattaactgacaaaccaaaatttctctcatatagacacaatgcatcgaatatcgtcaaaaaaaaaaaaaaaaatgatgttgaattagagaagaatggatactacttattcatattttctagtcatttattcagactttgtatctttctataatttccttaatcgcaaagtgcagttgtacattatcactcttcagaagttgtttttatcaccaacaattgttacaagaaacggacccataaataaaagttgtgtattgggtttacatgtactctcttcctatatgaaatatataggcccaattaaatgtaaatgggttttgagataaagaaaagcctaagacgatgtattctctaaacctgggacgataaagagcaagtcagccagcatcatgaatctccccaaaaagggaagcaaaattcaaagcatggatataaaatcaaatagtgtccccaaaaggccaaaaaccatcaagatcacatcttaaaagaaaatgaaaatgtaccggtacgtaccaaccgaaccggtcagatgaaccaacacatatgagaaagaagcaaattgagaagaatgtaatcatcaaaatcaatcattcattcattggttgttgttgttggtagagtagaacaagagtagagtcgacattgtcttgaggctcccaagtggcatcacacatatcagtgcatttgacaagaaactcgatggtcttcccatcgtctcccaccctctagccgatcacactctccgatccagcgtactccagcccatcctagtagtccttagccacatcttcggccacgtgtacacctttcgcccactcgcaatctccaccgtccgtccatctgaccagatattcaacgtctttgcctttccctcgtttctctacgatctcatccacctcggcgtactcgaacacttgtccttccaggacattgatcactttctctaacccaattctcctcccgaactgcatcggattccccttcggcgtcgtcttcagaatctccctcgctagttccaacgccgttaaccctctctcgtcttccacttcaatatcagctcccagctccaccagcgcttccaccactccgggcctcacgtaaccagccgccatgtgcagcgccgtcaagcctcccctcatgtctcggtgtcgagatcgctccacgctccgccagaagccttacgcacttgtccgaccccagacctgccacgaaaagcagaccgtccggccgttttcgtccacggcatcgacgtctcggtcctccaggagctgtgacagggcctgctcatcggcttttctagctgccgtccaccagggtgtctcgtactccgacactacgtctgctgcgatgtagctcgatggaacccacgacggagaatggccgtccttccactcgataaggtactccatggctccttcccaacgcgttcggcttccaatgatcttgttcacttctccgtacgatgatgatgactcatcatcttcctctgcctcttccacggaggaggtcgtttcttcgtagtttctttgtacggcggcacatatagctcctcggaaacacagctcgatccgtctgatcggtaaggattcaggggagaaagcagaagaagaagaagaagaagaagaagaagatttgggaggagaaagtttgatgcgagacagagactgatggattactaaagcacaagtatccatggccaagaagaccttttgcataatagaagacaagactagagaagagaagagagttaacgggactcactggattttctagtggataagaaatcttagccacccaatcattttcgaaaattttagatgtctgcagcaaattttagtttttttaaaaagaatctagttttaacatttttataggattttattttatggactgcacttattttcttctacttttagaaaatcaacaggttcttctattttttggaaaaaatctttatatactagataattgtgttaagacattctcatcaaaaagaaaagaaaaatataaaacaataaaataaatatgagtaaaattgtaaatgtggttggttttctcattcatatgatattttcttgtggatttaaattggtatgtatacattatgatatatgagtttgtcaatatattatttgtgtttgattttacgacttgtgtatatatacttactccatctttaaacatctttaaatggcaagcagaccattttttttttttttttttttgaatttgcacttcagtgatttacatgatatgagtattaacattattatacagcaagtgtatagtttttatttagttttcaccatctatattttatttgcctaattaaattaatcatcccaataccatcaaatggcagccaaactttatagataaggactcatccgaatattactgacgtgagccagactcatcgactatttctaggcaaatctcgagaactcaataataaaaaataaattagtgctcaatagcttaagagataattttgataataaaatgaaaaaaaaagttttgatactagtattttaatttacgtgcaaatcaagcttctgtcgttttatatgcacatgaagatgaagaagaaacaaaggagacgaacattgaagataaaagtaaagtgacaaaattttcttgtagttggaataatcttccaaacctaaatacattgtttcatttgtattcatacatcaaatgtatatatattttcttattttattttcttttttgacggctgaatgatttgtttttctgtccgaagacgaatctacggaaacgacgacgtttccagtggctgacatggtaggataaaaaattcggttcaatattttttagcaggtgagcgcttcgtatttaaccgggattggatggttgaaaccagccctggttagtagattcccaaccgcagcgagatctctacagaatactccttggtacgcattggaatttaccggtttcgtttcagcgtttccggttctcttaatagaaccggatttttcaaccggtttgcgttcttcaatcttttgagcgtgagcaatggcgttcttcctctgctcctcggctat

SEQ ID NO: 27872 - DNA, 616 bp, Arabidopsis thaliana landsberg
agacactttcttgaaaagcaagaaaagtatcttaggcttctaaaggacaataagtacttcaaaatcggataagttgtaaaaagatgttcaaaacaccaaatcaacaagataataaaagatagagatagcgatgaatacaaaacacagcgtatattaattaatgcaagaattggaagacaagatatcttctctcctattgggatattgtgggaggaagccaaaacatgcgaccgggtggtggagtagagtcagagagataacgaatggtgcaagaggcgagatcccatatgccataaccggaaccatggccggcaaagtagactgagttagggttaagaccagggaagtccttagcagagagacagaaagattcattctcgcccaagaaaatgcagagatcgccaatgtcatcggtgtaaggaccaatcccttgctcttcgtcttgcctaatcaccatgatcttgtgggtcttcttgcaaaggtctttgttgttattgtaacgtgtgtctccccatgtcgcaacttctcctttgtccgtaagactctcaacaaacctagacaacaacacagattatatcatcttcaatcccttataaacaacacaaactcacgggtt

SEQ ID NO: 27873 - DNA, 1677 bp, Arabidopsis thaliana landsberg
gttgcaatggtaacaataacttttctttacaaatctttatttttgaaatccttatgttataagggtttttatggttttatacatgcagcaagttatggctttcttctactggttgatcatgaagctgggaaaggatatcaagattattgttaaaccaacgttcaaagatggcatgaccgttggagttcaatggcaactcggttagtcccctagtccctatatcctaatccgaataactgataaccttatacgcaaccgatcctatttgggtcagtcaaggaaaccggaaagtcaaaaccttcaaacactccagaataccaaaccggaataagccttcctttcaccagaccaggatcaagaccaaataaaaattgacaaatccaattgaaatgattgttctcatgacggtttacctgtaatgtgcagaatgtgacaagtcacacatccaattggggaagggattcagtttccacatttgccatatgtaccagggaaagctattgataaagtcagtattcgttccactctaaattcagttatcataacaattataacccgtgaatcatgaccatatttaaaccaaacaatgcaggaatgtggagatgttcatggaaccaattttccacatagagcacctaagactagtgagtctgtcatgttcataagatttatgtcatcatgtgattcacttacttacctattgtggtttctcatttgtcttctgatgcagagaactatggcgtttgcagtgagtattgctgagaagatagtcactttcttgagacaagcagaaaacacaaggagacaagcaatggcactcctgctacttgttcttctgctgcttgctgcagccgctttctacgtcacacgtctgagattctgataaaaacacagcaaataacatggaagatagcaggaaaaaaaaccatagcatagggaataagatttttctatcagtaggatgcaaatatttccaacagggaaaacatagttaaacacatgagtttttttttcctaagacattcatgggtgaatggcgtttaatacaaaacatatgcgccgtttcacccttaacactagagtttcggtacaatactaaatacaacatcaacctaagcatgtcgatacacaaccaactaaaacaaagaacccaacggaagattaaaatagcattaaaggaagttaaaagtgaaaaggatcttttcttccctatcagagttctacagcaaggagtcataagtaggttccctagatacacacctgcaagagagttgtgatacagaagtcaattaccatatttggacaatgctgatatataagtatcataatctgttaaatcaaacttcacttacactagtagttcctagttaattaagtcagaccagaagatatcacgactgcttgtacatatggcgcctcagcatctcatttatccccacagctgaaatgctttcacatccaagaagatctcggagcttttcatcacactgaatagccattggatttactgggtcctgaaagaaaattgaaaagcagaataaacaaatcttaattttcttgtttatggccattcactatgctctataacataaaggtatgtgaaatcctatactgtaaattatcttatagagtaaaccacaataccagctttagttagccagcaaacagggaaaaaaa

SEQ ID NO: 27874 - DNA, 1303 bp, Arabidopsis thaliana landsberg
aaatgttgatttcatttatgtttggggtttagaatttataaccaattgaggtgaataaaaaaacataacgcgttttatagtaaaagctgtaaactgagtgcatcaaatcaaagaatgataaattgacacaaactagagcgtcttggagattcagagagttgtttcaagacaccaggcttgtgtttctttccagaagactcatcattcagacgtaaaacgagcttctcgagtgttgttgacttccccagaaagtatctaaccagtttcagttcagttgctttctccgtgatcacgcttttgaactagtgttattggttatcttactcatgatcctccgtgtaatgtagactctgtttctttgtagaactcagtttggaaattaccaaccttaccaaagaacaatcaattcaagaggaattcagatttatcgactgtgccatatatgttgcctttccgaagagaagcatcaagtataccctcttcacttgccctttttccatgaagatttagagactgtcaaaatatccctttaacaatatcacaaatctccgaaaacatatcccacatttttagactttcaaaagacccaaggcattacaaaataccaaaaactcttccagagtagttttacaaattccaagcggatgtaaaagaatggattcaagctacttgcacaagatggtgattcaaacgaacgacatgaggtagtggaacctagtggcaaacttttggactagaccgtccccttcctttgtcaaatgcaactttgatgtaggttacaacatagacgtaataaaaatagagcaacataaaggaagctatgagaatttcatcagcgatagcactaaagaaacctctggggttttacataaatccaccacggttccggatttggaggcactgcaagaacttctaattgacacaaactagagcgtcttggagattcaatgagttgttccaagacaccaggctcgtgtttctctccagtagactcatgattcagacgtagaacaaacttcttaagtgttgctgagttctctagaaagtatctgaccagtttcagttccgttgctttcttcgtaatcgggctttccatttcaacggattcaagggaaaatagcaaacaacgaggtaacactctcgagaatctagttattactgcctctggaaaatcattaaccaattcctgcaaatacaaagcaacatatccaaaccagaaatgagtagattaaaaaacatttcttaggtaagaaacttgcagatcattaccaaggtgaagtggaagagtttcagcttcgggcag

SEQ ID NO: 27875 - DNA, 2189 bp, Arabidopsis thaliana landsberg
gtatccatatattaatttatatagcccatcatcagcatctagctttaatctaaatcagcattctatatataagttcttgagaatgagatctttcttatgcaaagctttgaatttgaagcaaaaggggacttaccggagaatcgtagaatttgatataaaagcgagagctgtctatggagagcttaatttggagaatctcagatatcgtctcgctaagcttcccgtttacgccaggtcctaatcccccaatagatatcaattctccatatgcagcaggttcctcggtaccggcaaatgcaatgggcactccactgttaagcagtatcatcacatactgaaaacaaagaagaaaacagacgtagcccacaagttaagaccacaacacaagcttaagaatcctttagtgatattgtcaacatactgtattattggtttccacaaagttccatgaattagtaaattggtaatctaaagggaactctcaagagttaagttatgaggaattgcaattcagagaggaattccatcgaacacttcatgtgcataatacaaccaacgtcatgaaccttatcaacaaaaggaaatttctattctactctgctttcatgtaatcaaaacactaaacaggaacaaaatttgaagttttaatttatgaattagcgtagaaatggccgaaacagagggttagagttggttacggattcaggtttgccgatgattttagcgacggccttagtggcgtccttgaggatgtctgagcaagtgacggcgtcgactggtatgttagtgaagagattcaaagtgggcatctttttgaagtttctccttttcccgacaaaaccaaaaccagtgtctttcagtttggatatggaagttgggataacggtaagagcagaaccaaaaccagtggcttaccagttcatttacttttatctttaaaattgaaattaaaaatcgatataaaattgggcaatataaagttatcaaaccggaatcccatgggcctacaatgcaaatttcagcccaaatgtaaaatatcaattttattttttttacattttggaggggccaatagagagttatgtttttcctaatttcgattttttattttattttggaatgagcatggagaatcatgcaatcgcataactctttcacttttgtctttccatgcttatgataagcttttaacgtttttcggatccaatgaatgagtaaggaacgagagaataagtgactatctagataaccataagaaaagaatttatgatttctttctaatgacaattggcttgaattagtattagcatcacttatactcgaacaatcaaaatcggcttaaagacaattgttgtataagcaatcacaatatgtaagcccacactagctaaatcccattttctaaatactaccaatattactaaaactgtgtttttcattttttttatttttttgttatttatgaatcctgactcctgacctcaaaattgtatgtgtatataatgatttgtatcatagtatctttatttcatatttcatttattgaaacataagacattaagtcacaataaagtgtattatagatttgtccctacatactcgaagtatgtttttttttttttaaaactctcaatctatcaatctaacatttatcttttgaattgtctatatttatctagttagttacttgtcttatttgtttgttttccttctttggatatcaacagtttatcataagcatggaaggcaatctatgaaagagttgtgctattgcattattacccatgctgataataaaaaaaaaattagaatttgaaatatagagcaagacatagatagttttaatggtcccctccaatctgtaagagaagaaatagttcacttgttgtttgtaactatttgggttacttactcttgagccatgacccatttgataaaaatctataagttcacattttcagatctgcctagtctcatgtagatttttttcttagctataagtgttttcattttacttggtttttcaatatccaaatgaatggttaaatagggttttataagatgagatatgttttctgtagagttgtttttctttttgctgcctacaacatgtattacatttttgtgtatcatctatgatatatattctcgtgtggtttatgttaacttatagtataagaacaaaaact

SEQ ID NO: 27876 - DNA, 1498 bp, Arabidopsis thaliana landsberg
  unsure (1)..(1498): unsure at all n locations
tttcttgaatatatgacaaaagacatgttccaagttatcactctccatatcaacaagagataattgaaaacgagattcaaagcaagagtcttttaccaagaacaacgtagaaacctttccttgaaagagcaaacgcagtggccttaccaagtcccgaagtagcctgcaatgaattcaacaacagacgatataaaaacagaaactaacactacatttcatgattcgannnnnnnnnnnnnnnnnnnnnnnnnnnnnnnnnaacacaaacaggtgtgtgtgaatgattgaatttggagcaagaagaagaggaacttgatttgggggcaaagatactctttttaagcaattgaaagtacgaaaaaaggagggcaatgttccaaaacagaaccatccttcagaaattagatgagcagataaaacgcaaagcctccttcaaattctccatcaaatttatgtacctgaacaaaaatctgtagactaacaacttgatcttgcgaactcgtgaagaaatcagagccgaatgcaaggattagatgctttttccggggaataatcgatgggtttttccgttgtagactaaattcgacattgaacaaggcactaagaatgacgaagacgaagaagagaacaaatggactcactttgggcttaagcagagtgttcgatgtgggacaaaaatgtttacaagtttaaaaaaaggcccatcggctaattctagttttggttatgagagtgtgtggcgaaacaaaacatgtacaaggagacatctattacagttaatcaatgaacaaacattacaaaagtaatctgtaatttctttttcttagtaataaccaagacaagtaaaaaagaatttctacacgtggactttttcaaaggattgcccaaaatttctttctgcaaaatagaacagtttctgtcttcttgtatttgtcttgaagctcatgtgcttcaacttcccaaaggaacttaggagccaagtctcggacgcttgagacgattgattcctcgtctctgataatgataaatccctgcaaaaaccccaaaatccgcattaaccattatttccagtcacagacataacaagatgagatgggttatgactaaatggtagtgagaccgataaggttaatgctttgtaaaatacctgagggcgtataatgcggtccatctcaagcatgatgtcctctagtaaacaaccttcaccgtagattttatagtgagtgaagagatggtccgcgtgtagcagatcgtaagtacggggatatgttgagaatggctcacacctatgaggaacaagttttactatcggtgctaagcttaagtgagaaaggatgaaaatttgagaaagagatcgtattcgcttaccaatcatgataagcaccggttaagcccctctggtaaattccggataaggtatcgttcattgtagcaggtaaaacgttcaagacccaaaggggatatgagttcatggctgcggcaaatccaccaatgaatg

SEQ ID NO: 27877 - DNA, 1695 bp, Arabidopsis thaliana landsberg
ctggaaatgttcggagcatccgcaatgctcttcgtcatctcggcttcagcatcaaagacgtatgttttcgaatctaagtttattccttgtatatgtactgatctcttattggcaaaatgaaattgattacatttgggaacttgaaatgttaggttcaaacgccgggagacattctgaatgctgatcgactcatatttccaggcgttggtgcttttgcacccgccatggatgtacttaacagaactgggtacttactaatcacctctgctgattttctcatttagaataatgtcttacttagttcttaatatacgatttttggttctttgattgttgcaggatggctgaagctttgtgcaaatatattgagaatgaccgtccatttctaggcatatgtcttggtctacaactacttttcgattctagtgaagagaatggaccaggtttagctccgttgctccactttatattatgtcttctagaatttttccctcgatacattcaactacattatgatatcatgtatttttgtacttaacaactgtatatgtgacagtcaaaggtcttggtgtgataccgggaatagttggacgctttgatgcttcagctggtataagagtaccccacattggctggaatgctttgcaagttgggaaggattctgaaattttggatgatgttggaaaccgtcatgtctattttgttcattcgtacagggccattccagtatggatctaaataatctcttctttctttctgtcattttcgtatctctaccatattgtattctcttctacatgcatgtgataattatagtttcataatttctatagtcagatgaaaataaggactggatttcgtctacctgtaattatggtgaatcatttatatcttccataagaaggggaaatgtgcatgcagttcaattccatcctgaaaagagcgggggtatgatagtctagtcattttctggtgacatcttttttctcttattcagagtctgttttcatatttggtatcgtactaattctgaatatggaacattcagaggtggggctttctgttttaagaaggttcttgcatccaaaattacctgcaacacaggtagatttcactctagccatacatgtacaatgtaattcctgatttttttggtgtctaatggaaaccacaattcacttgaagacagaagccaatggaaggaaaggcctcaaaacttgcaaagagggtaagaagtttgtcctgttattattgaaagtctgcctcctttgcaacattgctatctttgctcttaactattctggtaggcagtttttctaatgatattttgttttcctttaggtgattgcttgtcttgatgtgaggacgaatgataaaggagatctcgtagttactaaaggggatcagtatgatgtgagagagcaatctaatgaaaacgaggtttgttgaaaattgttgcttcaatgtcatatcctgcgatgtgttctttgtgaaaaatgaaacattcttgatatttggatgtttttgtgatacgtccttatcttacctttaagctgttgggtttagctaattattaacgtctgtaacaatgctctgaattcattcctttttcttgcacaggttcgaaaccttggcaaacctgttgatttggctgtgcagtattacaaagatgctgcagatgaggtatacttttac

SEQ ID NO: 27878 - DNA, 1561 bp, Arabidopsis thaliana landsberg
  unsure (1)..(1561): unsure at all n locations
gacgagtcttaccatgaagtttaaactgttaaaatgattagttaatttgagaattgtctgatttcttgtttctagttttattgtatatgaaattgttctataatgatgattaaagaatcaaagatataagaaataagatgcttggagtttagactctttcaactgatgcatctatctgttttgttaaatattattcaaacgaacatcatttgtcatccagatagactatccagctgaacatttatataagcatctttgtattcgcacgttttcagcataatgacatcttttcatatctaaatggtataggagacaatcgacgtgattcaacaaaaagtaaactatgagacatttaatttgtttaaaagccactcgtgctttgatgaataaaatttaacattcattataaaaataaaagccactcgtgccctattgttactatttctttagttacataaggactgacccgtaattaagatgacttgtgggagacacaatacatgtttgatagagagattcgagttaatttnnnnnnnnnnnnnnnnnnnnnnnnnnnnnnnngctaaggaaagaaaggaaaacaaagtggaaacaaagataaaagacgtctgattcatttgcttatggaagctcttcagaaaggaaacattcatcccttctcgaagtcactccacagtttgactgatgcgagaattcataatcgtttcttgaaagtttgttagaagttgcattttctaggccatcctccttatcccgtgtagcgatatcaactactctcaccggagagatatcatcactatcgtttggtgtatacactaaagtaaagccacatttcaggacatggcaatttcctacctcactcgcaccatctgtgacttgaaatctgagtgaagccttagaaggaatacatccattcccatgcttttccacgtgacgtttgttaatgtctagccaacttgtatagccaggggaaacatgatcagacttaagagtacgtggctcatagcctggttcgctccaacctccaacaatggaactaaagctgatacatggcccatcttcagttccgaactcacaagtgcatttcaccaagaaacgattgctttgatgttggtagtccggaaacaatataacagcgcataaagctatcccagtaagcctactatcacaccagtgccgaggtaatttcgtctgtaacaatgctccataggcttggtgatcgaatgatgcaggtacttcacatccaggaaagcaagtgctgaccaaagattccaaaacaaatccctataaaacaagttacaccaaaacaagattattaaactgcatatttccgcagcataatttgaatctttttaggagatagaatagtacataccccattgtagcgattcagagcatctgacatcatctggcttttcctccaagtgaaagatatgatgttactttctgcaacttgatccaatttgttgcagtttgtgaaaatgtatgtgcaatggatttttcctgtcaccatgaaaaccgctagagggcttccaacttcttccagtgagtcacaaccatg

SEQ ID NO: 27879 - DNA, 1243 bp, Arabidopsis thaliana landsberg
acatgggctgcttggtcatggagataccttggacagaccagtacccaaagttgttgagtttcttaaatcttttggccctgtggtgcaaattgcagctggacccagctatgttttagctgtaacacaggatggctcggtttactcgtttggctctggttctaacttctgtcttggtcatggagagcaacaggacgagctccagccgcgtgttattcaggcttttaaaagaaaaggtattcacatactccgtgtctctgcaggcgatgagcacgccgtggcacttgattccaatggccgtgtaagttctttgtttctatctcgttctgtctccatttggtctcagaaaccaaaagaactcttgttttaataattctttcttgcaacttaggtctacacatggggtaaaggttactgtggtgctctaggccatggagacgaaaacgacaagatcactcctcaagttttggtcaatctcaacaattgccttgctgtccaggttagattcgtcccccatctgtaccatctcaatgtctgagataatgatccctttacaccttgttcctatattctctaagaccttcagcggtctctaagaactaataagtgatcagttcaattagaatcaaaacttagcacaagtattttagtttagaggattttcagtataacattcagtttatttttcggttttggtaaagaaaaccgaagctggatgtgttggcctttgtttgtatggagttttgctccgtttaggatcagttagtcagccctgatcatgactctgcttttacttgcaggtgtgtgcaagaaaaaggaagacttttgttttggtggaaggtggattactatatggatttgggtggatggggtttggaagccttgggttcccggacagaggagtttcagacaaagttcttaggccaagagtattggagtgtctgaaaccacaccgtgtctctcaagttagcaccggtttgtatcacaccattgtggtcactcaacgtggtcgcatttttgggtttggagataacgaaagagctcagcttggtcacgactcactccgtggctgcttagaacctaccgaaatctttctccattgtggccgttctcgtagccggctttgttgatccaaggtatagataaacaaccatgtttgtatgaaccggattgagattggatttaccggttagtgtaacttgaattgatttgtatctgtttgatttcttcaagttgtgagagtaat

SEQ ID NO: 27880 - DNA, 1797 bp, Arabidopsis thaliana landsberg
ttggtgaggaaagggtttaagagaaggctttggttgtctataagaggatggtttgtgatgggtttttgccttctcggttcacgttagctagtgttttaagtgcgtgtagcagggttttggatggtgtttttggtatgaggtgtcatggggttgctgttaaaacgggtcttgataagaatatttttgttgggaatgcgttgttgtctatgtatgcaaagtgtgggtttattgttgattatggtgttcgagtctttgaatctctctctcagcctaatgaagtctcttatacagcggagattggcgggttagctcgggaaaataaagtgttggaggcagttcacatgttcagattgatgtgcgagaaaggcgtgcaggtggattctgtttgcttatctaatattcttagcatctctgctccaagagaaggatgtgatagtctgagtgaaatctatggcaatgagcttgggaaacagattcattgtcttgctttgagacttgggtttggaggagatcttcatctgaacaattcgttgcttgaaatatatgcaaagaataaagacatgaatggtgcagagctaatttttgctgagatgcctgaagtgaatgttgtctcttggaacataatgatagttgggtttggtcaggagtatcgaagtgacaaatctgttgaattcctaacgagaatgagagattctggttttcaaccaaatgaagttacttgcattagtgttcttggagcgtgctttcgttcaggggatgtcgaaaccggaaggagaatattcagtagcattccccagccaagtgttagcgcttggaatgctatgctttctggttattccaactatgaacactatgaggaagcaataagcaatttcagacaaatgcagtttcagaacctgaaacctgataaaaccactttgagtgtgatattaagttcgtgtgcgagattgagatttctggaaggagggaagcagatccatggggtagtgataaggaccgagatttcgaagaacagtcacatagttagtggtcttattgcagtgtactccgaatgcgagaagatggagatatctgaatgtatctttgatgattgtgtaaacgaattggatatcgcttgttggaactcgatgatctcaggttttagacacaacatgctggacacaaaagctctaatactctttagaaggatgcatcagactgccgtgttgtgtcctaatgaaacttcattcgctactgtactaagtagctgttcaaggttatgtagtttgctccatggaagacagtttcatggactggtagtgaagagtggatatgtaagtgattcctttgttgaaaccgctcttaccgacatgtactgcaagtgtggggaaatagattcagctcgacagttcttcgatgctgttttgaggaaaaacacggttatttggaatgagatgatacatgggtatggtcataatggacgaggtgatgaagctgttggtctctacagaaagatgatttcatcaggagagaagcctgatgggataaccttcgtttctgtcttgactgcttgtagccactcaggactggtggaaaccgggcttgagatacttagttcgatgcagagaattcatggaattgagccggagctggatcattacatctgtatagttgattgtcttggaagagctggccggcttgaagatgcagagaagcttgcagaagctacaccatacaaaagtagctctgttctatgggagattctactaagttcatgtagagtccatggagatgtgagcttggctagacgagttgcag

SEQ ID NO: 27881 - DNA, 813 bp, Arabidopsis thaliana landsberg
tttgaaccctttcttttaattttgtattggtttcttgtgaacctttggtacctgtggatcatataatctagagcaaactagttagtccaattatttgtgttgggcaattcaaccaccaaaatcatataggaaaaggtttgaccctatttccctttcaatcaccccctttttggtgattgatgccaacacaaaccaaagcaaatatataagtgcagaattgaactagtttgcataaggtaagtgcaaaggttgcttggaattaaaccaatataattatatcaatagatatgcatggattgtattcttcttatttaaaaatatggaccacgcttgcaccactagttttgtttttgcaaaatcttttgtaaaattattttcaaaaactttttgcaaatagtcaaaggcaaatgaataagattttgagaagcattttcaagattttgaaattttctccccctgtttcaaatgcttttcctttgactaaacaaaactccccctaaatgagattctcctcttagtgttcaagagggttttgatgtatcattttgaaatactactttctcccccttttgaacacaataggataccaattgaaaatattcaacacttaagttaagtttttgaaattggtggtggtgccggtccttttgctttgggctcttactttctccccctttggcatgaatcgccaaaaacggaatcattagagccctcgaagtgctttcttcccctttggtcataaataaatgagttaagattgtaccaaagacgaagtccttttgcttggtgctcaagttttctcccccttgaacg

SEQ ID NO: 27882 - DNA, 1419 bp, Arabidopsis thaliana landsberg
atatagtagataccatgttataggaaataatcatctcataacaattagatggaggataaatttatttgaaatagtatttatgtcatctactcataactatttttatttaatgacatgtgataataaaagaaacatcattcaatttcatgagctacaaaatcataaagatttaaaacttgtgaattcataatgcatcaaatttattatattgttcttgtagaagatagttagatcagttttatagtaaggaactttacgaaatttcagtcgtcgttttcgttagatagcgatgtatttgacttggactccgatttaacctaaacaattcaaaccggttaaactaatcatgcctcggtcttattaggaaagacaaactcgtgtcaaaatcaaataaatatacaaaagacaaaaacaaattaattagaaattaaagcgaacaatgagatttgtttgaatgcaagttgcaacgataagactgttatctgtcagaccctaccattaccgacactttttcgataccatgcagtcagtaaaatcggatctcgagctcccctccctccctaataccccaaacactagtgatatcttccaatttctttattttattttagtttgtaatttagttactatttttaacttatatataacaaagctagattgtagtacaaccataacaaaaaaaaaaaaaaaaaaaaagaagaagctagattgtagttttgagtggaaaaaaaatgtaaagaatatataagtgattaaaatgaatttatattgcttcctgaaaataacaacacaatacagtagcttgtcttactaagggagaagaaaggctaaggcccaattgttgttgaaaagcccaatgaggtcacttctggatcagctagcgggtttcaagacggctacccgacacgtgcgaaaacagacagtgatagtttccactttccactaactctaatcgcacgtgacaactcagaaagttccctgcctaaccacaagtggatcaagcgtcgtcgaccacatctgattcccgcccaatagccgtgacacaatctcgttatcggcgatggcatctacgtaattaaacggaaaatcaagggcattactcaaccgaccgttgctacacgtgaattccggtgacaccgcttgctccgagccggagatcaatctcgccacagattccggtggacacgtgtcagtcacaggctttaacccgtcctcgatatcgcttcgtcgcttctcgatgacacctttcttgttatatatacgacacaatacccaatcgtccaactgttcaagaatatcaaaaacacgtccggttaactaaaccgattcaaaatcatattcaaagttcggtttgaactgataaattcactcactcttagactgtttttcttacgaaccgaccggtcaacgtcagcgagc

SEQ ID NO: 27883 - DNA, 1725 bp, Arabidopsis thaliana landsberg
  unsure (1)..(1725): unsure at all n locations
aatcctgactcaagtcctgaattttcctcggcattgaattctgaatcctataatgtttagaattgagtgttgtattgatctcatctctgcttagattgatgtttctttttgctgtcttcatagattgaatgtgtggttgctaactatttgtctttaaaaatggctatgtacgttagcattacgcattggctgggctcagtacatgtttggtgatacataatcaagacccttctgctgaattcctccttggaagcaagattgggacttctcctaccttgatcaacgacaatctctctgtcattaggctagaaaccacaaaagtatgtcccttttttgtttgtttcgatctttgtatactttaggtctggttcaagttttgaacttacttaacaatggtttctggaaacattgcagatgcttctagaacctcttaaacagctgaagcaagcagatgctcgacttaatatgacccaaggggttcttgaaggggtgggtatgtgacacaacttcgtatctgtgagttttgataaaaaaaggtttggaattttaagtcctaatttgttttggctattgttgtgtagtaggtggttggagaagagctaggagtacttnnnnnnnnnnnnnnnnnnnnnnnnntgcttgaactcgagaggcttgttggtttctttaggcaagcaacccgaaagaatcacaaggggaagccttttgacgttataatttatgatggcattagcactgaggaaactcttcggatgataggtctaagcagtaaaacaaggtctagttcattgtgttttgctattctttctgatttatctggtgcttctttccctttttgcaactcttagaaagtatgtttcttgtagattgtatgcgaaatatctgagaagtttggccgagaagacagatttggggaggctaacaagtccgtccattatgagatttgttgatgagtcaatgaacataaacagtaataagtcgcctttcgatggtatgacaagtcctgccatgtgggatactttggaacgtttcttggaggtgatctatttatcccataactcagtgtcttcaactaattgagctctgaaattacatatggacttttgcatactgtagactggcgcttctgcttggagagatccagagagattcaggagttttcttgtaatggacccaaacaatcctatgtctgttaaagctgcattacggtattggggttgtacagtacaagcaggatctcatgtttctggggcgtttgctatttcttcttctcatctgaccagccaaatcccgaaagcagattttgtgccactgccatttgcttctgcatcagttccatttactataactggtctggattgggacaaaattctgctggaccaagcgaattcaagtatccgggaacttctctctgaaactgtaagccatgggaccagcttgacacaaacagtaatgtttgatacagcaaagaaattggtgactcttttcatgccggggtttgaaaaatcagaaatcaaactgtatcaggtaaaaaggaacttctcatctccctcatattcgtcagttcttgtaaagctctctcatttcttttactcatctatgatggcataatgtgattgcttggaaagatcttctgttcatatggaattaaaaactgcgaatgattttttgttttcttgatgaatctgcagtatagaggaggttctgagctcttaatagaagctg

SEQ ID NO: 27884 - DNA, 1383 bp, Arabidopsis thaliana landsberg
caatatgccctgactacttatttctttaaaccattattcttgaaaaaacttctcaattaagcaatcttttgcaaacgcctaactcatatttgatgatgaatgatgatgatcaattctcaaaaactgaagccaaataacaaaaacaagcctgaagccaaaaaggtagatgaaagtgacaaaggagacaagttttccaaaaactaagacttcttgccaatagaattgttgagtttactcttccagcttcttcgacagcaagtccgagagaccattggttaatgcaaaggatgtcacaaaggaagctttcaataaattggtagcctgtattaagatagagacaatgagttagccatatctcttagtaacttatgggacaagaaaagactaaatatttatgcatacctctgttttaccgatagttatatatttgatgttgacttcatcgaaacttatcttcagtttctttagctccctcatagtaagatctgaattcagtggagtgattataagatcatctgtcacaagaaacttcttgttactcttcacaaacccaccactactacttcttgattggccactgatctcagcttttggatccattggtcttactttcttgagcctactatcctcgcaatctccagccataccattatcttccaaataagaaatgcaattgaacaaactcggcggcttttggaccgtgatgccaagaagattctttctacaattgtaataccaaggaatggttatttcgtcaccacttaagcctttgaagcttctgaacaagttaccgatacaccccagaccatcatcatcatcaccatccctactagagatctgacatatatacccaagaggaagaacaagaaacatgcaaagaagatcaataaagccttcaccacattcagcgtaaataaccttcttgttgtcctccttactcaaatacactttgaaagacaatacttggcctaaaaccgaatcacatggactcgatggctcatatgctctcttagaaggatatggtgaactatgaaaggggttgaatgttgctgtcaatggagtatctgatgtgaataaggatcgtagcaaagtcattgcctatacattgagattgcacaagtcaaaaagtttcattctattaaaccaaaaaaaaaactaagagaacaacacaataaaagtacctctcggaagccaacttctggttcaccctcccctaacttatcgaacacgttaacgcaacctaaatccttgacacgtttccggggaagatcccaagaaaaattctcgattgtcaaatcatcactcaacataaatgccatatttccatcaccatggacaaagactccatcatcatcacaactacctcccaatctgcttacagat

SEQ ID NO: 27885 - DNA, 1506 bp, Arabidopsis thaliana landsberg
tttgacaattggcaagaattggtatacttcacctttttcctccaaaccaaaggttgttcatgtcttactcacatgcattttcctcgtttagcatcatcgatccatcctcctcttaagatatgttttaacagaaccataccgttttagaaatgattacataattaatcatctagatttttagtagatttaatcaatctctcaccagctagctgcctaattaatttatttttaatcatcattataaatcaagatccacgtggaaacaaaagtcaatatcatcatctctcaaagactcaaaacacatgaatgataattttccaacacaatggtacttgccaaatgattttgtgtcggctgctctaaatccaatctccaacaaaccaaaacgaaactacttgttattttaaaaatcagaggaaatggattatattattagtgtagctataaagataatcttttacgtattcttcattgtggaatatgcaaatacaaacatgtaagtgtataactaaaaggtttataacaaaagaaataaaaagacaagagaacttagaataaaaattgggtataacagaagagtaaggagggactcaccaactggttgttaagtcatttaatccatcaattaagcaattgagcagacacacacccacctttgttttatcttcttccttaaaccagcttatcagggtcagttttgtaatctcatattcctacctataatgacgtttctatgttttatttgatggagtttaatttccgctaccatgcataactaaaagtatatccgttatatcaaacatttaaagaaaacctcaaagatattgaactacaaagtgctcaagaagttctattaaaaatgtatcgaactttaactttatgatgaaagcaagatgataagaacaaatagtttaaaaaaacattttagtttgaaatccaaatctagactctataatttgtggcaggtaataatttcactattttggagcctcacgtacacaaatcaggaagtcgttaaaagtttcccacgataccatggtaatgtacgcattatagattatttcgtttaaatagttagatttggtttttttttttaatatacaaatactaaacttttcatatataaacactcattccttcaacttttttcttttggttgtatttagttaacttatacggaaaagtagtatgagtctcaagtcaatgacaacacaacatcattaaagtataatacaatcatctataaaaatccatttatttgtgtgtgtggaattgttaagttttgtatgttaaagtcgtcataagaaatattatcacgtaatcaagaaaagaaaattggtgatttgtaagctctcacgtgtttctctatgaatggttggcacacaaaaaaaatcatattaatttatctttactctaagcatcagaaacagaagcttctgccgcaaaaaattaaaaaatacaggtagcggttgtcaaattttttccgtagtgatcattatttttttt

SEQ ID NO: 27886 - DNA, 1924 bp, Arabidopsis thaliana landsberg
gccctacctttgtacgttaactagttcagtgtgatttaggttttattcggttaccaagtaatgtgctcattttggtatgctctatcataggcgaggatgttccacccatgcagctcaaagaaagtgttttccgatgtatcatgcaattgtttgattgtcttttaactgaagtacatgaacgttgtaaaaagggcttaagcttggcgaaacgtctgaacagcagtttggccttcttctgttatgatcttttatatatcattgagccctgccaggtctatgaactggtatgtttttgttctgtatctttcagattatcatacatggcggtaacgatttgcattactaaagcgcatctgagtttctcgagaagtctcctgaggattttgttttttggtgtacaagtatgagcatggtttcaagaattgttctctcaaaagagttaatattttatatgatatatatattttaaactggttgggtagctaatcaatcatgtgcatgtgtatgcttttcagttgtttaaatttgtatgctagtattgttcacgaaaaaatcctttaattcaaaaacgttatgcagctcagtatctttcaactgatgtttgggacaaatttttagtttagaacatgggaaagatctgtctttcaaatatttttgatagtgataaatttacttgtcctcacactcaacaggtatcgttatacatggacaagttttctggtgtttgtcaatctgttctacacgaatgcaagctcacgtttttgcaaattatctccgaccatgatctttttgtagaaatgcctggtagagacccatcagacaggtgctctcccctagatactcattacctgtttattcagtttagcattgtcaaacatttgcactttattagcacacttgagcacatagaaataaaacataaagaggccacttttgcagtaagcatatgagctcttgaaaagatgcagaaaatagaagcctaaactgaactacagtctttcaacttcctttttgtgtgtgcgcatctggatgactttatatactaagctaactttatttgtatgttctaggaactatttatcatccatattaatacaggagttatttctctcactggatcatgatgagctgcctctgcgggcgaaggtatatgtgattcaaagtgtttgtacatagaagatacatatcatgtaagaatcttactttgtgaatcgttttccttttttggtatcctttcagggagcaagaattttagtgatccttttatgcaagcatgaatttgatgcgcggtaccagaaagctgaagataagctgtatattgcacaactgtattttccttttgtcgggcaggtacgtcacgatggcctaataaaacagaatgcataaattctttcatttaggaagtcctttaatccacttccgctttgaaattttgtgtggttaatggttattttccaagaggcttaaaagcagcccagaagcttatactcagttgtaattccctcaattattgtgtcagtaagcatccattattacacgaaaataagaaatatgttgaaaggagttaaatggtgttgcaataacaaccttttgattgattgctaattttattcaattatagcgaaggcccagctgataaattttcttgacatttaatgtttttcttcctttttgcagattttagatgaaatgcctgttttttataacctaaatgctactgaaaagcgtgaggttttaattggtgtgctgcaaattgttcgtaatctggatgacacatcacttgtcaaagcatggcagcagagcatcgctcgtactcgattatatttcaaactcatggaagaatgcctcatacttttcgaggttcctttccacaaccgtttcttaaaattttggaaaaaggcttgactattttatttaaactcat

SEQ ID NO: 27887 - DNA, 1317 bp, Arabidopsis thaliana landsberg
  unsure (1)..(1317): unsure at all n locations
gaccttgttgtagtaattggacagaaagcaagagatgtcccagaacggttagccatgaattacattggaggttttttttctagcctgcttcatttacttacaagtaacatcaaggatatgagatcgtagaataatgtgaacctttttgtatgtgatgttagatgtgttgtggtatgtattcttttatgttagatagcgataagccaatgtttgtgagtttgttcttcatcttagtctttatatccctttttaatatgtaaggtgttcttgttttctaggatatgcgcttgctcttgatatgactgctagggaactccaagtttctgccatggtagagaaccacttgtctttgttatcaatggatttgtatgggtttgtacatatacatagttcccactaataataatcttagtgcatgctcgagctttgccatttactaattgatctgtcctgtgtcctttacggtctttataagctcgtaagccataatttggttgagtttcccctgtgggattatatcatatgtttgccaattgattccatgtttctatccatactttcctgtaaacagaaatcttaaatttgtgttgtgttttcatcaatgttttaatgcaattttttacttaagcatatatcatcatggggtgtttaaattctcgtcttcaggcatctggtctcccatgtacgcttgctaaaggacaggataccttcacccccatcagctccgttgtaagtcatgatctgacgcctgtttctcaaaatgctagtttcaccaaaccatgtgacgattagcattatagtttatgggaaatgtgttacgttgaatggatccaattattacgcttgtccgggatcacagtatacgcagctaaggtcatatagcagattgcttagtgttattgcgtccactgggatttatgtattactgagactggaatgcttgtcgtcaccagttgatatataaatatgcgtaacaaacatagcccattagctactgatagcaaacacactcttagcctcttatattaattttggtttgttttatcttgttatagctaccaaaggcaatggtgctggatcccaataacctggaactctgggtgaatgttagacttctcatgctctcttgtcataagttacgctgttcccttttagaatctcccttnntgcagcaggtagatgatgaggcaagacatgaaaggttgcgcgtagtatatgatcttcgaggtcccatatctcatcagctacataagttctgtaatgacccgtttcgaagaacatgtcagatagacaggtcaaatatttgttttcccatat

SEQ ID NO: 27888 - DNA, 2108 bp, Arabidopsis thaliana landsberg
aggacaccggctgtgaacacttggacttcctcctgctatttgttcaacttttttttcttcctccacagacacaacttccacggggggtctacttcctagagacaacaattcagtagcactttgtgcctttgacattgactcctcattcgtcgtagttaaactatgaggcttcccaagtggaccaagtggacttggcctgtctctcaacttccttgacctgcatttacgagtcgaaggagaaaacgcagaatctccatgaagcggctgaatttgactgttcttcttcgaatccccattaccaaatctaacaaagctcccacctttctttataaatctagatggtggagatttggcaatacaagcattcttgatgatggaacgtataagacggttatgaagatggatgttttgtctaccaatggtcttgatgcacaacttgtcgaattcagatttggtgatcttcaaggcaaagaatcttccgagctgattgaagtaactctcagctctttgattcccaatttcccggtaaatgagagctttaatctctaacgtatctaacctggaagaaccttgatttgatcccatcttctacaactaagttgaactaaaaccacatctagaaagtttcgatttttaagatcccagattctctcttctgagccaaaaacctaaaaaccccaaattctcaacacatacctgaaaaatcagattccgataatcaaaattgggacgatttcgaaattgcaatcaattataaactaggaatagagaaatcgaagaagaaattgaaagagatcgaagcgtcacaggtaatttcgtgagattgagaatcgaaagagggaagaagaagatggatcattagagaagaaacatacccagtgaaaaaggcttcccctttgtgccctaaaggcaaaagggacgatgatcttgtttgtttcttcgtttcatatcgcttctcttctgttttttggttctccgtgtttccacgagaaagtcttcgtcgtacgtgagagaaactaagaagtaaaagaacctgttggactttggacaaactcacacgtgcgtaaacttaagtgaagtgttttctgatttctcaataactttgctggttcaaactaaacttttgtattcgttggataattttgcttcattgatctctcttttaatgtgtttgtcacttgtcttgttaagtggataaatcgttaagtacatcgttaactgtgaacagctgtacttatatctttgtttgattcacattgccactagtgtcatctataataaaccaccattccaaagtacttggtcccttagtggaaggatttaacagttgttatatggttcttaagcaactatcaacagagtaatagataatagcaacacaaatctcaaatagtagaaactcaaatctatatgataatcatttgtagagaaccaagattgagtttaaaacaagaagctaaaagattcaacagctcaaaagccttatcgaaataaatccattacaattttaaagcttgaaagtttcacatgattgctcctcataacaccattggtctttaacggtactgcaaacaaaggaaaacaaaaccagaagagttaatcatctttccaagagagtgagaaaacatcatgggccattctcatggagatacaaaagacaatcattcaacatgtttaccttaatgaatccgatttccttggcgttgctacggaagcactgtctacagcaattaagactatacttcctgataaatccatgggagtttccacacacacggctacatacatacaacaacaatttgcataatacaaaatcagcatcttgattgccacatataacacaaacttcatctcaaacataacataagtcaatctcaaatagtgaagacaaaagctaaatataacacaaacttaatttcagacataagtcaatctcatatggtgaagacataagctaaatataacacaaacttaatttcagacataagtcaatctcaaatggtgaagacataagctaaacataacacaaccttaatttcaaacataaaccaatctcaagtggtgaagacataagctaagtacaacaatgtcagacataagctaatcac

SEQ ID NO: 27889 - DNA, 817 bp, Arabidopsis thaliana landsberg
tatgaagggtttttttcaatgttattcatgtgcacaatactacagcgactctccctttgttacataatagtattcttatctgcatttgtgtgacataataaaataaataaatagaaaagattttgcattattcaagtggtggtgtggaaaagctctcttacccacctctctagtctctgcacattgcacagtcacttctctttttctttcttttctttatttattttattcactttttgtgacactacaaattggcatgacctccctctcattatccttcatgcttatttccaaaaacatctctctgcttctttagtttcacatctcacacaagtctttgctctctcttaacagtttttcttctatcatctttaaactatgggaactgttgtgtatcaacaagggtttcagtctcagcttaatgagcctagggctttaaggcttaggctatcttcaccaaatcctcacttttctcaaccatttggtttagctctcaaatctcatttacttgactcctctcatgcagaggacacccgaaaccgtaacgatgacaaagctgctgcttccccggtctctgactcgagtggctggagctctctccagtccctatcctctggctcctcctcctccacaaagacgacgacaagctctgagaaagagagtagttactatgttcaacgtccgtcttcttgtagagctctaagcgaccagagcttagcattgtgcactgagaatctcggaagcgaatctggttctgatgttacagatattgatgagttgttctcgcttgacgtgcaaaccaagaatctcggggaaa

SEQ ID NO: 27890 - DNA, 1727 bp, Arabidopsis thaliana landsberg
gataaatatatctcccatttcttgaatagagtatttacttatcttgtatttctatgttattcccgagcacagaacatggtttcttgagtcagattgttcgttatggaaaccatgagtcatcaaaagttggaaggttatagcaacctaatcagctattgatattcctggttgttccaaaagaaatttagtcttctcatccacagttcgtttctcagttagactctgtatctttaatttggtaacagtagtaattgtttttgaggagagttcacatactgcgatgtaacatccataattttgtccaaagcactgaagcttgaaaaggagcatggaggtaacattgcatgaatctttgtatttattgcatacattcaattaacatttttctctcgtcccttattgcatctgcgaaacttcctcacttgcctcttctgcttgcttcatagcatattgtaaagatcaccacagctgcagcaacagcgattccaagcgtctgctgcgtcactgctgaaggaattcttcttggcggattaaatcctagttctgagagtttcttgtgtgaaattgcataggctttgaagaacatatcctcgtcctgacatacacatcaaaatcatttttgttgttgatgaaaccagagaatcatccaaagtaaaagtttcttataatcgtagtgaaatctaatctacctttgcatacagcttaacaaaagggtggaacttgggatcatcaagtagagccttgtcggttttaagttgtagcaatcccggagtctccccttttagaagctctctgaaaaaccaatcagcagaaaatgtaagtttcagaactctcactctctctcgctttaactcttgtgtgactttatcgttggcttacacgaaatacgagttatcaaacttgagagggtcctgtgtccaaggaccttcaaaatctgatctctccttatgtgcacgtccctatatacaaagtagcaaccaagttggttcattggagcatgtttagtgactggcggatattttgaaggatagttagtaataagtaccaaagtgtgacctccagagagagctacaatgtctctatccaatagacccatacgagagaagagagttcttaaatgtggggcagctgcaataatccaaaaggagggcttagtcagtttgtgaaatagaattccgttgcaggagctacaagctgcaggagtaaccttcatttggatttggaagttctccatcgtccgcggaatcagcatcctggtatcatatttctcaacattagtaaactcacttagcaacgatgatttaacgcatacgctttagcgataagtgtaactaccttacggcctggtgtaaatgggattgcagggccgccagtaacctccactgcaacaactccagcgagctgaaatgaaatgaaagaatctgtcacgctaaccatcaagggtgaagagagtatttatgagtttaatggcttcgagatgctgtataccaatgttgatttacctgataaaggtctgcgtaagagactctgggatgcttagcctttacttcctctgaaattagaaaccaaaatttagacatcaaaggagacagcaaccgcttgcaggtcctgaagagtagtagtaacggattagaaggtttaatcataaaactcaccgcagaagcgactgccttctccaaacctttgttgtgtggacggtttagctcttccttgaatctgatagatcc

SEQ ID NO: 27891 - DNA, 1935 bp, Arabidopsis thaliana landsberg
ggtttgttacttctatgcatgcagacgttaatagcttagctaggtactaagaaagaaagaaattgattgttaccataatttgcaacttctagaacttgtaaaacttaaatagaactatcactaataattgtatgttaatgattgacaacattactaatatatataactgtgtgccgttgataatgttgattcctaagatctttcctactaattaattatctaacattaagacaagaatggaagtttcctaattaagcatgtgctgtaacaatttggttggagacacaaaaagtcaacattttttaaagtcaaactaatcgttctgatgactttttatttctttctcttttttgttgttttggtcaattttctcagtcgccaaaacattcaattcccaaaccaaacagagcagaagaacaacaagttttgattctaaaaaaggaagcttcccaagtatggatccgtcggagtattttgccggcggcaatccttccgatcaacagaaccagaagcggcagcttcagatctgtggtcctcgtccttcacctcttagtgttcacaaagactctcacaaaatcaagaaaccttcaaaacaccctgcgccgacgacaaatcgtgagcaaccgccgtcgtatattcctagaaagccgggggttatctacgccgtatcccccaaggttgtacacgcaaccgcgtctgagttcatgaacgtagtccagcgactcacagggatctcctctggtgttttcctcgaatctggcggcggtggagatgtttcaccggcggcgaggctagcgtccacggaaaatgctagtccaagaggaggaaaagaaccggctgcgagagatgagacggtggaaatcaacacggctatggaagaagcagctgaatttggtggttatgctccgggaatactctcgccatctccggccatgttgccaacagcttctaccgggatattctctccgatgtatcatcaaggtgggatgttttcgccggctataccactgggattattctcgccggcgggatttatgagcccgtttcgaagtcctggctttactagtttggtagcttcaccaacttttgctgatttctttagtcatatttgggatcaagattagatttttttttggtgttttgctctgtaatttttttgtattatgtattttgacatatccaatgtagtagcccaaagggtttaaaatgagcttcatgtataaaaagattaactttcaaaaatttcagacagattcctagaatgtaaaacttgtctgcaaactaatatatacaggagttacaagattctcctgacctaagatactctaataagttttgtgttttgagaataggcttcttcatgaggttgttgtaacaatggagttccaagttcctcctatcaatgtaccaactctctctcctttgattgctttggcgatgttcccaggttccgaaagattgaataccacaactgcaaattgacacagaactaaataagcattcttgttgtattttagatgatcatgtatgcatgtggtcaaggtttgagagagtgttatagaaaacaaacctgggatgttattttcttggcacaaagtgatagcagtcatatccattacagagaggtcctttgaggtgacctcttggtaagttagtgagtcaagcagacgagcgtttgggtttcttttaggatcatcgtcgaacacgccatcaacatttgttgctttcagcactacttctgcattaactgtgtccaatgcgaaaagtttttttttagtgttgcgaataatcattggagaaaacttaaacggaaaccacctctttacttactttcagcacatcgaagagccgctgcagtatcggtggtgaaaaatggattgcctgttccagctgcaaaaattacaaccctttctatttctagatgtctgattgctc

SEQ ID NO: 27892 - DNA, 1549 bp, Arabidopsis thaliana landsberg
tacatgaaagagcaatctgtatagctttattctgcttatcgccagacagcatccaaagggcatggttgcttttctaagtgtcttgatcgtctctggtacaccatcctaaataaataaggcaaaaatctatgtaagacattcctctcctatttacggtggtacattatattacactgtgaacctcactagtcctggacatttaaatttttacctgcaagcggtcttctattgcagtgacccctagaatataaagatcatgttctaacctttgacagacctcagcaattctccactgtaacatgagaaaaacatcaagcaagtgcatcgacttacccagtcaagctgtagattcaaactaatcatacttcataatcgcttatagtgaacaacagaaagagagaattgttccaattacctccctatcaaccagaagactactagcctctttaaacttcactgaccactctagatactcattctcttcaagttcacgccaagccaaacacagtgttcggagccccagctgggaatagtgttctacggcgtcaccaatagttcgggtttgttgacctaaaagcatattggagaataaacggccatcagctctgagcacattcagttgaatactacttactcgtctcatattaataagagatacatcaacttaccagcacgtgcatagggaaggattgcttcatctgcaccttttgacagaagtataattttcccattctgacaatctttcactaccactgacattctttttcgatcggaagtgaattcaagaatctccagtacctcatagcgaattactgaaccattaaatctgatttctgcatttaataaataggaattaaaaaaacaaatgataactactttttaggtacatattccatggagagcaaaaatgaaaattagatgctattacctaggagattggcatttttgccgacaaagaccatatgcaactttgaagcagcgattacaagagcgtcctcatcctgagattgcgccttgtaaacaatatctccagctttgctgtcagatggaaacccaaaaaaatcataacttaatgaaaattcccatgggttttcaaaaaaaaaaaaaaaaaaaaaaatgaaaattcctagacaaacagaataaatatgcagaagttaaattttccaaaaacagatattgtgaagatttcaagaagttcaaatttacctctgcacaggtataactgtgttgcagatggccatcactgtaagaaatcggataacatctgtagagccactggtgatggcattaagaagttgtgcatctgatcggaaagaataaatcaagataagtagtcactaatgcacatgcttcaaacaatgtataaattaagatgatcgacacaaattgggaaagcataaagctgagtacataatacacaaaaaaaaacaaagtctgaaaccttttaaagcatctccattctcattcccatccaatacgcccccaatacagcatcttctaaataaaatcaaaatatctgtcagggtcccagttttgtcggtcaaaatgt

SEQ ID NO: 27893 - DNA, 1519 bp, Arabidopsis thaliana landsberg
  unsure (1)..(1519): unsure at all n locations
tgtcttcttttcctttggttgtagtagctgcattttttttcctttgttgctttaagaaatagcccgaaaaaacgaatgttctacatttcggagcagaaaactaaccgaatgagtttttggtcggatcatcggatcgatcagatatattttgagttacgaactgttataaaaaaaagccataattntgtgttgagtttgcaaaataccttataacttgttatttgagattgcacctccatatatattaattcgtaagagtatttattaagtaagctttagtataaatccttttttcctttaaagtaagttaatgttctactaaataatagtaaagttgaagaaccgctccgttttacaccatgcacgtgttatctaacaaagaaaatatggtacacctaatggctaatgcaaaggacaacacaatgaaactaacttgactctgtgttatacaaacccatagacatctgcatacatcctagtatttgtataaattggactcaaattcctgaggacaatcatagcaaacaatcacatcatcgcaatatacataaacaaaagaggaagaaaaatggcaaccgagtggtgtagttatattggttcgtctttcatcctcaatttctacttttcattctttgatattggtaccgccctttatcgattttctttaatcttttctcttctcgctcacgtcaaatcgtttactattatttaattctcatgtgtcagtttcacatagcacattcttgaggaaattaattataatttggagcatgcattgtttatcgattgacacagatttttgtttcatctattgtttgaataacaatggattacacaacaaatccccaatatatgatatttggagagccatatagtattagtagggatatatagtttgattccataataaccgttggacctactgttttaccaaatgcaaatgatttaccaatctgatgtggttgatttgaccacacacagggaagaactcatggccggagcttttaggaacaaatggagactatgcggcttcggtgataaaaggagagaactcgagcctcaacgttgtcgtggtttcggatggaaattatgtgactgaagacctcagttgctaccgcgttagggtttgggttgacgaaatccgtatcgttgtcagaaacccaaccgccggctagacatgtatatggaccaccattatgctatagccatgtaggcgccttactatgaataaatgaaactatatataatgcatgcatagttggttggttggtcataatgtaacatctattgtttgcttgaatgattctggtgtccgatcatataacgcatttgaatggatgatgtggtgtatattttggcaggcctggtgatttaggaactaagcaaaaatagtattttatttagcgaaaacgcaagagttgtttattaccaagagcgataagaaaagaacaacaaaggcttaataaagattatgaaaaatttacaagagaatttgggcatcattcgacatgaacgtaga

SEQ ID NO: 27894 - DNA, 1751 bp, Arabidopsis thaliana landsberg
ggctgatgaagtaaccggttatctctggatacttccatttcaacagaccttcatgggtgcggggaacataaggatcatcccagccctgttaacagagatttagatctcagatatgtatttggaagacaatatacactgtactaaaactaaaacttcactgcctttgtatgaaaaataggctttaacatcaaagatcctcttcagtcgcatggttacctgaaagattaggccgtcggcttcatgtgaaagtgatggtatgaaacccttcaaaaccttctcaaccgcagaaagcaaccagaaatcctttctccgcacctaggtgaaagaataattaacagctccataaacagtttatacaaggaaaaatataaaaatggaaaagtggcatgaatttttttataacgcaccctaaaaggctcaagatcatatctatagatatgacttcttgccttctcatgattacgggggtctatcacctccttctcgagcatcttccatctttcatagaaaggcctctgctccatttttgaattgtgcaactttctattagtatcttaagaaattaacacataatatagcaagccaaatacaactcattgatactctatactactgacaagatgtgtatgctggtaaccagattacgtcaaggtttaactgtcagcaacaaagaatactgaacaactgcgaaaaacgatataacatatttgcatggaatatgcaccatcggagtcagatgctctatatgagcataggaattgtatatgttcataattcccaaaatatttattgcaccacgagaaagtcagacatgacaaacaacaaacactctaagctaattacgacagtaagcccggcctacataatgtgtttaatttctcgaatgttctaatattctataatgagggtaatggcagctacagtatttacaatgtgcttcagtaaatactcagatcttgatcaaaagagccaccaatccaaccattattgattacataaataaataatgacaattccaacctctacaactgattggccgttgattgctaccatgtcatagattacgtatctcctctcctgcttttgattatctggcaaggtatcgattatcacttctccatcaagtaatgtgaaatggtgcactttatcagatatgccctggcaaccaaaaacaaataagtaagaaaaaccactagttcacacaatctcgcccacaaagcaggaatattactcacttcagttgggtgcctaaaggggaaccgcatctgtaccctccggaatctaaagcttctatctactatgtaacatccatcggtggttagcagcatcatatatcgcgttccatcagctttccatgttgcataatagtaccgctgcctcaagagttgcaaattttccctgttttaccacaagagaaatattaagactaaagttctgcaaaagaaatggactaattgaccccaaaactaaggggatgcattagtccaatcatctcttttcatacactacaaagagtaacacagagattcatacctgtttaaggagacagggtgtgaacctggaaattgtgaacatcctcttccctagattagagaaaaatgaaacttgttagatactcacagatttaactaaataatattcagggtgaccctcacatacgatttgaaattttctaccccaatattcagtgatagcattcctataaaaaaattggcggtaacccttccttcctgggtctggggggggatttt

SEQ ID NO: 27895 - DNA, 1901 bp, Arabidopsis thaliana landsberg
aaggtctggacattataccgcgagttgttttatgaactgacttattactaattcatcttaacatggcgttacctgtatgatatagggagagaagtcaaagtgggaagaacagaagaaaaatgaagaggaggatatggacaagctattgaaagaaaatgatcagttcaaccttcagatttctgcgttaaggcaagagctggagacaacaagaaaagcgtatgaacagcaatgctcgcaaatggaaagccaaacaatggtcgctacaacaggacttgagagcaggctcaaggaacttgaacaagagggaaaagtggtaaacactgcaaaaagtgcccttgaggaaagggttaaagagcttgaacaaatgggaaaagaagcacattctgctaaaaatgctcttgaggaaaagatgaaacagcttcaacaaatggaaaaagaaacaaaaactgctaatacaagccttgaaggaaagatccaagagcttgaacaaaacctcgtaatgtggaagactaaagtcagagaaatggagaaaaagtctgagtccaaccaccaaagatggagtcagaaagaactttcctataaaagctttattgataaccagtctcaggcactactggtatgataaccatatatacatactgtgctaaaataatcattttataatcgacagttggctaattatgctgaatcgcaggagttgaggtcctattcaagatccatcaagcaagaaatactgaaggtacaagagaactatacagaccagttcagccaactaggtgagaatgatctaagtgatgcttttgtagtcatgacaaacctttcatgaccttgcaatttttgtagtgtttataaattaaaatctgtctcttcaggaaagaaattgattgaacttagcaatgctgctgaaaactatcacgctgtactaactgaaaaccggaagcttttcaacgagcttcaggagctaaaaggtactgaggatcatgttcagtatttgttcagatgtgtattttcaaaacttatgcagcccataaattctatagttatgacttgcaggaaacatcagagtgttttgccgggtgaggcctttccttcctgcacagggtgcagcaaacacagtggtcgagtatgtcggtgaagatggagaattagtagttaccaatccaactagacccgggaaagacggtcttcgccagtttaagttcaacaaggtgtatagtccaactgcttcacaaggtgtgttcatctgttaccggttctgttatatatccttatgcttttcagttctgttttgtgtgatctatgcgagaattcatggtacatctcgagaaataatattatattgatatcaccaagttcatttgatattttggattcttgcagctgacgtcttttcagacataagaccgctggttaggtcagtacttgatgggtacaatgtttgtatatttgcatatggccagacaggatcagggaaaacttatacaatggtatgtattcactgttgtttctgagagtaagattttcataggaataacgctgatgcgcttttaccttcgttccctttctttcagactggtccagatggatcaagtgaagaagactggggagtaaattatcgcgctctcaatgatctttttaaaatctctcagtccagaaagggaaacatatcgtatgaagtcggggtgcaaatggtggagatatataatgaacaagttcgtgatatactttctgatggtggttccagtcgaagatatccttttctaatctaatatagtgactaaacattttttggagtaggtacactcgtgcatttatatttgcgaccccacagagaaattggtgtggtttagtgctattaggttttactaatgttctgtggttgcgttcaatacaaaatttcc

SEQ ID NO: 27896 - DNA, 1922 bp, Arabidopsis thaliana landsberg
cactcatggtctgctgtatagtaccctccacagtcaaagtgtaggttcgtctggatcctcttcttcatcgcctcctacaaatataaacactatattagtaccagttgaaccacgagatgtaccagtgtctgattcaatttcagttcgtccatccattgtattctgcaaatatggtttgattctgcttacacattgattcaattcaattacattgtactaactataatacttacagtagatggaagaactaaagaaggatcgtttccagagtagccgcaacaaagatcaataaagaattcgatccaatagtatcgactcacgtagcatgcagcaccggagaaatcgacgcccagagaattggattagctgacctagcaaagtttcccagactcgacggagccaatgtcaaaaatcaccgatgttggaagttaatcggaaatcgcctatctcgtcggaattaaatgtcggaattaaatgaattgggtcggaattaattgggttgggtcgggattatttcgatttctttttggattttgtttttgatttttgttttaaaattaattgatataattcattaagggtaaatagatattatccactacaagagtggcatgcagatcaaaagatggcacactggattcaaatttccggtttagtggcattgttgattaggacaccttcaagttggaataggacggtcgaagatcgccgtggtttttaccgtcgctgtcacaatcacagccagagccgcagtcactttgctcattcctttgcaaaaccctaaaaaaattattgggttgggctttagattgtatgttgggttttttaattgtattgggcttttatattatttgtaatggtttattttagtagggtgaattacaaaaatgacggtttttgaaaaagttattaaatatatagcaccataatatgtgtaattcatttgatagcacatgtcagttgcgaaaatacacccaactccttcccaacgatgcgcttggagagaaagagaagccactgacaggaggaaagagaaatatatatgagtaatatatattcacccctcttgattttgtttactttattagtttaacaatattacttggttaaagttaataatactattgaaaaaacagatttttttttgtttatttaatatgatttgaattttaaaaatcggaaacgaatttcttaaaaaatgaatagtggtatcaaattctatacagatcatcatagaaagatagaatattatatatttgttcaaatagaaacgtttgttcagatgaatccaaataatcaattaaatactttttgatggaaggatactaaatcctaagataatatatagggaacccaagacttttaatataaaacactaatcaaatcacttaatatctttaatcaaaacaaacaattcattttaaaacatatatagtacaaggtatacgtaaatagtatacccaaaaagtacaacgacgccaataaattagagagacccaaaaaaagaaatcaaatgaaggaaacagaaaacagagattgatcaaattcagcgcttattagcgagaatctcgactaattcaatttcagaaaacaaaaccaaagtctcttaaaaaaaccaaagactccaacaaaatctaaagtcgtgcctctgtaaaacaaaacctctaattcaatttcgagcaaaacctaaatgtcatttccgaaaattaactgtcttgcttctgtgcccaatatacctctgttaatcgttggcaaaatcaaaagcttcataaacggtggactggaatttgttagagccaaacctatgttcaaaagttaatagttggtgaaagagaatagttggttttctatggaagggagaagatgaaaagcgtgtatttcacacagggatagtattggcattgttacagaaaatacaaaca

SEQ ID NO: 27897 - DNA, 630 bp, Arabidopsis thaliana landsberg
tgtgttccattattggatttgattctttgagtagggttattgaatttctaaaagaaatattagatgtttctaaagagtgtatatttagaaaatttgtcaaaatatttgattttgttttgttatagaaaattgaaagttgtttgtttataattagataaaggtaaaaaacattgtatttcaataaacctagaatttaatagaattaaaatggatactaaacttataaaataagacatgagttcaattattttaaagctctgaagtgaccaaaaaccaaaatcaaatcaacctatcaaatgaataaaaaaaacttaaataaactaagcaacaaaacctaaaccggaataaaactcgacggctgaacggccataaccgagtggtattgttttccatactacacaagactaaaaaccgtaataaccagaatcgaaattgtaactaaaccggcacctaagaaccgactcgttttccttacggcgtggtttttcttgtgagttgaagcggctagagacgaggaaggtggaggagattgcgtcgtagattccacctccatgactttaataatcattttctgaccttgttcacagtggcctgagacaccactaatgaaataaaacaaaccgggacggt

SEQ ID NO: 27898 - DNA, 2410 bp, Arabidopsis thaliana landsberg
tgcgctgattgaagttcttaccatgtttctgcagactagcaaaactgcgttattctctgccacccagacctctaaggtatttttctgttggctgttgtatggtcattattagtatcttctgtttcttatgatgcattgtctaatcttacaggttaaagatcttgctcgggtgtcattgacatcacctgttcatgtggatgtcgatgatggcagacgcaaggtatgaattaaatactctgataatggatattaagggagcatggagagttttcttatcaagtttccaaaactgttaggtgacaaatgaaggattggagcaaggctattgtgttgttccgagcaaacaaagacttatccttctaatttcctttttgaaaaagaacctaaataaaaagattatggtatttttctcgacttgcaagtcggtacaattccatacggaaatcatgaaaataagcgacgtggatgtctctgatattcatggaggcatggatcagaacagaagaactaaaacctttttcgacttcatgaaagcaaagaaaggtatcttgttatgtactgatgttgctgctcgtggtctcgatattccttccgtggtacgtctccacatctatgttcttgcattggttttgtacgcatttacttaccaatggttttatggaaatcatatttctggcgatttttattatctgtaggactggattatacagtatgatccaccagacaagccaacggtaagacaaacacttcctcatatttggttttgcatatccctttgcctctgtatgtagaatcttaaattgttctttggtgctgttatttcaggaatatatccgtagggttggtcgaccagcccgtggagaaggagcaaaggggaaaggcattacttgtcttgattcctgaaaaacttcagtttattcgcctcctgaaggtaagaatggttattgaatctttattgtgggttaaccaccttgagttttagtttgtaatttaaccctcaggctgcgaaagtacctgttaaagagcttgagttcaatgagaagaggcttagtaatgttcaatctgcgctggtaagacttctgattcagtaatgttgtgggtttaataactttccatttgtaataacaacgtttctttttctgtctcacaggagaaatgtgttgccaaggactacaatctgaacaagttagccatagatgcgtacagggcttatctctcagcatacgattcgcactctttgaaagtcatctttaatgttctccgacttgacctcctggtaaaagaaacttaaaaaacaaatattcttccaaagatttttgttttcataatagctaatatctcgtgttttgacgttgagtatcgcaggctgttgctgaatcgttctgcttctcttcgccgcctaaagtgaatctgaacatagaaagtggagctgggaaggtgaggaaggcgagaaagcagcaaggtcgcaatggcttcagtccttacagtccctatggcaagtccacacctacaaaggaggcataaagtgtcatttgtttacaaaattactattttgctccgtagttttgactaattaccaccaccaagttttgtttaaagagtaaacagtgcatttgatttaaatgaaatgttccttggctactattaatatttcagttctatgggttataactttttaagaattgttgatatcgtttgcttataataaaaactaatacatggaaatggaataagaaaacataaagaaaccataaagagctttattaagtgattatcggaactacatgaaaagtgaaaacatattcattgaatctaaaccggtctaaccggaaaccaaattcagtaatcgaaacaaagaaaaagaaaacgctaaaccggcctaagatcttcagcagctaaaaccgctggaactaaaccaaaccaaaaactgaaacaatcagaacagcagagacaacaaaaccggaactactgaactggactgcggttttgaaggcattgctcttcttggccttgggagttgacgccggaagagatgatgatgacgaagaagaagaagaagaggatggaggaggagactctgtagaagactccgtctccataacttttacgatcatcttctgacccttttcgcagtggccagagacaccgctgatgaagtaaaacaaaccgggtcggtctagtttgaaaacagtgtcttcgttgtttgagtagagttgtggtttggtcgctttgcatttcttgtactcttcttctgacaccactaacactgagtctttcgtgtacttgaaaccttcaccaaaaaccgcacaaaagagttaatatatcttattatcttacaagatgaaacgtttaaacttcatacaaaagtgttcaatatacttaattacttacggagagtgtcaccaacttt

SEQ ID NO: 27899 - DNA, 3609 bp, Arabidopsis thaliana landsberg
agatcgtgctcttgcaatgctacatcaaatgattgaggatgcttatagttgcaagcgtcagttcctgagtggtatttattttgtctttctctacgtctgtatttgttcttgctgtagtatacaattaacttatctgctcttgctaattatgtattttagacctttcatgtagttctaactgtttttcaaacaaacaataggtaagcttcataacttagcgagagcactcgctgatgaaaaaccagaagttgacgtactcaaaggggacggatcagacatggccgttgagaaggatggagttcttggtcttgggctaaaatatacaaagcaaagtcctggttcagcaaatagagccgtggatggaaatcctgtttcacatgaaacagaagacaagggaaagaagtcatttggcccattaagcaacaaaacctctacttatctatctcagtttatcctctatactgctgctattggtgatatagtagatggaactgacacaacccatgatttcaactttttctctcttgtttatgaatggcctaaagacgtaagtgtttctttttatgatgttctcaggatatttttcatataaactctcttccttgtcattcatgcttgtggtattatcctcttaatctgcttttatttggagatatactactgggttttgctttcctttattctgtgaactctagcaatttatattcataaacaatataaacttagtgagtacgatgagtggcctcttaagattttgatattagggttaatactctctgcctctgtgtggtgatccctgaacccctgtgcggccaattttatacagattggtaaagcctcaaaatactcttcttaggcacagatcttgagtcacctctcactgttggtgcttgttgcagctactgtactcgtctgtgtttcatcgacggtcatccataggcttccatctttgagcactacaaaaccgacatttatcttccttttcgtcttctttccagaaaagcatacaattgttaatacaaacatcgattgtataataaggaaggcctaaattgcgcataaatttttctgtcttgtaatggaaatcagtagcttggtttccttctggtaaaaaatttgtcaacatttaacataccgaatccacacatctttgactcatattatgatccgccttgttctgcatgactcgagctgctaacgataattgagactggccttcacgacaaccatcgtacaatggattttgagcaccttctatcaagtcgtaaatttttttagaatggttacgtaccggttcctccacattctgattagtaccgtcttgatgatagttatcatcaaaccccacgttataacgaaatgcatcgttcgccatatccacatatggatcttctacaacatgacccacatccacatatgggtcttctacaacatgacccacatccacatatggatcttctacaacattacccacacttacataattctctaagatacgtactatcaacataaacactcattcctacattcatggggaaacctacccaaagcccataccaaacataataatgaggcataaatgatgactaaacaaatgactactaacttttctacccgagacgatatgttttttattcttgcacacagcacaaggacaatggaatttacctcgacaactttgtactataggctggctattagcaaatgtcaagaactcctccactcctgcgacgtattctgctgacaaattccccgtcatttcatcgaacctcttgtacatccaatctcgattaaaaccaccgctactcggataattatagtttcccgccattataagactaataataaaactaaatatatttttaaacgttttttttcttcaaaaatgtttattttttttaaaggtaatattagtattgtgtttgtgttgtgaatgaattttgtgtacgagaaattttcattatataggaaattttagagtgactaaaacacgactaaatagtgtagtcgtttaaaacaggtacagcaacttacaaaatgaaatacatgtgcttttttaatcgataattacgtctattttgcgactatatttaatgacacgccggagtaatcatacaatagtcgctagttaacgactattacggcgtgtcgtatattagtcgcaaaattgtgaaaaaattacgactaattttggcaactaattacagcgtgtcatatagtagtcgccctttatcatatctactaaggcgtcacacctctatagtggtaatttggcgactaactaacgactatagcgttgtaagttgtaaattagtcgtataaatgtagccaaatagtcaccaaatatagcgactatttatgtagtcgccggttgtagtgggtagttagctgttttcttgtagacccctaaaccctaaactcttaaccctaaacccttaaacctaaacactaaacctcaaaaccatagaccccaaacttgaaaacctaaatcctactttagcttcaggaatccagttgcggttctagttcttatgctcaatgatacacaaagcatttagtcatatttgactacaaatccgctaatagcaaagcttattctagattctcaaagctttgatggtgaagccgaagttcttatgagttttttggtgttttgtatcgtttaacaaggaagcactactttacttttcggtatcacgtagaggttctagttttctattcaaccatacacatcacatgtgctcatatttcactctaaaacgctaaccaagattctttttgcttcttaaagtattatagtatatttgctcctaaacactaaacctaaactctacaccataaatcccaaaacctaaaatctaacccctaaaccctaaaccctaaaccgtaacgctaaaacttaaaccctaaaccctaactctaaaccctaaactgtacaccctaaactttaaaacctaaaccctaaacgcaaaaccttaaccttaaaccttaaaccctactttaatttccgggttcttatttcgtttctagtttttatactgaatgataaaaaaaaaaaactacaacaaatctccacatttttatcacgagagaaacgctatgttacgtcattaatagcgtttttataaacgctatgttatgcccctgttatcgtaagttgcccacataagatagcgttatagacgtatgcgatgttaaataattctattatagcattacggaaacgctctgtattgaagcgtattaaattgtttgaaattatgtaattactcattatccatgctatgttaggagactatacgatagctttgttatagcggtttaatttatgtttttataagaaatttttatgctatgatatagtatcttatagcggtattaatttgtttgaagttatgtaattactcattatccatgctatctttggggactctattttgaaaattttctttaataaccattaaaatttgcgctacagtagatgactctaacatagcatttattaaatcttacattttgataaccaatagattccatagcatgttttcaaatgccataacaagtttaatcatgacacctgttttataaaatcccaaaatatttcattaa

SEQ ID NO: 27900 - DNA, 1828 bp, Arabidopsis thaliana landsberg
cattagctgtctccaagcatactatacgatttgacttttgaaatcttatatataatgtggatattgtgacgaatagaaatcgttatacatacgacactgcatagtggctaatgaccatatatctaagcagatccccgttcggagagtatatagtagcctaatccaaattgaggcgcgatacgatgcaaaccttacaaataagttctcggtcatctgaagagtacctgattaacctctcgacggataccgcaatgcctatcggtctcgtgttctacgacgacatcgccaagaaggatctgtctatactgatcactagttacaatcttgctactggagagcgagctactcaccgagtccctatcgttctcttgctatggggtagtctgccttgggttttctcaagtgcaactatataattcctatgaagctacgccacataaaggaatgaacttttttcatttgtgaattgtgatcacttgaaattttaattacaatatttgcttctatagattctttattcgttaattagtgttaactttcacggttttacttgttgtttttttgtctcttacggtcaaaatagccacgaaagataagaggtaaaacttttatttgatcttcgtgtccatcttttgactaattcgtggccaatgatcaaggaacagtcgtggctacaaaggatatgacttattcgagagaacaagtgtacttaatcaacatatatgatcactatggtgcatcttcaataaactacttgtctctgtatatgactaattttacatgttacatcttgatatttctttatgtatgtttggttttataatcccgatccatacccaattcctactacataggcgaggttatacggcttaatagagtcgaactccgataaaaatgataaaatcaaatagatttaagaaaatgtaaaatcaaatgaacttaatcacttgactaaagacacatcctataatttaaattttcgaatatatagatggatcgaaccggtcgaaccctaccagcccgaccataaaaaacctaatcataggaccctgtaattgatcaaaaaccatatgtaattgttccattttttggttgtgtaagtaattaacacgacatgataacatcgtttataaccgtctaggtttaagtaaaccgtttaatttcggttcgcttgttcggtttatgtgtaaacctaaccgaaccgtagttctctaatcccttgctcactgtcttcgtctctcttcgagatgagctttcgcgcgggtcgtcctccttcccttctatcaacctcagtatatccgtagcaaacttgtgctatcttccaaattctaaatttcaaagcttcgttatccgtttataatggtgattggcagtggcgtatttttgacccgtacctgttacttgagacttcaaccgccaagccttgtactgcgccggagattctgcgcagccaccacggcctgctctgttcctctgaacgggaacaagaagaaaaagtctgaaaaggagaaggtgattgtgatttctgggcccaccggcgcaggaaagagcagacttgccatggagctcgctaagcgactcaatggcgaaatcatcagtgctgactccgttcaggtccattttctcacttgtactctctaaataagttacagctcacttgaaatttgaaaccttgttgaggataatcgctaaagttgaagtttttagttttatcaattccagaacttcgcatctatgtttggtgtggattaaaaaggttcttgcttttgttttaccccaatcacaggtgtataaaggccttgatgttggatcagccaagccatcagat

SEQ ID NO: 27901 - DNA, 3455 bp, Arabidopsis thaliana landsberg
gtggaatactaccatcatctttataacgaatgattagtctttgttatgcatttcttcttgttgatatttgaattttatttgcaggtaatgttgatagaaacagggaacaacaggagaatcatggttcaggttatcagcaggatcagagagtacaaccctgtcatctgagttcttccatctattacggtggtcctgatgtttatttccagcctcaaaattccaccagcaactctacggtaatcattaagtctagaaacttggtatatgtagctacctgatagtcttgtggagcttttgatggtcttaaaggttttgaaaccaatgttattgtgcttcttcatcgactattgtctctaaagaatctggctgaagaatctgaagacgaattacttagggaaatagctagaaacttttatctatagctgttttttttataaagttagtcttgtggaacttttgatgagttttaagggttttagaaccgaagttatcacgcttgttcatagattattgtttctaaagaatattgtttggttatgttttatcgttttgaagaacaagaaagatggaggcgaagatgattccggaagtgcctcaagaggaaattggtggcaaggtatccgattcccatcttttgatcattttgttctgctttgtggaaaatcttgttccatttctctaaccgttcttcaaaactttccagggtctctgtattactaagtagagatcttactacttaagcaaatgttataactacaaaatcaaggtataatgaacccaaacattcattgaaatgattcaagttcggttcttagacacgcaatactgattatggttttggtttgggattttgcaggtacataggaacaaaaagagaatagagtagctgtggatccgtcgtttttagtaacttctcatcttattattacaaaaagtatggaagaagtttgaatgtagcttagctgcagaaagcaggggagttgtttttgtcccttgtcgtggtttagtgattgacccgaccggttcagatttaattttcccttaattttatagttaaaccgttgatggttttgtacaaactctttaaaattccagtttccacgcatataaataaataaataacccttcctgtaatcctgttctagctctttgaaactctttgttatgtttgaatgttcaaatcggtctggttattatcggtgttgggttgtgaaaggttccttgtctggtttagatgggaatctcttttgaggagaacaatgttcagattctgcgtttttgtcataagatgtgtcctccaaagattccaaggagattctttttacatttgtcctagttcttgatcctttcaactttcatcctctttgttaaacttggttataaaacttgtcataatgcacttgttaaacttgtttaattgactcatttgttgttaatctcaaagtcaaagcccatctttccaattattattatacaaatctaaactacacacaagaaagaaagaataataaacataatagaagatattgaaaggaaaagggatccaaaaacagagacttttccaaggtgtaggtaattcaaatcccaggatcaaggttcgatacattcaacgactccttcatgcatttctccagagacaatctctcactcgacgaagaacggcttgatctttctaaaggaagatccttcagtcttggttcgttctttgttacataagctgtcaaaacccttttaacactgctgctgtgaggaatcttgaaccgggagggagatggtggaactgtaattgatgatcgaagctcctgttttgaaggcgagtagctcggagttgtgtagtttgaaaccggcactgcaatgctcttaggagcgtcattcccgttgttgcctaatgttgtaggaatctgatccgatgaatgtcttgtaagatcatcacaaaagagcaaatcatcgatgcgtgcaacaatgttgaatgctaagctctctagaactcttgaatagctttccagaatcgatttcccgatgtcctaaagcatagaaaaaggaaaactgtttagaccggatttcaagaagaaagaatgatttgggatttgatttccatgtagtacccttgttgtattggatcttgcttgtgtctaaagctgtttgtctaagtcccgggaaacgttgcttgagacggatcaataagctttctgctctctccgcaaatatttcccttttgtcaccatcggtttgatgcatcatcatctccttcactatcatcccccatcttgtacttgtggatcgatacagagatatcagatgcctcgagtgagctcttctcctccaaacgtacattgatgcttctactcggttcgccatttctacaaccgcaagctcagatgaaagatctattgattctagcaagtgatccgcagagaagttatccgatgtgatgtttctatatagaaaatctccaagacaagatcttccgttctgcaaaataggaacaattcagctagaggaaattatattaagtttggctctgagattaagtttggctctgagattaagttgtttcttacctttggaagggcttcaaggtatgattgtggaacttccatttcagctaaagcaatgctgttgattgacatacaagctttcaagatttggttggtgaattcgcgagtatgatccagtttcttcctagtttgttcggtaagtccatcggatggcacacgcggcagcggaagccaccatttgtctccgtcttcacggaaagagttagaccttgcagattccgcagctacaatcccttgatcaacgtaccagaactctgtttctccaaaactatctaatatttcctaaagacgtcaaaaacagaactctattaagaactcacatttgaaacccctcatgagaacagaacaacaaggaaggatcagattcttacaataagcatattgtctagcttcctaagagcaggaagacaagtaaagagatctgatcttggtctgcagttcatcaccttaaaatccaccaaatcatcaatgaaacagaacacaatcactaaatgcttaagcttgaaaatgaaattacctcaatcttgtttccattggggaaattctgaaaggaaggtaccaattcaacaatgtgatcactaacagaaagaagaacttcgatttctcttctccacattaattttttctcactagggattggctctagcctccattgttgtcccaatattgcagctttcatcacattgaaatcaaaagttagactcataagtaaagtaagatatcaaagaaacatcaaactaaagtatggaacttcgaaataaaactaccatagagattggtaatggcattagaaatagccaaagcaggacaaactccttcaccagaaccagacatgtcttcaccaagcaacaacttcgccattctctctttcaacaactcaatctctacaaaaacaaa

SEQ ID NO: 27902 - DNA, 1291 bp, Arabidopsis thaliana landsberg
agtagaccatcttaaagagtctttaagaaattagatacttggtcaccgtccgattagaaattttcttttaccactaatggtgtttatatggatccctttaatagttgggttgataatggaattttgattagaatgttgatatagtgcttataatgggtcttatcggatcttataggcgaaaaagctagcttagtggaaactcgaaaatcttcttttgttagtagtttttaatatattatttctgtttttttctttgaagggactagtgggattgacatggacggcatttgctgggtcacgttcagctactaagactatctcttcttactttctctactcttcactatgtcttgtctcaatcggtttaggcgtcttaaacccttctcttcaagcctttggtgcagaccaactcgaccacgacctcgataagaatttcgatctttcctcgggtgatcaaaaggacgcaaaagctacccgaaagactcagtttttccaatggtggtactttggcgtctgcaccggcagccttatgggtgtcacagtcatggcttatattcaagacacttttggttgggttctcggtttcgccattcctggtatcgtgatattcctgtcgattttggtgttcatgtcgggttgtggaatatatgtttatgctccgggcgcccgtctgaagaagaaaacaactactacaccttttgagaagattcttaaattcattaaagggagagtagtgaagcagagaagcatatatacacttgcagatgagaaagatttggatgctatggagcttgagtaagttcggaaaaaccacgatatctcatgaaactaattagtcttttaagttttttagcgactaatgattacctgtttatgtaggctagaggagaggcctctctgtaaatgtgagaccgaagacattgagactccttcaacaacctccaaaggattggaagatgacgagagctcgaaaacggttttctctggaattgataatgttaagttagtgattcgccttttccccatatggatgatgcttctcatgttcgcggttatcttccagctaccagcaacctttttcaccaaacaaggtgtgactatgaagagaaacattgggtccaacttcaaaatcccacctgcaaccctgcaaagcacgatcacattatcaatcatcctgcttatgccattatatgataagattttgatacctattaccaagagaatcaagaaaaacggtacaggtatctctgtgatggagagaatgggagtcggaatgtttctatccatcatt

SEQ ID NO: 27903 - DNA, 1166 bp, Arabidopsis thaliana landsberg
  unsure (1)..(1166): unsure at all n locations
tacatagtatcttagactcgccgttcttccctgtaaacttgattgatccttttcctctaatgtcaatacgtgaatcatcaccaaacttcacttttcctgtaactaactcatcaactttgcagaaccactcgcgatttcctgtcatatgattactggcaccattgtctaaataccaagacttgtcnnnnnnnnnnnnnnnnnnnnnnnnnttcatctttctttcattgagatagacaacttcatgtaccatcagtgactccacttcatcattatcatcttctttctcttgttgtttttcttggagtttgattagcttaagtaatctatctggacagttagaggcgtaatgacctagtctatcacatcgataacatgtcactttagaatggtctctctgcttgtaatcacttcgtcctctgcctctaccacgaccacgagtctgtcctcgtcctctaccactatcgtgagaaacatactgagattgcgagtctgcatacatcaattttccttggtcttctactgaatcatcatcatcccatactctatcctcatacgtctttatccttcccactatgtcttcgaatgttgtgttcttgaggtctagaacttgctcaagtgctgcaacaatatgaatatacttcttccttggtagacttttcaaaaacttcttaacaacctttgtttcttcgatatcttctcccaaggatgctgatttggttgaaatttctgaaagtcttccagcaaattcatcaatagtttcattatccttcatcttgagtctgtcaaactctgccataagagtttgcagttttgcttctttaactcgttctgctccaagattcctagattgaatcttatcccagacttcttttgaagtctttagtttcccaacttgaagagtaagcgactccggaatagattggaagagaagggctcgtgcgaaatcgtttttctcttcgtcctctgattcacggtcgattgttccccaaacattatgcactcgaagtgcaacttccatcctcatacaccatactgtatagtttgtgttgttcaacatcggacattgaatagatgatgttcctcctccatctttaggtttgttgttcatcgtaacaatctcactcatgtttcaatctttctctgtgatcgaaaacctggagtgctct

SEQ ID NO: 27904 - DNA, 1929 bp, Arabidopsis thaliana landsberg
gccactcaaagcttgttatcaatctatatagttcgatagatctctgtgtttatttttttccttgtgatttgtttttatggtttatttcttttggtggtttttttgatgggaatcgggactggagtttgactctttagcaaaaataacgatgccatagagatgaatgcagcgccctaaataaaaaagaccacaatcggagatctatctcagttctgtccgaaatcgattccctcgatattggacgctgagatagttctcacatgttttaatctctgcttgtttttatttgattttatgaatgattatgatatgattcgtaatgggagcggtgattcaggcaacctacttgttaataaaacaatgacatgagaggtgtttaactgctcctagatcaaattatgcttctgctcttcagacttgctgagattttatcgtctttgaagctggtctagtagtcttaagcacattctttcaatctatatggctattccactttatccgtcccaattctgatgtgtttacagaaaccagatcttgtctgattgtgtttcgtccggtttattcttggttgaagcatttgttcctttactttcatttcggattcctaaagaagaagggtttcgattgcacctaggcccatttctaccgtctatagttattgtcattggtctactcgacatgaaaaattatattagtggatgacatgtctattttactaattagaggaaaatatctatgtatctgcacaatcctacataacataccaggcgattgtgttatgaaaataggatctttcaaaagggacaaatttctgtaagaacgtcgtgttatgttataaaaaaagaaattttattgtcccttgattcctataaaaaaagaaattacataagggttgattacacattggcccatttcaagcctttctagtgatgggtcactcgacatgaaaaaagattaatggactttataggtctaaccgcagtagttgtaattcttgaacataataagataatcagaggatttattttgatgcaaaatttgtttttatacgtaacttatcatatattctatatgtttaatggtttataaaacatagtttgatagtttgatatggttatgcgtaaattttgaataaagttttattgtccccatcgaagcttaaaataatacaaaactcataaaatagataaaggtaaagactgtagactaaaaagaaaataagataaagtttttttttataaagacaccgccactgaaaaccttaattcatttggtagaaaaaaaacaagttttaaaattttgtccacttatcaaaagaaattttattattttaagtttaaaacataactttataacaaagacacaatttgtttttatttttgtaactagttattctgatttaaaaatattataaacgagaaaccagatcaaaatagcagataaaacaggactctttcattcgtcttcatttttaacacacacaaatcttaaatcacttctttacgccgacaaaataaaaataatcacatcttacatatacaaatgtaaaatagaatttttaatagtaatctgtaagcaagcaggtgaataatcatatagaaacaaatcaatcttaagacaaaaatgtaattatttttctattaaaatgaacggtgaacccaaaaagtatgcacaattaactaaaaaggaaaaatatgggtaggttagagcactagaggtttgtgcgagtaggttaggtttcgaagtttatacactaaaatatatggtcgaatgtggacctcacaatttctatttgctgacgagagcttccttatttgttattatactcataagataagatgagctgtttaataagtttataaatcataattaaagcaatcgtgtcaaagattaagacatgtgagtgcttcatttctttgccgtagtgtt

SEQ ID NO: 27905 - DNA, 1275 bp, Arabidopsis thaliana landsberg
  unsure (1)..(1275): unsure at all n locations
accataccttggaattggattatactcgtgtcatggtttgttaattctatgctttgtttcttactttcctttttttggccttggaatatactaatgtcaaaattttgaaacattactatttatgagacgacaacaaaaaaaattccacaaaatcatgttacttctattaatctgttacaaaatatatatacaaacgtaaatttatatagtttctactctaaaactacaaaatttgatagaaaaactcaagattaacttattccagctgggataaccagcagccatttccttgtcgctcattattacaaccaaccatcaccatagcgacttgaagctgatgaacagggacgtgtgcgatctggtccataagatgctccaactttaaaacgctgtcgtttttgcatttcgacaacaaccgttgagcttcatgctttgtcatcttgatcttaaccctcacgacctcttccttcccttcaaccattttcaaactctctttttcttccagaggattctcctttggtttgagttcgtgatcatcatcaaaactcaccgtcttctttggctcgaagatcttattattctctaactgaaacctgacaaccttacgtggcttagccagaggctttttattctgttcatcttcttcctcttcgccttcttcaaacctcagcgatttgtcaatcctcttggctctctgcaagcaccgagactttttggtcgattctactgaaacctcctttgannnnnnnnnnnnnnnnnnnnnnnntaagtcgtctctgtagataggttttgcttctagaacgttgtcgtacctttcttgaagcctgttgaagcatttagctagagaatccatcattttctttttttttcttcttcttcaacaaatagggagagaaaggttttgtgttatcttgaaagtttttctctatataataaattttcgtggggcagagaattatataggcgaccaactttaccattattcggacacgtagtgaagtgtgctttggggtaagaagatgacgtcactttgccgtgggatactagaatagtagaatttaattattcaagtttgctttgctttactatgcaaaaagtgtaagaaccatctattacgttaatatcttataagcataatcaaataatacaaaacaattgacaagtccattaatttacagtcgatgttgatttacgggaaggttatattgaattgaagataactggttaaattgtaagagatctgaaggtaaaaattagagataatcagtttttacc

SEQ ID NO: 27906 - DNA, 1669 bp, Arabidopsis thaliana landsberg
  unsure (1)..(1669): unsure at all n locations
cgatgactgggatattgattttgcctactcttcactacttttctctgccttgtctttctcctattgcattaccaaagagaaagcagagtgaaactaatctttccaaccttctttactgagtcttctcggagcaagccctctagaggataggctcggtgtgagtggtaacaccggagtattcggctgttcttcgtctccaccaccattttcatcatcccaatcatctccccaattattgttccatccatcatcaccactttcttggtcagattttgtcaccaatgcggggttagagactggcaattccatatctagcctctggtatttgttgtttccccgtgacttgttcttgtaaacatgaatgatcaccgggatgatgacaagggagagtacgaggaaggagatcatgatgatgacgatgagtgttcgcgaactgatattgagaatagaaggacgagaaacagaaactgtatcatcgctttctgtttcatgtgctgctgctgccaaatcctttaattcaagcctgcaacgtcctttactggaagctagtacgattgcgctatcgttggaccctcccttcttaatagaaactttcaccttcaaaaaaatttaagcttttagatagaaagtagcagcatctcaatcttaaactaataggtctatcatccatcgttgcaagactagcaaaatcattctataaaaatgaagtcttaacttgtgatataatctccacataaaagctatgccactattgactaggttttctgttgcaatatagcattataaacccagtagagcgttctactcatcaaattcaccaacattataaaagacgagttaacgaagattgaacactatctgatgatcaactttcaggctttagatatatataagaatgacctagactcttcttcagaattaaagtcattgaatgcatcatacagtgtaatccaacaaaagagaatgaaatagatagagctatctaacatataggtatnnnnnnnnnnnnnnnnnnnnnnnnnnnnnnnnnnntatctttctctaaccgaacaaaaaccggagcagttatcgtaacaatcaaagcccttttgcctttgttctgaatcaaaagtgagagatgaggagcatctacacaagaacaatgaagtaaacagagctcaaaaccaataaccaaaagaatctctgttttagacacactacatagagagattcaacacagagactcaccgttaccaggaactctcagacaagcggaaaactcatgttcatcatctatacacatattagatggatcacattcctcaccatgaaacccttgtttcttccttgaagaattcttgctcacagcctcctcctcttccttatcactctcatcactagctatcttcccttggtcactcttactactatcactaccaatcatcttagatccatcacccaactgtgtatcatcatcattagtcgagtttttggaatgatctatagtaataatactcttagaagaagaagaatcagtgacattttcagagccaccaccaaatcttgtatctgtcaaattcgaattcgagacaacaacttgtgcctctccatcaacctaatttcaacaataaatagtgatgtaaaacctcagagaattcccccaaatcaaatacagaagtttttttttagg

SEQ ID NO: 27907 - DNA, 1112 bp, Arabidopsis thaliana landsberg
ttaccagcaggtaacaatattaaaaaatgaataatctcaaataaattcagtagttatcatttgaagtcattcagtcacctttaaaataaattcagccatcatcaggttaaggggttgattggttctccttctactacctgcaaacgcatcatttacatgtggtaacaattgttagcgattgacaataatcatataaatcgcgggatactgctcggatcgctcgatatcaatacatttcaaaaacttcttcccgcaaacgtttgtaattgtggatggtagcggttgaattaaaatattaaaataataataaataatcaacatatttgtaattaagataaatatatataattctgtatatatcttttcatatttgtatctaatcctatatgttatatttattttggatcttttttatttatttaattattattgcatctagtcataagatttctgcaaatgcatctattttgaaacgttaaattagtcgtttaaaacgcttgaaaccacaatagctcgcttccgcaaatttccgcaaccgcaagcgaaaccacagccccatccgctacagttaaaccagtcatgtctttagtcatatgcagttaaattcttcggttaccataaatagatcctatatcaaattcggtcttttgggtttaaaactaagacctaatgtctaaaaactaccgtcattcaaggtcttagactaaaatctaaattagtatcggaacttactaaatatatataatttatatttattatttaaaatattcaaattttgatgattctctctcatgtgcggtggtgtgtacaaacaatcaagcaaacgccatgggccaaggccaatgtgttcgtaccaagcgaccatcgccgagaaaaacgaagtcggtggccaaagtttcttctgggcgatcacatcaagagcatcacaacttgctccttctttcgaacaagcaaaatacggctaaaaccaaaaaaaataaagaaaaacatttcagaacaaagccaatgatgactaaaccatagtgatgagaataatcactatacaaatgaattggcaaataagaaggtcgtattgtacgcatgtttttggattctgaaatcacaaattattt

SEQ ID NO: 27908 - DNA, 1354 bp, Arabidopsis thaliana landsberg
ccagaatcataaacaacataaataaactgaagccgagaaacaagagaagactctataatatttgtgttgtcgcttaaataattcagatattatttgtaatttcctaatcctattgcgagtcgaaaactgttggaagatcaaatagaaatattaaggaaatttcgtagagttttgaaatagcgagagaggtgtgtgcaagagtggtgaaaaataatcaacaaaatttgtaaataatcaaacagaaaacgtcaataacacatatttattgaacttttcgagggaagttcctaggtcaataattctccgtaagtgccttctacgacaaggttttgacttttgatgaaatagtcttctagttaaaaagacaacaacgacctgaatctgatatgtggagtataaaagcccatgggcttgaaaacgactcaataagttggttgaccaattaaaatattccagtggtgaccaattgtacactcatgcttcgagcaaaaacgttgccgaatcacttgataagtaaattatttggactaaacaaaattaagcaccaaaaagcaaatacgcccaacaaacaaatcacagaaaacatgaagccaacattaacattagtagcagagagaaacaatggtcacgtacgtgtaaagtaaaagacaacacacgacaaaggatcgtttacaaaatctcatgagaaccaaacacaattcgttgctggcttttttacctttttttagctagacatcatcacattgtcaatagattgtagagcttggtttgcgaaaaacctgacatcaacatctggatcctcgcttagctccacaagcccaggacgaatcgtcttctccacaaccttttttcaccacaaaaccaaaatcaaacagagctgttttcataacaaactaacaaactaaatggagtttgcgatgcacttaccgattgatcaactattggaatgagggattgaagtactttagcgacgttgaatttgatgtttggaactctgtagtagtgaaagagttgtttatttacttaatatgtttgaagtaaaatgatttgagtattaactattttacagtgagaacttgcctgtctttagatgcagtcattactacaggtaagagcttagagcatgtaatctctgagcccattacaggtgcaagaagagacaccgcacgcaaaatggtcattcggtagagatagtgagggttgttaaccatctcaagaacctgcggattaatgaatagcgactaattaacactaaccccatagacacccacttttctaaagttgtaaaaattatagacaaacatgaggaactatatgttgcattgcccattcaggacggaattcctcagcaacc

SEQ ID NO: 27909 - DNA, 823 bp, Arabidopsis thaliana landsberg
gtcatgtaggagttacatagagttgaggccttgtaagctaataccatttcggaaaagttctttccgtttacacgctctggctgatctttctgagtagatttgatgatattcaaccgagtcttagataaggtcccctggtttgtgtttgtgtcttgagagtttgtgacatttgtaattcattatcgttgttacatagtataaaccatatgttatgagccacacgcgtttctctgtcggttataaaaattatttacaacgtgcgaatttgaaattctgtgcactattgatagagaaaccacttggaaattgttacattcaaccatcttggactcgacggcttgaatgactaatgagaccactaatccttgtccacatcttctctcattctcaaaagaaggtattaaataagttaatactcaacaatcaacaacttaaatcaggtgacaaaaaaagaaattacttcaatcatagttgacttcaataatcatccttctttctttgttaaatctcatatgtcaaatagatgtattaacttgaaacactgttcaaagattggctcaaaaggttttgcaaacgaaagtataaactataggagttttaatattctattttccagaattttataataaaaaaagggactattcttaacttattagttactactgagtctaattttttattactttcatcaaaaatattaaaatcaattatagttgttttaaccacgtacaataatattaagtttctctaactaataatttttaatcctttttttttaaattctccttttattcttttataaaaatttcggtttcccaaaaag

SEQ ID NO: 27910 - DNA, 1976 bp, Arabidopsis thaliana landsberg
ctctagtcctgtcttttatatgtgtgcgtgcgactttttcgcaaagtgaatctctgtttctgctcttattttttttgttgggatatttaatttccattttccaataattgttgtagaacatacagtaggtcactaaatggccggtcttgtcatgaaagcaaaatgatgtggaccaatattaattgtcacatttacgtgacaaatttaatttggctacataaatgaatattgtaaaacggttatgaaatttttagagatttatggtcttaatggggttttactgttattgtcgaaaatcgaaatagcaaaccatatttgaaatatcttcaaaaggatcagaaaacttggtacgcgtcaagttgaccattaccataatcgaaaagcaggtgggaaaaccaaagaacctctagacacgaaagagagtttggtgttgagaaattcagacaagcgtcaatttacagatgccttcatggttaagttttaagttttactcaaggagctacagatgagaaagagtgcattacgtaaaacaaaatgcaaatattggaatatggatcgggcgatcgttacgaagatgaatctacatcagtaatcagtaacgagttagtattaaattactatttcacacaatttgatgaccagctaagacagaagatatttgatacgtatcaaataaaattagtagaaatcaaattgtcctaatcgttatattggcaataagcgttatagtaccacgtgagtaaacaaaaatattagatacgtaccaaacaaatgcggcaggaacagtgtaatatatctctttttcactatgaggaatttggttttgtccacttgatagtattttccacaagtgactcttttctttagtctcattttccagaagtgattcttgacctaccaaactaagttttttatttacacggtcgtagttgatttctcgtgaattaattaaaaggagacttggacggtgaacttacaacgactactcccacgcataacatgttctatcaatcatttatgtaagcccgccgaaacaatcattaagcatatgttatacttgtttaatttataaactaaaaatcatttaagttaaaactaaaactaatttcggaattggcttcaactaagatttaggcctcaaatgacaaggttttgttgagtttttggtatagacaatcgtaccgtataatatagtttaaagtaataaattctctatgaccgtatcaataaaatttagaaatccaaatttgacaaatgatatctcatatgcatatgcatggaagtattgtaacatttaacattcagaaagtcagacttgaaatttataaatctacatcacaatcgattcttttatctactcttccaaattacataagccgcactaatagaactttttttttttttttttgtctttttcctattttcctagaaagattatgaaatattcaaaaattattgtttgacacaattttgggggtcaatatatctttctcaggttagtaggacaacgagacaccaatgatcaattctgtagagatccaagaatcttgggaacagcacctgaaggcttgggattaaacagctttttcagctcatcatacctcccaacatcaaaatcctcagattgcatcagtttcctttgtttagcctcaaacctgctttggtaaaaaccttgaaaggaaggctctctcgatgtcttgaggaaaaatgtgtaacccgccatgaaatataccgatgagacatagaaacagatcggttccataacatcccatgtcaggtcccaaaacgttagcctcataaaccctgcggtttggatgatcaagtaacccaaaccagcccaaagctctcttctcaccaaagaatgtgctttttggtcaatgaccgtctttatagcttcaagctcatttagctcctttcttcttgggtcattcgggttatggatttgtgataaaggaagaagcccctctatggatttg

SEQ ID NO: 27911 - DNA, 1476 bp, Arabidopsis thaliana landsberg
agaacgcagtcaaggttagaccggctaaacgaggtgtgaaacccaaagaagacgatggagatggggaagaagatgaacaagaaactgagaaagaagatgagagtgctaaatcgaagaaaggacagaaacccagaggtggtcgtggtaagaagcctgcatcgaagacaaaaacagaagagagcgacgatgatggagatgatagcgaggctgaagaagaagttgtgaaacccaaaggccgtggtacaaagcctgcaataaagaggaagtctgaagagaaagctactagccaagctggtaagaagccaaaaggaagaaaaagttgagaacctatgtttccaagatgatagtttttgtgggcagctaacagttatcccattttttttgtaagaaagtatgttggaaatgtgggatgcctacaaggctatgtgatattctactattattagttattttggctgttccaaggctttgtgattacctctgtccttttttgttgtatttggaagtcagaaaaatgctcggagggcagcaactactttcttttgcctgtatacaaagttcaaaattcagagagtcttagtagaatcaaagcagaccagaacagtatgtgtattctcataccagtcttcttgaggcaaatgcccagcaccttcgatgagtcgaagcttaacattttgggggttctgtttctcaaattcctctgctatagactgaggcagatatttatcagctattccccaagccagaagcgtaggtttatcccagctgtgaaggatcaaaacctcagcaaagtaaaagacctatctgtagccgtgtgaatttgtaaaaagttgaaatgcacttacctgcctgatgaaaacccatttgcaatttgactcaatgtgtctccaaagttgatcttcttcgcagtctcgagcaaggctaattcatcagaatctcaggatgagaagtctcttagataatagattaaaccatcataagaatcaagagtaaggtgtgtatcatgctccattcattgaatttggtttagagacgtaccaaagccaggccctccgcttgacaaatatggtagacgatacacatcagctttctcattcttcaggacgtagctatcaaaacagatatagagtaagacaattgtcagtagaagcctctatcaacatcaccaaacacatgcattttgaggctgagctaggagaatagccagtatataatgtctcatctctataatgaagatgatggttaatttgatacatacgggctacctccttcaatgaaccgctcggccaagatagcattttggcaggtgaattcaccaaacaggggaatcctgcatcagaaaaaaaatgaggaaagccaagagatacaaatagattggtgctttcacagagtattgcaagcatttagagtggtcaaaatggcaaaagagttgaacctcagctgcttaaataatccgggaactggggatgaaacggt

SEQ ID NO: 27912 - DNA, 1713 bp, Arabidopsis thaliana landsberg
aaaaaattgattggtttaggtaaatttttctataataattttatatgttacttgtgattgtctttcataatctatcttaaattttctttatgaccaatcacaaagctgaaactgaaattattttagataacataacttgtcaaaaacagtttagttcacaagtgatcatcttatattggaaaccatctaatcctttaaagatttgcattatctgtaacaatcacaatggttaagaacaaacgataaagtagagattgtatatatcgccatgcccccaaattcatatatgcaaatgcaataaagagtcctaataagaacaatacaagatgccacaaagcatccaatcaacactgcaaagttttgaatctaacaatgtgcttattgcaaattgcttatagatttcaccgcaagctaaacccaagatacagtgatactcaggcttaaacaaaaggtctataaagaggacagcaaacgaagaatcagtatctttatttttgcgaaaagagagaaaatgtgaaaacccaagttaaagctctcactttttcaagagcacggcactgcactgcgccatgatctttgatgctcttgtgatcgagtttgtcatgtaaaagttctcaaccacggtttggaacggtgttgtgctcattgtctccttgcactcaggcttcaatgaaggcccaaaagcagctggctctcgctcatctgtgtggactagatttggtgcaacgctctttattcttgatctaacaccttcgattgagttgtatggaagcttcacacccgagacctcggataaggctcttcaatcttccagtcatctcttgcatcaccaactgttggaacagctggaacagtctgttgggtaaatccttcagtattttcataggttccttctttctcagtgaaggccgatgcagggagaattacgtttgcacggtaaaccgctttgtctccatggtgtccttggtaaaccacaaaggcgtctttaggaatcttgtcaacatttacatcgtctgctcccatcaagtagacgaattttgcagactcgagggctttggcggactgttgaatgagaccaagatcaagagcagccgcttgggcagcatactgaaggagaaagttgagaccgttccagtctggtcggacgacattgttggcttgtgcaatggactccacagaagagaggatagcatttttatcagttctgttgaagagcccagcaccaacaatgattgcagggtttttggcgttcttgagagccgtacagaatggatgccgtccctcagcaatttccttgagagtatcaggcccagtcccgaggtgtttgcagtcgtagttgaactctgcaggtggaccaacatatccaaccttggcatttgatgcacggactgtcttgcagatcctagcattcaccattgcagcttccaccctaggctggtaaaaatagacaaaaactggtgaatgtactgctaaaaaaccttcacaactttgatatctggaagagcaagttttgcttgatctagattggtctggatcaggaatattcaatacaagcgaaatgttaacatctgatctgttttttagaaaccttaattttgcttgtttctcctttctatttgcctctgtattccaaattatgcacagaaccttaagccccaccacttaattcaaatatcaaactacaccaattggggttttcttatgtcattggtc

SEQ ID NO: 27913 - DNA, 987 bp, Arabidopsis thaliana landsberg
ttaggtattcaacttgtatagttagaaccagaatcatgtttcacgtcactaaaactttcatgatgttactgttaccagtcgcagaatgttttaggccggtttagttcacctttctttttcctaacaatgttttacaatttagggatcaaccctaacctatataagattagtcactgatcatatataaaacatacacaaaacagagacataaaagtccgaggaaggaattaaatgtataggaaaataatgttatgataaaaaatattctgaattaggggtgtcaaaatagttaacataactcaaaataatttggtttaacatttggtgggcgagtaacgccagttgaactcacccatttattttatggcttgagatttatatagccaaacccaaaatcgtaaaactggcttaatgggttagccatatataaattttttttttttttttaactaaaacatagcatataattataaaaccaacaatagtattcaagttataaagaaaataaaaaatcacttttagttaaagaacagttaaatcttatttagatgcatccgattgttccttctacttcttactgggcttgtgaaattgtcttcattggcatattgatccatagtccacaccttaaggttcttgaaccgaatcttcgacataacaaaaattgttcaatcaatgttttgaatagaaactcttacacaaacaacatattttattactaaaaacagtctcgtctccgaggtaatacaacgactctaatacaacagcaaaccaacaaagaaacccaaaccacacataaaagtgtattattacacagacacaatttgacaatgacgagacaagttcgcatcaggtttatatagaccgatgccatgcgtggacttatagtcacatcgccttttattcttcacacaagcttcaaagctttttcatatcattacataatcatacagtaaaattatacaaagcaaaagacttgtaaacaag

SEQ ID NO: 27914 - DNA, 1850 bp, Arabidopsis thaliana landsberg
agtctagtgagtttttcttcgtgatgtgtggtatttaatttactcgtgttgaaagtcgcatgtttaggtaaagacacgtggacgaacacagtagactttgtagtcttgtcttgatgtcttctacattgaaagtctctgactttctctgatacattttacaaggaaactattagtagttctttagaatggtccatgagaatcaaatatcacatttactgtcattactttagtcgatgtgtttctcactaaagccaaagattcgaagctcacattaattaattgattaaaaaccctaattcaactatttttttttgtagttaagtatgaacaaaaacatgaataattttatggtttttgttacataggttctcatcaggatgttcaccaaactgttgttgcggatactgacatcagattatatgccatagccatgaagattggatgcacgttcatgtgagatcaaacctatcaaaggtttccaagctaaagaacaagtcaaaggccacactgtgagtagtgtgatatgttcgatttgagagacatatatatgcatatggttattgataaattaatgttgtggtgatataggtgaatgttgtgaaaggactaaagctttatgaagagttacttaaagaagatgagatatctaaattgttagactttgtggcagaactacgagaagctggcataaacgggaagcttgcaggtgactgactttgtcttacgccaaacacattataggctttaagagttttccggtgcttatacaagatgaatgcaggtgagagctttatactgttcaacaaacagattaaagggaacaagagagagctgattcaacttggtgtccccatctttggtcatgtcaaggcggatgaaaactctaacgacaccaacaactctggtaaggaatcgcttgatccgcaagtttcagtctaaatggtttgatccatgtggatggctttgaccgattagagtttttgttggtttgtagttaacatcgagccaattccaccacttcttgagagtgtcattgatcactttgtcacatggagactcatcccagaatacaagagacctaacggctgtgtcatcaacttctttgaagaggtatatacatctccatggatcaccattcctttatgtttccgcttttctttaaccttcgagattgccactctttttcagggtgaatactcacagcctttcctcaaaccacctcacttagaacaaccaatctccactcttgtcctctctgaatcaacaatggcctatggacgcattctctcaagtgacaacgaaggcaacttcagaggacctttgacactctctctcaaacaagggtaaaaataatatcaaaaacctctttctttaactccaagaaaaaggtcggtttcgcttcattaacattgtttgacctgatctttatagatctttgttggtgatgagagggaacagtgcagacatggcaagacatgtaatgtgtccatcacaaaacaaaagagtaagcatcacattctttcgtattcgacctgacacatatcataaccattcacaacccaacagtcctcgcaacgacggtgtcatgacaatgtggcaaccctaccaaatgacaccaactccattcctcaatggttatgatcattcaattgacatgatgccaaaacttggagtcctacgtcctccaatggtcatgatggcaccaccaccggttcaaccaatgatattaccaagtcccaatgtgatgggaaccggtggtggtactggtgttttcttaccatgggcctctgttaatagctcaagaaaacatgtgaagcatttgcctccacgcgcgcagaagaagcgattac

SEQ ID NO: 27915 - DNA, 1925 bp, Arabidopsis thaliana landsberg
gaacattcacaattatatatataacaagctgcaagtctctttttagttgctgcttcagcaggagatgagagtttgggagggacaacaacggaatcaccaatttcaattgtttttccaattccatcgccgaatccgtctttccaaaccatgttctgcccaaagtatatctgcatcatatttaaatctaccattcaaaaccctcgtattcatttgttatgacgataaaccggaccacagtctttctttacctttccgtgtggtttactctttggctgtaaaactttgtctgacctgaaagtcctcaaagtctcaattggctcttgacctccaataccagtttcttgactaatcgtaggtacctgatcatggacggattaaaaatacttatccttaaaagaacaaaaccaaaaatgaagaagattcttcatggagttttgaactatgacaaggttttgatataccttgcagcgagacgataatttcacaccgtgaaaggtgaaaccgtttataaggatctctgtccataagtcttcagcaaatggttcacatccatcaacaaagatgctgtaacatttcccagtgagagttatcaagtgttgttacaaagcaataaaaacagtgaaggctttctgaagcatacttgggtctaaatcggttgatcggtacaggctccttgagaagcttattcagggaatcaagcgaaccctggaaatagcacgagactgtttaaagcagaaccgaaagaaagaaatcgaatttgatcctctgacctgtgatataagcaagaatggatacatatccgagaacatcgcaatgtgacctggagcataatttggatccacaggcctagtctcataggctgcaatataacatgtgacttgtgatgaaatatgcaccgccaaaatctttcaaaggagtcaagcttaactgattaagacaggaaaaagtttatgagacctgaattaaaacgaacaagtcgacaaggcttcccaacaaagtttgtaaaccactgagatgcttcttctccttcatctagtgcggagccagaccactcccaaactgagacaccgtctgctattttgtcgggtttagctagggagaccttaagggcatccataccaggagctctaaccactgcaaacacagccaaaagatgagaaaaagaccaacttcattaaaacaaaaagccagctgaataagaagacataaaacaatctgacccatgttagagctcttctcaggctcccagtcctctccaaacgcatgcttaggcatttctacttcaatcaaagaaagctttggttccactctctgagtcaatcctcttcctttagaattcacaatcaaccagtttcgatcccatcgaaatcctaagcaaccaaaccccaaaaaaaaacttagcttttctaattttcccccaacaaatcacaccaaaataatcacatcagctctcacaatgacaacttcattaaactgttttggattacttcacacttaatcattcacattccaagtcttatacacttttagagaatcattgaggacagcacaaaaatcaatctttccacttaataactttcagagactcagagtcacactaaagacaacttagacccaccaacaagagcacaacaaggagtctcactgaatgatgatgaacccttaaacaacggctaatcgaaaatatcgtaagaatacttaaacccagatgaagaaacagctctaatatgaaacccaagaaggaaaaatcgaattcgaaaccaaaaaatgagaaatttttctcgaaactagtttttgttgataccggtgggagtgagagctgcctgagacagagaaattcctcgacatgatttgatcggataaacgaacaaagacgatactcttgcagcgacttcacttgccggcgacggtgacaacaacggcga

SEQ ID NO: 27916 - DNA, 1976 bp, Arabidopsis thaliana landsberg
  unsure (1)..(1976): unsure at all n locations
atggtgttaattttttaaaaaaaaatctcaagatttattttctaataaattaggatagataactcattgaaatgatttaatttatctcgataacctcctctcattttctctttgcgatagaaatttgtgaaaattagttttgaaaattgcctaaataaacgagtttcaaaaaaagatggtcacaacctaaaacacgtttggttatgcttacaatgatgtttgtatacaatatgctttgtaagaaacatcagtttttaaatttttataaaacttcataaaatttctttaaaacacttaaaaaatatatttgaaaatatctttcgaaaatttcatgttttccgtcaatacaataagtcattattgtaatattatctcatattggaattgaagataattcaatatttgtcaattggtttttgggttagaaactcttaattatccggcaaagattttcttcgtctatggacaatcattttttttgttaaatcaggaatattttgtataaaaaaaatatatgaaagtgctagttcttgaaaagcaatatattttgttcattacctcattgccgcatttatataaaatccaaatcgtgcgtatgtgtactataatgataagaagatcacgatgcttataatatcttttgcatgatattaatcaatattaaacagaaaaggaaaagctactatcatttagaagagggtccattttggtcgtgtgataagtcattaggttttggcgtaactcataaaaatacgatttgcttttaacgaaaaaagattgcttcacgcttgccgtcttttgttcgtcgataaaaaagattttattatatatatgatgccatttacagccgaataatcctccattttggtcttcacgttctttaacttttaggtcgatgcttttttcgttatcttattatatgtgtttgtgtataatgttcaattgtttaattagtttacttttgatatgcatatgattttcatctgaatctgtctttctcactcatgagtcatcatgacatttcatccatgggacgatcgtagtactattaggtgtttggtttactgtaaaagcatatttagttaaagatttctgatagattattttgnnnnnnnnnnnnnnnnnnnnnnnnnnnnnaaacgctttaagttaagtaggcatacatataatcaacatagacatgttgaattttgaaaatttcaagtttacacagtttgattaaatatgtaaaccgtaaactgcatcgattcatagatatcaatattttacaatgctttacctaaaaaaaaaaacaacaacgaagtaacatggtttcgacgaccaaataactgaataagtcatacgggataacgatcaatttaaaacacaagtaattatgggacgaaatcttatatatgtatgcaattgaccatgtatctagatcgaccacatctaaattgtacgttccattctactgttttgtccgttaagaagacacacgaaattatacatatttgtttgtttaaaacatacaagtcacaatcggcatataaaacacgatgtatcgtaaaacagaatcatgtgtacgtacatgcaagaccatctaaatcaacgtcgtcatacgtaccgcgttgctatagcctatatgtatagtaaaaattcaaaataataatcaaaagtaaaaggtgaataataatgatacaatctgaaacgtaaaatcaccaaatttagaatatttagttaacgtacgataacgtatcaataaaactgtaactaattttgtagtattatgacaaacgtaaattcgcaaatttattacaaaaaagaaaaacagcttcgttgcaaccaaattattgataagtaataaacatctcgaagaaattgaaaaacacanaataactagtgatgttgtgggtcgggtcctcctgggcttaaccgctctggagatttcccatggctacccgcagcttgatcatcctctacagtcngactcgtag

SEQ ID NO: 27917 - DNA, 5026 bp, Arabidopsis thaliana landsberg
  unsure (1)..(5026): unsure at all n locations
cgtaccaccaaattaaattgtatatcacgcacatacataacatttttcctcgttgaaatgtgaagtctaacatgtgtatgtatataaatttgtccgtgtagacttttggacatcaaaagaatagataaactttcagtactaactggaaaaaattttgtaaagttgcttggaacacctggaaactgtccaagggtctttcaatactttcgtattgggataggatgatcagaaataactcgttgtttaatttggtacgaaaacaattgttctagaatgaaaagtaagtttatgtgattaactgagtatcaaactaagtggttcactaaggttctatttacatttccaaagatagtatatgtgattgtccaaaaattgtcaagggacactgataagcgtccaaaagatccaaaataagagtaaaaaaaaagagcttataagatgatatatttcatagtgagaacgataaagcgtagttgtatttgttaaaatatccagtgtgaagtgttacattataaatgatgaatgtctatcaagttttccatacatttttttcataagatcaagagaaaataaagagaattatatcttctttgtttttaaagaaaaacacaattaagagataaataattaaatcatgtacattatagcatgtgtaggtcacgtgttatgaaaatgggctgaagaaagtgtagaagtgaggcccaagacgaagggaccacaaagggtgtattaaaccaactcaactgtacatggcggtggtcggtccacgttccaaattaaagtggccatgtggttttatcgtcttctatcaacgaccaagatacggctctccaaataagagaaaaacaaatacaaaactacgttataaactagggattgatcagtctgatggttcctaatttaattgactaactgactttagtgcaaaaaaaacttaatataacttaggctcttaatgatcatgtacatggcgggacagatttgtatgcatagcagataatataatatcaaaaatcatgaaattttggatgcaattccatctcttttacacccatttctctactagagcgttagaaagtctaacattagaagttggactttagttactcaatgccaattagaatctaaactaaattaagcaattttgtctactcatcaaacaaaaatatttctctgtaacgaaaaaaagatagtgggctaatattatgggccatgagactgccttaaaagcccatcctttcactactaatatacattagaaaccctataaattaatactcgataaattaataaacacgataaattaataaattttgccagtcgaagtcgggcaaatgtaaaaattaacgaaaatcgataagataataagataataattttcttgaaacccctatgtaaaaatatggtcccaataatatcataaattaataatcataaatcttaagcatacattctaagactaattttatatgaaacttttattcaagctacaattgcaactctttttagaatagagttggtatgatctcttttgtactcacataattttttgcgtatttgatccgtcatatttggttttataacattttttctatgaaaaaccattgctaagatttttgtaaagaaaaattgatttaacctccacgttaacgtcgtagatatagagacactatatcttgcagaaaataaatttaaaaagtcaaaaataaaattaaagatctaacataattgaatatacaaataacaaaatatgaaaaaaatactaaatcgaaaaaatatttttaaaataatttagtattgtgttttacgttaatattctataaattaatatttattaatttattctattaattaatatttattaatttataaaataaattaatatcattataaattaataaaaatttatggtccaatcattattaatttatacagtttctcctgtatatatcttttaatcgtttttagtacacactgcaccgttttatcggcgtctttgatttctttaaacgcatcgtttgtaacccaaaaatgaaaaaacccaactcttatcccctggaaaaaacctttcactgcttgctttctcagtctctctgtctccaatggcgttcacctttctctctcctcacccagtctttctctctctaactggaacaacctcttccttctcctacaaaccagttctcttaccattctctcgaaattcccgtactctcacggttgcggcgggacctgctcgccggaattcgtacccgaaccctgctgatgacgatccacctgaagcaccggaggattcaatgcacggagtttcgaagtttcagcagatccagcgtcaagctgctcgtgcacggaagctagaggaagaagatttcgagaagaatcggaacacttatctctccgctatcgccgatgtggaagacgcggcggagacgggacgagatgacgaagaatctggtggagacttgttctctgatatcgatagagcaatctccatgaaacgtagtgagtttgttaagcaaggattgctcaaacctaatcctcccaaaacggcatcgcttaagaagattggggaggagggaaatgaggaagaaggtgatgttactgacgatgttgatgagcttgatgaagaagaagttgttgatttggatgaaattgataaattaactggattaacagagatttctgatgaagaagattgggttgatgaggaaggtaacactaggatcaacaagaagaaggagtntgggtctgatcatcaatttgaattcgatttggatgattttggtgaatctaaagcgagaatcgtggaacctaagttcaaaatgagcttagctgagcttttagatgagagtaaagtggtaccaatctcagtttacggcgatttagatgtcgaaatcaccgggattcaacatgattcgcgcggtgtgagcgccggagatctcttcgtgtgttgtttagaaagtgaaaatttcttgagtgaagcagataagagaggagcagtggcggttgtagctagcaaagagattgatattgaagatactttaggttgcagagcacttgtcattgttgaagatacgaatgcagttttagcagctttagcttcttccttttataggcatccctcgaagaacatgtcggtgattggagttactggtacggatgggaaaacgactactacgtatttgattaagagcctctatgaagcgatgggtgtgagaacaggaatgtttagcacagtttcttgttatattcatggcgataacaaattggatacgcctaatgctacgatgaatcctgatgctgttttggttcagagtttgatggctaagatgttgcataatggaactgaatctttggttatggaagcttctcctcaagaacttgctttagggaaatgtgatgaagtggatttcgacattgcggttttcacaaatttgactagagaaaatacggattttcgtggtactgatgaagagtatagagatgctgaagccaagttgttttcaagaatggttgatccggaaaggcataggaaagtggttaacatagatgatccaaacgcagcattctttgtccagcaagggaatcctaatgttcctgttgtgacatttgccatggaaaacaccaaagccgatgttcacccgttaaagtttgagctttccttgtttgagacacaggttttggttaatacccctcaaggtatactggagatctcttcgggtttgttaggacggcataacatttataatattcttgctgctgtggctgttgggattgctgttggagctcctcttgaggatattgttagaggtgttgaggaagtcgatgcagtcccaggaaggtgtgagttgattgatgaggaacaagcttttggtgttattgtggatcatgcaaacacacctgatggcttgtcaaggctgctagattcaattcgagagcttaaaccgagaagaatcattaccggtatagatattttcttccatctaatagatactctttgcctgttcggccgttcctatggtctttatatgtgtggtcatctgattattttagttgttttatttatttattgaagttattggttgtgagggtgagaatgaaagagggaaaagaccgcttatgacgaaaattgctactgaaaagagcgatgtgacgatgttgacatctgataatccgaggaatgaagatccatgtaagtaactctaagaattagattgagtctatctcccttgagtgtttctggaggtatattaacagttaattttccaatgtggttttagtggacatcttggatgacatgttgtctgggattggatggacgatgcaagagtatttgaaacatggcgaacacgattactatccgcctttggcaaatggtcatagactcttccttcacgatattagacgtgtagctgtacgttgtgctgttgctatgggtgaagaaggtgatatggttgtaagtattcaaataaacccacactctatacagtactttactgagtgtgttatcaaagttgctggatttacctttatgagcaatcaaagtaatatagttctcgggtaaatagctttgcttgacactgatttttgcaggttgtagctgggaaagggcatgaagcgtatcagcttgaaggtgaaaagatagagttttatgatgacagagaggaatgtcgggaagcattacaatacgttgatgagcttcaccaagctggaatagacacaagcgagttcccatggcggtaagtagaaccgtaacagctaaaacaaccgtcgataaccaaagtttctaatctgtgaagagttgctgaaacttgtcaagatgcttcacgatcgctaatctgttcttccttgtattactgtgcttctgcaggttaccnnnnnnnnnnnnnnnnnnnnnnnnnnnnnnnnnnnnaagagaagttagcttagtcgatgaaaccagatttttttccaccaccgtcccattgtcttgcgaagatcgatttgcacaaaggtatagaattctacacaagtgacataacaatca

SEQ ID NO: 27918 - DNA, 880 bp, Arabidopsis thaliana landsberg
gcaatatacgtagattcgactctagagtcattaaataatcaccattctctatcgaactatgtcatattgtaatatccatatattttggtcaatgtacgactcgaccacctgatgaactccattggatcttacggtaacttattaagaaaagcatctaaaattttctattatttgatcaaaatgaaataagatatatatgtacgtgccctatcgccctatatagttgtataaaattgtgtataatattttctcggactaataattcctaaacaaggcaacatgcattacattattcataagtttctctctcaagccatgcattataaatgcatatgcatatacctatatatctctcataccatgcatacatgaactaggacaaactcctagtagataacaagacggaagaaaaaaaagcttagaaaaaatgcaaactcattcttcatctctcgtgttcttggctcttctctgtctgtcatgggctttactagtctcaccaacacgtcctccgtcacaacctccatcacatcctccaatacagccttcgtcacagccgccaacacagcctccgtcacagccaccaacgaagcctccaacacagcctccgtcacagccaccaacacagcctccaacaccgccaccatcacagtctccatcgcagccttctccactaccaccaaacatcgcttgtaaatccactccttacccaaagctctgtcgcacgatcctctccgccgttaaatcatcaccttccgatccttaccattacggaaagttcacaatgaagcaatgcctcaaacaagctcgtcgcctctccaaagtcatcaaccgctttgcccagcgcgtggaagctgatccaggtacgtcgacggtggaagag

SEQ ID NO: 27919 - DNA, 1599 bp, Arabidopsis thaliana landsberg
gaaggcgctcgacttggaaggcgcaacaccgatcttgctcggttctcaggtaaaaccaaaaacaaaaaaaagggctcttgatccctcttgctcgattctccataatccgttccatgttttctgattcttttcattgaaattcaatcattgtagttggagtttcatgtgcatcatgcaaaggaagcagcaacagttgtgaaacttgtggcaatgcttgatcccaaaacagggcagccaacaaagaagtctcctcgttgtctaactgctaaacagagcgcaatgcttgaggtttgaaaaattctttgccttatgaggtaaattataaattattacaacagcggattcgatctgacaatttttggttgtaactgcaggttagtctccaaagtccagtttgtgtggagacattttctgagagtagagctcttggaagagtgttccttagatcatcgggaagaactgttgctatgggcaaagttactcggattatccaagactcataaacattctctgttgttgtacgagttttacttgttcactataaatcaagtcgtcccaagttttgtctgcaatacagtatcaggaaatatcctaaaatagatcatgcaaaattcgaatcaaattttattgtgtaattcaatttatccatttttttttgtgtttaacacaataaatctttcttcttaaaaataagtctttttatttgcagtaattctgtagactatgatgagttgatgacactatataatcttcgtaaggtaataaactcagtacaaaaagagtggaggtcaaagttaagataaaatctctctacaagatcaaagttaagacaagtgatacgaaacattctacaatgcaaaacatgaaaacataatattttgttttctgcaatttcatgcaaataacttgagacactttttgaacaacactgatttttacatatgaattcatcttgcaatttttcctaacatttctatagagtgacatgttagtattcccgtataatataactcagtgtaatcttgactctttaggagtatgaagagtgcagaaagagagtgtatttgtttgtataaaccaaaacatgtttcaggttcaaatcaaagtcgagcttttaatacagaaggagaagaaaatggtcacctgatcttatttacccatttgtacccaattaggtcaaaagaaagatactgttatatgtacaaaagaaaagagaagagagagcaagatgatgtagagacaagcacttggtgaagaaaatagcaatgtatctgcatcatcttggaatcatcccacaaagctaaaactgctgttggcattattcactaaatcgacttctcttcttccgcagaggttttgcagattgggcaccaattcttcatccgcagccattgttgtacacagctcacatggtacatatgttgacatggaatagtccctaattcatctccatcaacatactcttcctgcatataacatcaagaacattaacattagcttcggttttactaaaaccttttagtacactgtcctagttcagctcagatactagacaaagcagtggattatttctagtttggggtacaaattggggtgaag

SEQ ID NO: 27920 - DNA, 1296 bp, Arabidopsis thaliana landsberg
agaggcgactcaagtcatagaagcttgtcttgttgcgaatgttgaatcacaaacttatgatgaagctcgtggtggtaaaaaatgggaagaagccatgaatgagaagataaagttgatcgagaaaaacagaacatggaaactagtagacaaaccggagaagaagaatgtgataagcgtgaagtggatctataagatcaagacggatgcaaacggaaatcacgtcaagcacaaggcaagactggttgcgagaggtttttctcaagaatatggaatcgattatcttgagacattcgcccctgtttcaagatatgatacaatacgagccttacttgcgtatgcggctcaaatgaagtggagattgtatcaaatggatgtgaagtcggcgtttctaaacggagagcttgaagaagaagtttatgtcacataaccacctgggattgtgatagaaggcaaaaaagagaaggtgttaaggctttacaaagccttatatggtcttaagcaagctccacgtgcatggtatgaaagaattgattcttacttcattcaaaattgttttgcaagaagtatgaatgatgcagccttgtacatcaagaagaaaggagaatacgtgttgatcgttagcttgtacgtcgatgatcttatcatcactggaaacaacactcatctcatcaacacattcaagaagaacatgaaggacgagttcgagatgacagatctcggtttgctaaactacttccttggaatggaagaaaaccaaaatgacagtggcatttttctttcacaagaaaaatatgcaaacaaacttattgataagtttgggatgaaagagagcaagagtgtaagcaccccatttacaccacaagggaaaagaaaaggagtagaaggtgacgacaaagaatttaaagatccaacaaagtaccggagcattgtcggaggattgctctatctatgtgcataagacctgatgtgatgtacgcaagttcttacctatcaaggtacatgtcatcaccaagcattcaacactatcaagaagccaaacgagtgttgagatacgtcaagggaacgtcaaattttggagtactctttacaagcaaagagacaccaagattagttggctactcggacagcgattggggtggttctctggaagacaagaaaagcaccacaggttatgtctttactcttggtttggctatgttttgttggcagtcttgtaagcagcaaacagtggctcaatcaacggcggaagcagagtacatagcagtgtgtgctgcgacaaaccaagccatatggttg

SEQ ID NO: 27921 - DNA, 911 bp, Arabidopsis thaliana landsberg
  unsure (1)..(911): unsure at all n locations
cgagctgaaggagaaggagaagaagacgaagaagaaaacgtagagatcgaagaagagaaaggaaaatagcgaggaagagtaagacgtgtcgtcgtctttggaagtagtaaggaagaagaaaaagttctaacggagatacaagtcgccggtttggtaaaacggcgagaagctcggaacaaagcagctacaaagagattttggtatctcgccatgctttttcgaatttcccacagagacacgacttgtaatagtatttattattaaacctaaggggatactatttatacgagtgttacaaaatccgtttgttccattcaatcttctagcaattgtgctaagaggagacaaaattgattggtttttaataaaaacttctaggaaaataaacatgtacttgctgagacgacctatactaatacaagagtagcaacagatatgaacacaagactatttagaggcggagaatagtgcgaagagtatcgcacagattctgaatgagattgctagatcctgcgttgcttgcaattcctgcagcggcatttcctcgtaacccctgagatttatgcaatgggnnnnnnnnnnnnnnnnnnnnnnnnnnnnnnnnnnnnctaaactgggtttactattttcttaaacgtacgctctgtggtaggctaaaacttgtgcaaggttcatcagagaagagcttgttgtcagtctttggtatacgcttggaggaagaggcatctgcatccatttcatactcccacagattaataaaacattatgattcacattatatagagttcagagagagagagagagagagaaagagtttcgacctcgttttgtccacgtcggccctttttggaccggggatcagaagaagcgaagagctcctgaagtgcttcgacggctacagtaccattccc

SEQ ID NO: 27922 - DNA, 3607 bp, Arabidopsis thaliana landsberg
aatttctcttaccttttgataacaattttgctttgattttagtgttacaaagataaacactgtagagtattattattattatagcttcttaaaagaaaagattcatcaatttgtttattgttgttcttcagattttttctaaattttaatcttttgtgtttgtgatcttttgtgatgggcctcttctctctgtttaggtttctctttttccaataaaattcgtcttcttcttttctgggtaccgtcgatttcttcctacgagttcgaaattagggtttttttcttcttcttagggctgattttgaggtcgagtagtgggttcttaacgaacttattcgttgaatttctttagggttttctttgtggtctagtttcatagagagattagaagtttggttatgctattgaatgatgtttcatggacaagggttttcgagaaaccgttgtaatgttgtggcagttgtttctggaggagaggtttgcgatattaataaccagatagatggagcttctcatcaacccaaatacccttttccagatctctcttcttcagggcgtctcaaggtaaaaacacttttctaattctcgtaattgatttgctagattgttggttgaaagttggaacctttagtaagtttagacaatgttgaactaagtttgggaattgttagctggtgagagttgttgctataggttgtgttgcttgaggcctttagaaattggtagacttgatgggagaatcttggttctaagtgatttcttaatggagatgttaaagcatttggtgtatgcttttttcatgttgtagtttcaggtactgaataatcctacgccggaggagttccaggttgctgttaactcttcagcaacggattttgtgtacttgcaaggggaacatagtggagatagtgatgaagttggtcccttagtgttgggatatactgatttttctactcctgatgccttggttactctgtttggttccacattaccgacaacggtaggtgcatcattcgttgttttacgtttctcgtttttagttaaggatttccttttacgttgatgcctcatgccactaagattttcttaataaatcgctgttagtctcttgacaatgtgcttaaaaggctccatagagtatcctctacatgaatgttaaaacattttccatacctagtgagatattaatatgttttggcatcatattgttttcacaggtttaccttgagctcccaaatggtgaagaattagctcaagcactctactctaaggtacaccactcttgataagcacctttcacttttcttcttattacctctttgttgctctatttcacctaatggtgattttcttttgcagggtgttcaatatgttatttattggaaaaatgttttctcgaaatatgcagcctgccattttcgccattctctgttttcagtcatacagaggtaattgtttactcgagcatctgacatagcgacaagccttaattttagtctgatttacatctatattttatatagttttttcccctagtctacaaatttatttgacagtgatatgctctttggcaatgcagttcgtgcagcgatacatgggatgtgttccatgttgcagaagcatctttcccactctattgtacgagtgacaatgctgtccttccttctaacattctaccgtaaaatgaattatgagatgggaccttgcttgcttggagaacctgcaaagattgatgtggtttcaccggaagctgatgaactagaagaggaaaattcattagagagcctcccatcaataaagatatatgatgaagatgttactgtgaggtttcttttgtgtggaccaccatgcacagtggtgggtgttgttgaccttctcgcgcattttatgatactggcttgtttgtgcagatgttagtatttctttatgctatcttcagttacaaagctttttctctatttcaggatacatttttactgggatctttgatggatggacttaatgctctcttgcgaatagaagtgagtagttggtagtttacagttttgatatttcttcataagtgcgcatactaaaatgtatggatgggcttaattgtatatgtcttcttttagtccttttaaaagaacattatttttttatattgttccagatgcgaggaagtaagctccataaccgttctaggtatgtaatttctatagccaaatgatatgttgcgcatccctcgaataacccttaagattaatcatctatggttttgtgccttttgacttagttttaagacgtacttggttacttttcatttttttgctgatcaaaattgaaactgcagtgctccagcacctcctcttcaagcaggaacatttactcgtggtgtagtgaccatgcgttgtgatgtctcgacctgttcttcagcacacatatcaatgcttgtgtctggaaatgcgcagacctgtttcagtgatcaggcaagggattatatcttttgaaatatagcttatctctgcatacatgtgcaatgggatttattattaatctcctatgtaaatatcagcttttggaaaatcacataaaacatgaggtcgttgagaagatccaactagtccattcagtggtgaactcagaagaaacaaagcggggtttctctgagcctcgtagatctgcctcaatagcttgtggagcaagtgtgtgtgaagtttcgatgcaagtcccaacatgggctctgcaggttaataatctctttctttcctcgacttatatttgttgtagatagtaatctttagcccaattatttatctcatgcaccttgtttccaagtttctcaacaatttagtcagccaaagtagtcacaagagtttcagatgaaaagtttgttatgaaattgtaacgggtagaaataaaggcttttcatgtttcttaacgtttaactcaagctttggcatgtccaaggaccatttttcgtgctttattgctttcactctttattcatgatacttgtgcattttaagtgattacatccagatagtcatgtgatttacattctctttgggttctcaggattttttgcgtttcatgagtttccacttgctaatgcgtgactaagaaaaggttattttgctttcgacaggttttaagacagttggcgccggatgtgtcataccgcagtttagtcgttcttggagtagctagcattcaggggttgtctgttgcttcctttgagaaagatgatgcagaacgtttacttttcttctgcggacaacagatcaatgatacttcaaatcatgatgctcttttatccaaaattcctaactggttaacacctcctttgccaaccagaaaaagatccgagccatgcagagaaagtaaggtactgtttcggatatcgcaggttgaaactttctctctatacaaaatgttaatttggaattattctttgttcatgagctagactctatgatttcaactctaatcagggataagttttgtggccatacttctgccaaatgttcatcagtcttcatgtatatactgattggatgctagagacaatatttacattcaggaaattgaaaacggagacactcaaaaaggaaaatcaacgtgcctg

SEQ ID NO: 27923 - DNA, 1157 bp, Arabidopsis thaliana landsberg
gtaagtaaaaacaaaatctctaggacaaagcttttcccatttgtgatttctaattctagaaagtttggaactgtgttgtgcagagtcgggatggagttaccgaccatagaagtgaggtacgagagtttaaaagtggtggccgagtgcgaggttgtcgaagggaaggcacttccaacactgtggaacactgctaagcgtgttttatctgtgagtactcagcaatttctgcgaattacaaagttgttattgtcttgatcctaaattgaatgctcttgtgtttttctatttctccaggaactggtgaagctcactggtgcaaaaccacatgaagccaagataaacattattaatgatgttaatggcattataaagccaggaaggttagtagttgtctcctaactagttttgatcaaagttttataccttcaagtgtgcttattcttcttgctgttgcaggttaacactgttgcttggtcctcctagctgcggaaaaacaactttgttaaaggccttgtctggaaatttagaaaacaatctaaaggttctaatgatgaaagcagttatatcattttcttgtgaagatttttttgctgcagctgtgtgaagtttgtaccttttctcttgtttttcctttttgtttccacagtgttcaggtgaaatatcttacaatggacacagactggatgagtttgttcctcagaaaacttcagcgtacataagtcaatatgatctgcacattgcagagatgacagtgagggagacagttgacttctcagctcgttgtcagggcgttggtagccgaacaggtagattttataaaccaatcattgtttccctgagtgcattgaaatgtatgtattcatgattcttttttccgcctacgaaaacagatattatgatggaagttagtaaaagagaaaaggaaaaaggaatcattcctgacacagaagtggatgcttacatgaaagtacattcctctgacactctctagtctctgaagattattctaaatctaatctttaaactcaggtggttgattagagactttttgttttcctataggcaatttctgttgaaggactccaaagaagtctgcaaacagattacattttgaaggtaatatagtctctttgatagcctggctaataatctggccc

SEQ ID NO: 27924 - DNA, 1945 bp, Arabidopsis thaliana landsberg
ggctatttttgaatggctccaacccagcagctccaatgtaaagctcttctttgtcaagaggctggaaccatatggtacacttttttacttctttcttgattggctctggctttggagtttcgtcttggcaacacgaaacaccgtttgatccctgacaacatcctcctgtgaatcctttgctctcctctttcactacaccgttaccatttggtataactttctgttcatgcactttctcagcttcacctccaggtagacccatttgccccctgaaacaaaagtcacttatttaagtccaagtaaacgttatctatcaccataacttatctacacatttatcacagagacatatatgtagactagctagaaacctaacctccaaatcctttgtatgatttctccttttgcaatatgttgatcaagcaattcaggtacatcatcaggtgttacatagccatacctacatttaaaccaacacggttatttgacaataccataaactactaacattttcatatgatccaaccatttacttaccaattgccagtaatctttccagctgaatcaggacagaagatgatcaaattaccagcatacttgtgctgtccaacatgagaacatcgtttcagtgtaatctggtccgaaagtcctcgagaaccaatctcttgcttaaacctctctaagatcactggtccacaaacaccacatctcttgtcacgactagcatgagtacacacaaatacaaatgttccagatatctcttcttgtatcccagaactccatggcttcccattcacaagaacatcttcaaagaaaccttccacatccgtatccttaacccccctattgtcaataccaacacgaataatagtttaaacaaaatcacaaaatgcaaatttggatctcatagatctgagaaatatactaagatctataatctaacttctaaagtttctaaaactagcttatacaacaatttacacactataaatctagctaagagtcaaaatcctattctagtcaactattttttttccaaaaatcttaagctaacaaaaacaaaacttaagcacactcacttgtatctgatcatatcgggaaaaatcaaaacatcaccgtcggatccaccaccttcacatacattgagcttcgtctacaacaacaacaacaaaaaaagtcaacgtaatgactaatgagaatcttcatcagaaagagatacaacgtaagaaaatgtcaaacgttttagtataaacctgaacaagaagatcagatttgcgatctttaagcaacgtagcgaaacgttgaggtaaaccttcttcttcgacgtgagagagccaagcttcaggagttttgtaaagaacaaaaacatgacgagcgtaggaagttatggaattggctatgtttgtgctgtacatctccggccgtttaaatccatactctgtgtcttccgacgccggaacagagttcagattctcaacatccgccattgacaagttagcaaatctcgagagagaagaaagagagctttgacttttgaggaaatggaagtaatcaaaaactggaggaagagtgtaatatttctgtttcattaacattatgcaaacacgtcgtgaggcgtccacacgaatgtgacaaggcggtgacgcaaattaagctcacaaacggattcgtgtagagttacatacaaatctactcgtccgtcttggtttgttggtgacagacagttgttttagttaaatcaagccacgttggtcaactaaattgtaaattatggagcaattagacgtattatatcattttctttgcaagctaattgcctgaagatgactcaaaatgtttgtttattatagaagctaaaccatgaggcgtaacatgaagaatttacgcaattggcatgaattaaaagctatatacatttccttaacctggtagtttaacgaagtcg

SEQ ID NO: 27925 - DNA, 4088 bp, Arabidopsis thaliana landsberg
accattttcttcggaccaaaactcagaaagagtctatgaatatcgaagaagttctcccgtaagggttctttgataccttaatcttatcattaatactatttgagggggaaaaaattgttattgttttgacaaaaaagaaaagaaaattattgctcctcatcgagtttgttatcaaaggagatgccgaaaaggactaaaatattttctaatgggccttaatcaatcggcccaacaaacagaggtaaatgaatgaagccgaaacacggaaacagttacgtgcttattaccactagcgagcgttatcgcttcgcagattcagtcaaaaacaagaaacaggagcttgtcttctccccgagattagaagaaggactaacatgaaatttgagcttgttttcatcccctatcccggaatcggtcatctccgatcaacggtagaaatggcaaagctactagtggaccgtgaaactcgtctctctatctccgttatcatccttcctttcatttccgaaggcgaagtcggtgcttccgattacatcgcagccctatccgcctcatccaacatccgcctccgctgcgaagttatctccgccgtagatcaaccagccatcgagatgacgacaattgaaatccatatgaagaaccaagaaccaaaggtgagaagcaccgttgcaaaactccttgaagactattcgtctaaaccggactcgccgaagatcgctggctttgttctagacatgttttgcacttcgatggtagatgtagcgaacgagtttggtttcccgagttatatgttttacacctccagtgccgggattctctcagttacatatcatgttcaaatgttgtgcgatgagaacaagtacgatgttagtgaaaatgattatgcagactcggaagctgtgttgaactttccgagtttgagtcgtccttatccggtgaagtgtcttcctcacgctctggcagctaatatgtggctcccggtgtttgtaaaccaagcgagaaagtttagggagatgaaaggtattttggtaaatactgttgctgagcttgaaccttatgtgttgaagtttctttctagtagtgatactcctcctgtttatcctgttggaccattgttgcatcttgagaaccaacgtgatgattctaaggacgagaaacggttggagattatacggtggttggatcagcaaccaccaagttcggttgtgtttctctgctttgggagcatgggaggcttcggtgaggaacaagtaagagagatcgcaatcgcgttagagcgaagtgggcaccggtttctctggtctcttcgtcgcgcatctccgaatatattcaaagaacttccaggagagtttactaatctagaggaagttctcccggaaggattctttgatcgaacgaaagatataggtaaagtgattggatgggctccacaagtagccgttcttgcgaatccggctataggaggtttcgtaactcattgcgggtggaattctacgctagagagtctttggtttggtgttccaacagctgcatggccgttatacgcagagcagaagttcaatgctttcttaatggtggaggagcttggattggcggtggagataagtaagtattgccgaggtgaacatttggcgggattaccgacggctactgtgacagcggaggagatagagaaagcaatcatgtgtctaatggaacaagatagtgacgtgaggaaaagagtgaaggatatgagcgagaaatgccatgtggctttaatggatggtggatcgtcgcgtactgcgttgcaaaagtttattgaagaggttgcgaagaatatagtttcactagataaggaatttgagcatgtagctcttaaatgataggcccaaagtttaaaatatcatattagacaaagtgatatctttgttcttgtactttaaaacagaacctcatttactagattgaggtaacaagataataaaaataaatggttgtaatgaaagctgtctttataaacaaagaaactattcaaattttgaatgatatgtctcaatgattaggtaacatgaagattgaaactaaacggtccataaatttctaaagttgaatggaaaaaaatgtctatctctaaccatggaaggacttgaatatcgacaacaaagtagaaaaaagaagcgaacaagtcaaaaatgacttcaaagacataacatcaattcacattttgatatataacaaagcttatcctattatcgcctttatttatctttgtaatgaactcctaaagcacttgggaaaacaagtagagagaataaaagaaatgaaaatagagctagtattcattccctctccggcaattagtcatctcatggcgacggtagagatggcggagcaactagttgataaaaacgacaacctctctatcaccgtaatcatcatatcttttagttctaaaaatacatccatgatcacctctcttacatccaacaaccgcctccgttacgaaataatctccggaggagatcaacaaccaacggagctaaaagcaactgattcccacatccaatttctattgccactggtgagagacgcggttgctgaacgcgtagattccactctaccagacgcgcctcgtcttgcgggattcgttgttgacatgtactgcacgtcgatgatcgatgtcgctaacgaatttggcgtccctagttacttgttttacacctctaacgctggatttcttggacttttgcttcacattcagttcatgtacgatgcagaggatatctatgacatgagcgaattagaagactctgacgtagagttggtggttccgagtttgactagtccttatccggtgaaatgtcttccttacattttcaaatcaaaagagtggcttcctatgtatctaaatcaaggtagaagattcagagagatgaaaggtattttggtaaatacttttgctgagcttgaaccttatgtgttggagtctcttcactctagtgacgatactcctcaagcttatccagtgggaccattgttgcatctcgagaaccatgttgacggttctaaagacgagaagggttcggaggttttacggtggctcaatgagcaaccacctaaatctgttgtgtttctttgctttggaagtatgggaggtttcaatgaggaacaaactagagagatagctgtatcgttagatcgaagtggtcaccggtttctctggtctcttcgccgtgcatctccgagatatagataaggaacttcccggagaattcaagaatcttgaagaaattctcccggaaggattctttgatcggacaaaggataaaggaaaggtgatcggatgggctccacaagtagccgtgctggctaagccagcaatcggaggttttgttactcattgcgggtggaactcgatactcgagagtctttggttcggtgttcctatagcgccatggccgttatacgctgagcagaagttcaatgctttcgtgatggtggaggagcttggtttggcagtgaagataagaaagtattggcgaggcgatcagttggtgggaacggcgacggtcatagtgacggcagaggagatagagagaggaatcagatgtttgatggagcaagatagtgacgtgaggaatagagtgaaggagatgagtaagaaatgtcacatggctttaaaggatggtggctcatctcaatctgctttgaaattatttattcaagacgttacgaagtatattgcttgagaatagctaaaccggagcatgcaacgctcttgaatgttgtgtcccttttatatattatcagtttatcactagatatgataatttgcatgtgttctatttacgtgtgttctatcttttgagtgatcatgagaaaaataatctttctaaagtttgtaaaagagtttttcaatatcaatctgttcattattggttgcaaaacattatatacttaaaatgagactgcagctgattgattgtagttatttaaaactaaatcttaattcagtcaaagcatataaactaataataaattatgtgatttggtttcaccacatatatatatatacatatatatatccataattcaaataaagatacatc

SEQ ID NO: 27926 - DNA, 1280 bp, Arabidopsis thaliana landsberg
gatttattggaaatttctgatgtcatgtgggtgttaataaaggttctaattaatatgtgacagtggttctatgtcccttaagtgtaacggatggttgggtatcagagataaataggttcactccaaatcttgaagttcttagatatgttggcgataagtattgccgtctggatatgcgtaagtcaatgtatgatcatgtcaagaagagttctaaggtgagttttgaacttagtctttcatatagtaaagtgagagtcaaaaagaaatagtctttgggtaacttcttatgaacttggggtttgaaagttttgtgttttatttatagccttcttctattttgttgtcagggacatttcttaccatttgatgtattgctgacaacatatgacatagcattggtggatcaagactttctttctcaaattccttggcaatatgctataattgatgaagctcaaagactcaagaatcctaacagtgtatggttcacttatgtctaactttacaatccattgacttgtgcactgaatgatagatctttagttgctagatgtcatatggtattactgtatcataatagaccttctttaggcttctatagttaaaaaactgtctggctagtaattaggttgtacgtgtcctggctgtatgaacattttatcctgggaaatcatctaagatacaagttggctatgtcacaggttctgtataatgtcttacttgagcaattcctcattccacgacgtctcttgattactggcacacctatccagaacaatcttaccgaactttgggctctgatgcatttttgcatgccactagtttttgggacactggaccagttcctttccgcattcaaagagactggggacggtctatcaggttcgctggcactagccatatagtgcgctaagcactctgacatttttgtgtggatattcattcggaagaggtaagagttctaaactaacttgtgtgtttcctatgtgttaaaacaggtcttgatgtatctaatgacaaggaaacatataagagtctgaagttcatcttaggtgcctttatgctgaggcgtacaaaatctttgctcattgagtctggaaatctggtgctgccacctctcacggagctaactgtgtaaaatcttgcaccttgtatagctaatcctttcctctaaaattatttgcgggtgctctattgataccgtatgattactgttctgtacttttatgatagaaaagttccgctaaacagtcttcaaaagaagatatatacatccattt

SEQ ID NO: 27927 - DNA, 1795 bp, Arabidopsis thaliana landsberg
  unsure (1)..(1795): unsure at all n locations
cgtctgatgatgtctctgatgaatgaacttctggtgctttcattcgatctataaaccgtagaaccactgctaagtctggtcgattcatcgggtttttcttacagcaacggatggctacattagctagctttttacctcgtgcgactggccagtctcctgctgaattatccagaaccgcactgatgttatcgttctccagagcgcatttgacatctctcagtatgccagatacaggccttctggtgagaagctgcaggagaatgatcccaaacgcgtatatatctgattctagcgtcatttctcttgaaacgaagtaatgtggatctacatgaggatctgatttgtctaatccgtcaatcgggatcagctgagagatcccgtagtcgttgattttggtgacgagattggaatccaggagaatcttagacggctttaggtttccatgaatgatgcacggaatgtttgaatgaagaaacagaagggcagagcatatctcagaggcaatccttatccgagattcccatgaaagagcaggaacgttgttttcagatgaaaagcagtcttcgaggcttccgttaggaatatattgataaatgagagaccgagactctggacaagcacccatcagtgttaccagatttggatgccttaccctgcttaaaatctccacctgaaatccaaaacacataacctgttcgttaacaaactcgagcatgtatacatgtctatattcaattttatttttccatatacataagatcctttacccgacgctcaaacccaaagtgattcaaggatccatatgagggtaacatctttacagcaacttgaagatgttgaagattccctttatagacacttccgtatttgccttctccaagtttccaagatggatcaaattcgttagtagcctcattgatttccataaaagagtagtcaagcatttccgacccagaagactctccggtctctcctttaaccagtcttctcagtgcgttcacttcctttactgcgttctcgtgatcgatccggatctcatcccttttctgtctgaaacttttcaagagctccatagctgtatcaaatttctcaccatgttctttttccaagtcttgtagtttcctcatctggctctccaacttaagattccgaccctgaaccatctgaagttctttcatgaatccattgttttgctctattaccatttttacttcaagcttttccttttccagcaattcctccaatctctttctttggctcgactccttaatgcataagccttccaaagctttagcctgtggcatgacaaaaaaaaatattcaagccgggagaaacgagttggacatgccagcaggcagcagcttaagattctccagcaaaggcatcaagtattcaactaaagctctttgacagcaaaatgtataaccacaaacacacatcgatctatcaactgaagaagttcagtacctaatgctagcaatctacaaatccccagtgaaatatttcttttatgtaaagcttattttttcatgtggtaacatgatgcactgattagtgattacaactagcagaaatggaccaagactatcactttgagaactattttgcaattataataactgagaaacgaataagagtattaccttgcataaagcctctgttgtactggcatcctcttcccattttttcccagcctccccataaaccgttctatctgattgtccaatatcatgcatggctntatcatacctattgaacttgcgcgctacatccccttcacgctcttttttctgaa

SEQ ID NO: 27928 - DNA, 2387 bp, Arabidopsis thaliana landsberg
gctctcttgccgaatttaacatgaattttctaagtttgttaagtgtaaaattatattgcaaccacttccacaactagttttggagtagctttctatttgtatgggaactggtgtaggtcaattttgagttcactaagaatttatcaagaagatgcttttgcaaacaaaaccaaaaactcaacaaaatgtttatgtgataaacagaaaaaatagtactatatgtttgatgatttgtataattacttggtaactttaactatacaccaaactggtaatcacacaacaaacaaattgaacaacatttaattacatgagactttaaatctgcaggacagttgcatatgcttcctcgacactggtttgtcggtggatgtagatctagtatgtacacaaataaagataatcacacaagcatttattgaaagtgaaactcgcactctctttttttctttctatttacttgttgtacgacataaagaattgaatacttttatcaatccaattaaacgaaaaacaaacaaaaaacttttctttaggaattattgaactaaatcgtatgtgtattagtataacaaattattggatcaataaaatacttgtttaccaaccttttttggcatcttgagtttggtaatcatatgatacacgaatcacaagatccaaaagtattcttattgctggcttataaaactttatgattaaactatggaaaggcatgcttttagacatgtgaaacaataaaactctatacacacacattatgctttgaatcaaaagttggtgatttatatgaatacacttggatactttattacatataatctcaaacacaaggcaatgctttatcttttaccaaaaaaaagagaggcaatgctttatgttaatacgagaattacaactaaatatgaacctttattttctatttgtaagcttaacggtgttaccggcttggatcgagtccattattttacaatgtttcatagaaaaatccaaacggcagtacctttcccatttctcaagtccaaatacaaataacaaaccccccaaaaaaaagtatttaaagacacaatccaaaaccctgaaaaaacctctctggtttcgagaaatacaaatcaatcaaatcgataaatatgaaagctgaagaaagaagagaaaaggaaacacaaacacacaagaaaaccaatacaaaggaaaacttggtataaaaatatgattagcggctacttcttgccccttttaaaacagaggacacagatgaaaaagcaaaacccagaagtgcctatcattaccatttaacaaagatatatttacttgagtttgagattatgtattaccctttaattctcaatctgagtcactcgaactagagcttgagcttgaagagttggacttcgtcttcttctcctactttcctttttgctctgcaatggtttccaccgaattctctggagtttcttcggacacgggactctggacatttgcatcagtgttgcttgcagtggtctcagctttcgctttctcggtaacaacctcatcacttagtgttacattactaggactagcagcttctgtggggattaccactccttcagagattacttccattgccatccctttttttagttcagaaggttggggaaattcttccagtgctcgagtttcgacaagtaaaacatcagatttcgttatctcttttggtttactttcctcctcctcttctccttcttcttctttctcggtggtctcagctttcgtttcctcggtcacaacttcatcaattactgttacattaccaggaccagtagcttctgtgggaatcatcacgctttcagagattacttccattgaaatcccctcttttggttcagaaggttgcggaaattcttccagtgatcgagctacgacaggtaaaacatcggatgttgttacaacgtttgtttcatcaatagaactttcgtcaactgaagactcctatggtttggtttcaactgcacacatgatttctccagacctactatctgattgtggtgactttggttgcttttccatgctctctacaacagcctggttcatagcattttctatcgaagatggcccaggttcagaatctgtcacaacttccttaacattgaagtctccaatcgagtcaagttcagacaacaatccttcatcaatctcttttatctcgtctgcctcttcggtgataatttcaggaggactttgagatattgcatgcaagtctgtaagctgctctaatcgctccaccacatggtctagctcctcataaatatcctcttggaaaaactctgcccttgagcctttaccaaccataggtgttcgtgtactcgggagattctgttggagagaggatgtatcagacgtcaaac

SEQ ID NO: 27929 - DNA, 1462 bp, Arabidopsis thaliana landsberg
  unsure (1)..(1462): unsure at all n locations
aaagttgttggagagtggaaacttctttcccatctctcaccacgactcactacagtcacttgttcttaactaaaagctttagcaattaaactattccttaattaaccgcatcaacgacttgtcaaaatattattgtttctctttcaaaataattgaagttttttagatgtgtgagtagggctttgaatattggatcttctgggctggactttttcatctactaggctttttggaattagtttaaagtaataaatctttacctaactttgttagattctgttgtctttactaaaagattttagcatgtgttttgtgataaggacatcgacactcaagagggtgacaagtttaaacacatagggtttgatattaaatgtatatcaaatggttaggcataaaaaccaacttcgagcgaagaaaaggaagaaaagaaacttattatcggccgttacatgacatatttcaggtgattgcatcatccttggtgccaaaatgatgacacaacaatacaagttagaacataaccatgcacatttaaaggtgagttggtgacacaatatacagttgacgggttgatatatggtgaaataaatgttgacgcacataatattgtagccacgttattaacggatagtcaatttcgaatgtgtaatatcaatatatgtattttttgaaattagtaccaagcctaagccttatacgatcggttatacatctatctttaggtgaccggtttgtcttcctagagtaaaaatttttcaatatattttagaattataatcgatatttttctttgtgtttgataataggtttttggtattaaaaaaaaagaaagtaaaatgtcataatttatttagatgaccataaaaataagctttaaaatgttaaagaaaattgttttgtatactttctaggaaaatttgtttgtataatttcacgtttttatgtaataataaaagattattgttatttttatagtctctacattaatatttttacctatcttatatgaatccaaattagttgatgtcatatcctgagactgtcctacccaaacctagctcaaagcccaacccaaactgtaatgcgtgaaaggaaccatatgacttttctcgaaagtcccaatatctctgcatcgatcttgtacacaaagatgtcgtcagaaaacataactggtcctctgattctctgaaatatttaggaattcacaaaaacttatccattgtctggttttctgacttgggagctaaagccaatggaaacaaagaagtaaacaattgacagaaccaaaagataatactccaatggaaaacaaagaagtaaataagccaatgaagtaacacttcttctgcttcaaattttattcagactaaagcatcttttaataaaaagacagagacacaatctanaaccaaacctctaattcttttttctttcttataatcccgaatgagaagaacaa

SEQ ID NO: 27930 - DNA, 1476 bp, Arabidopsis thaliana landsberg
tgcccaaggtgccaaagaaaaagccagtggttaaagtccattgatatctctggttaaagggaattgtttaagaccaaaaatgtttcatggtattggaataattggtgtgtggtgtgtttttcatgtaatcatgaatcacgttgtatcattatcataaaatcttaataagagtgtgttttgtatgcttctgcctctaggattgtttgaagtacgtattgctatttacaaggattccccatttcattagctaatcaaaagagaaccggttcggtcatgtttttaaccaatgttgtgacgacaatacaagaaaaatggggctaatagataacttataggtacgtttttggaaaacttctgaagtcaaggctcttttacgcaatataaagatagattgaaaattaggtttaagggtaaaatagacaattcaatactgaaggttttcttcttcctcatgctgcttataaataaacatccccgcgataagggtagaatccaagtgcctttgagagatcagagcagcgagttacaatgctgttcttgttccgttgcgggcataaatcgaaacccattgatcttttctttgcttcctcttgcaagtaatcttctttactgcaaatcggaagaaaagatctcacatttctttgatcaggaaccaaactctcttatcgttttttttccttcttgttgttgtttttgtgattatgtttgtgatatggccgatccaaatgggttcgttcatctttatattagttcccaatttcacccggccgaaatttaaattcaatttaatggagcagtctctctatttttatgattctctacatgtatattttttcatgtcggaaatcagagattctgccctaaaatttattcgtcaatttttgtaatttatctccgtataatagagatcttagacgtaaatatttatcttttctgttttgtttgattcacttaccaaacaatgttaagtttcgatgtctgagttatttgtgtagtatttaataacaaatggattcgactatgaaagaaaaaattgtctgtaatgaatttatatgtagcattacttcaaagactggtttatggtagtgaatgcgtgctttatagtggaagtatgactgtaattgatttttcagttggtatggaccaagctccgactaagcagcattcgattcatctttcacattggttgaagaagtaatgtgattgattgctgccaaaattggagttggttaataatgaaaacgctgaacaaacatgttatgaaatcagcataagacgattttaattaacctaataatgtcagaaatcttgtaattcacatggataagttatggtttagcattaacttacgataatctgaatggagatgcttttaaaactagatcctcattctatctcaataatttgaacggagatgccaaatgataatgacaaatgttacagattggtccacaattcccgagtagattttgggct

SEQ ID NO: 27931 - DNA, 1819 bp, Arabidopsis thaliana landsberg
tgcatgctttaagtttaactaacggtgtttgaataaaacaaaaactatatcttaacattcccttagataactttcacatattttatgagggaggatcgttctcaatcatacgctaatggttaacagttttggttacatgagtgttcactaatgagagttgtattatatgtgttggtaatgttatttttgtctctgttggtgattgtttcttatcccttttgtaacgattttaacaaaattgatcattaattaagaccgaaaaggaaggtgtttaacatattttctcatattatatattttattatttgataacacaactattaaagggtagttgagattatgagatattgcgtgtatttacatagtgtatacgaataaagtttctatatcttaactttaccacgaagctttgagtcacttcattcctttatatattcaacaagacaaaaagccattctaggcggaaagagcgtaattatcacttttctttaagctaacaaactgatggttaggaatgaggaaccttagcgtcaatcttatgttaattttaacaaatctacatccaattattgtcgtttaacatcatacgggagccaatatggcggcacgggaactgaaatcattctcaaaattttttatatatatatttttttagttcggaaaatgttttggttgaatcagacaactaatttctagagtctatatatatcgccggtaaagaaaatttcgttgtggtcacttaaaaaattgtatccaacgaaaattaatttatagtttagactaaaatgacaacaactatttggacaaccattacttgatccaaatttaaactcatatttgttttttttaccaacaagaaactctaattttggctatgtttttttgctgaatacaaacgctctcgtttcaagaatattttacatcctcttagacaaggcgatagagaatcgagatgtgtactttcgtattcatctaaagttttggttgagcaatactaagccaggagcaatatctcagtaaattgtttttgccatcagtattagccaattaacaagaaaaatcgtactcctagttggcaatactagtaaattgtttttgccatcaggagtagatacactagctaacaaggatagtgattgacttctagttttatcctgtaagagagatgaataggtagagagagaaagtttagggtaagcacaaggctcgagggtgaaagacataataattgggatttctcttcgtccataaatttccccaaacaagtcatgcactctctacttacctttctgtgtgtattgagtctattgccaaatcatagtaagatcatgttctaataatcatttgttattttaaccactaaacactactgtactaccttgtatgctagtatcatttgccataattatttctgagcacgcaatattttttctcaactccaatataatagtatttcctctgtttcattttaataaacgtttaaggtttttgttaaaaatcacaaaaatcttatttagttttttttttttacataaaaatatcattaactacaaatgattcaactaatagataatatattataaaatataattggtaaaaaattattaaatatatttagtttttgcatatgaagttgaaagcatcaagcaaataaaatctctaaaccatcacttaactactgcggaaatattatatgtaaattgttagtttggatcaccaaagttcgctgttcaaaaaaattgcaagttagtagtataagtttggtaacctagttgttacaaattcatatgtctaataccacctataatgttgatcgcta

SEQ ID NO: 27932 - DNA, 2109 bp, Arabidopsis thaliana landsberg
agttccacttgcatacctcttgagcttgggaatgtacatgctggatcttattggaatcccaagtgcgttggataccattggtaaagtccattttgcaagagatttactgcagaacttcactaagagtatcgtcggtattcccaccatgactctaccaaggtaggatgaaatagggagctctggtgagaagattcgtggagcagcttcgtggtggaattggctgtacgtttgctgcactccggtaacctaagacaagtaaaaacatcgattaaggccattgtctaaataaaccataacactagtgcatacaatatcgtctgaaaatctttcaatgcttacaattcctaaggtaaccccgttgaaggctgtgtggtactcgtagctaggagttgggtgctcaggggtcggataagcaaagagcaataagaaactcaacgcggtccagaaagagctaactgcacaatccagagagtcatggcttttctgttattcaatgtttgcaacttaggagctttatcaaactatgagcaaggagcttaccgttctgttttgatgtaatgaaatcgtcaagtttttcattgacggtaagccaaagacctagaatcaggactcctatggcaagaccactgacgatatcgacgacactatgcatacccaagtaaacccttcctaggaagaaaacaatgttgtcaattgagcaatcaaatcctttcaaggaatgtgtgtttaacaggtatgagttttgggtcttaccgaaggcgattagagctaccaacaaacaagcaagggcaaatccatagtactggatagacacactttcgtattccaaggaggataacacataatggagtagatagctgaaacaccagacaataaggagacaagtgttatgacctctatagcattccagttccactatttagtcaattatcttctcacagcaataacaccgagaacagacattactagctaggtatggagtttctacaactatgatgatattccacaacaaagctggtaacgagttagcagacaacatacccagataaacaaacagtgttaagagtatgtgaagaaggcaagccatattccattgcattgtcttcctcatctttaggggcagtaatccttctaaccggtggacagcttggcctaggagctgataccacatcctaaataaagaagagcgtataaaaccaacacttgcttctttagaaacttgtaaactaagagaatgcgttatagaaggccaaataccttaatgcagtttcccaagtaatcacagaatgcaatcaagagagtcatctgcctagccaatctaccatgtccactctggaatatcgattagtaagacttcaagtgtacatccatatccacataaaaaatctctaaatactaaggatttaaacttttatgttgaagaagaagctttggaatgttacccagaagagcaaaggcaagaaagcagtgtaaaagggaacagagacaacacaagatagccctgagaagaaagcatccaacactccattctgacatttctgcatatacccaaaatggtaaattccaagtcaaggcaaaaaaatcagcttcaattctaaattttgaaaaagctgatagctttagctaattaatgaggcacctggattctgagaatgagagggacaccaccaacgacttgacgagcgacccatggttgtaagagagatctaaatttatgggtaaatttaagataagaagaagcacagatccatgtgacaataccaacgagctgcaagcctcgccgtgtccttgaacctcccattgatctgtataatatcttcttcgtcttcatattgttcttccctccctctttcccgtttcaagaaagagtagagagcctttcatacagttggtagtttttttgggtaggtttcgcatggtcagtaaacccaattttatacccttagtcttttgtttgggcggtatgatgtcttctctctccctctatctcttgggccgtatagtgaggagctcctatggatgttcgctgcgcagagagaaacccatagagagagacagagattgatttatttataaattagtatttgttcaattttgagacctcgctta

SEQ ID NO: 27933 - DNA, 1911 bp, Arabidopsis thaliana landsberg
aaaacttattcaggctgaataaattaaagttgtaagatgttatcacatctgacgaattttaaaaccgaatttttcttttgatttcctcaatttattgatttactctaggtataaagaaaaaggctagtaaacatgaatttggaggttgttatataaatttagaaagaaaaatctcaaaggatatctactcaaggaaaataacatatatcgttcccaaaagaaaaaggatattaacataatcgagattatcaaaaaacaaaattaaaacataaattgagattgcgtaaacctagtcataaataataaaagttgtatgtttcgaaatttctaaaagttaaagtattgagtttagtattggccctttcctaggaggaaaaagaaaaagaacaagtcttttagacttcaacactccaagtccaaacctttggttttcctcctcacaagtatttcttcatcttctcattctaaaaagttaggcatgtgaacaaaaaaagttgagaggtcttaagatttgcataaacagagtttataacgatggagcaattatggatagcaaaagaaaccaagaagaaggcaaagctcatcaaaggaagagatttagtcgataatgtaatctcttggtctcttcgtgatgtgttaaactcaaatctatacagaggacaggttatgttttcttctgactcttgtctttactttaaaacaattctcttttttttttcttagttgctttatggattttgtgtttttggttattaggtagggaagattcctaacacattcacatcaaccaaagagtattttgagtcatttgttaaaccgattattgaagagacacatgctgatttgttgtcaagtatgggaacgatacgtcgtgcacaagcttttaagttttgggaaatcaagccagggaaagattttaaacctcctagggatctttattatgaggttactttgcagatgacaaatgagtatatgaccaaaggaggtcaaaatctgttagaggttaatgatcttattgcagtgaccgataagaggcctattcgaatcgatgacttgagattttctcatgagccttatttgctagctcttgtttgtggagtgaatgaaaataatccacatttgataactattttggcttctaagccaattattttcgacgatgatgacgatataaaaacgtcgtcgaatataggaaagggtgagaggaaaagcttaagtttctttggggttaatttgatcaacatgatgacaaatattcgtatttggactgcgttgcatccaaaccccgaaggaggaaacttgaagcttatttcaagagtacttcaaagcaacaatgaggtaattaagttaagttttgaaaacagaaccaaaatcatgttttgaaatatttttcttgtgtaggttgatggaggaagttgtgtttcttgtaaagaaaacagtgagagtgtagtctcagattactcagctcgaatgctacgttcatttaaactgaattcatctcaagaggacgcgattttacgttgtcttgaagctaaaagttgtaaccattccaacaatatcaaacttatttggggaccaccgggcacagggaagacgaaaacaacaagtgttctgcttttgaactttctgaaaatgacatgcaggacattgacttgtgctccaactaacataactgttttggaagttggttcatggcttgagaaattagtctctgagtctttgaggtttgatgggtatggtctcggagatataaagttgtttggcaataaagaaaggatgaaaatcgatgatcgcgaagatcttttcgatgtcttccttgagtaccgagttgatgagctttataaatgttttatggctctgactggatggagagcaaatgtaaaccgtatgatctgtttggtcagtgatccc

SEQ ID NO: 27934 - DNA, 1819 bp, Arabidopsis thaliana landsberg
ctttgtgaatttctagtaaaagatttcatttatttcaaaacacatcaatgaatgattttgcttttttttttttattacaatgtataactgagctgccttgagattgtgcttatcactaataatttcgtacatacaccgatagtagggccaagtagctataaagagaagagacatgtcgatgtcaaaaatgaaaaagacatgaatgtgatgctgcactttcattgagccgcaaaagttagctcagattttaacttgttaactaatcctgttgcatgttcatgaatcattgaatgtttgaaataacagttcgcgcaatgtatctctgttgtacttcacttttaatgcgaaactaatggcccattatcaaccagaataatgctaatcatcatttttgggcttagcttgctttgattagatttgtgaaggagaagcccattatattggcccaatagcaaatacccaattaattcctctccctcgcttcttcctcgttcttcattcgagcagaatcaatctcatcgctctgttgtgtctaattgaagctttggataagcttcttccaatacctctacaatggaggcaactgatatttggggagaaattgaacgttctgagaggtattcttgagaatttgcttaaattttaatttttcatgcttgcgaattttggttccggcgttggccatgtgtataagcagaagtcaagattttctcagaattagttatcacgataattatctatccggctttgattcagtcatgtatagagtttgtagaaaaacgattcatcacagacttgacaagaaacaagttcaaatgaaattgcccatgatgatgtccactcaaatttatctcatacttgtaaaaattatctgttttcaagttgagaaattggctcagtaccaatttcattactcatttttttttttgttggatgtgtatagttacctagtgtgctctatgtatgaagaggcagagtcattatcttcctctatactgaaaagaatatttggcaacattgatgttttatccgacgaagcttctcaaggtgatcatcaatttcatgatatgttggaatctgctggtatggtcttagttcaatccttgcatggaatcggcaggtatatttcatttactgtattcagatgttataacatgagtagttcttttgcctcttacttctgtttggaattggatgctctaaagaaactttagagtcttggacgcttgttgtagttttggctatgtgatagtttttgccaacaaatgcctttttcatgcaggacagttgagattgtaaatgagttaagagatgtgtttaaaaagtaacagctattcctgttcaagttcttcttactgggtattgatcttgttctcaatctttcaaagcattacagcttaagatgctttaaaaggagaatatttggttctttttgcagtttatttttcaaaactaggagtaaaatacattcattttatttgctaactttttcttgggaaggggagtacaataacattcattttatttgcaaactttttcttcttaaggggagtacaatactgctctctggatgcattagcatagacaaaagtcacagaacaagattgttgaaatctagtttattgatcttcttccctttttttcccttttagagtatgccttcaaatatcaaatggttcctatttgggtgtacgtgatattctggaagagttctttagaatatgggtttacaaggacaaccactatatcctaaatgatgctggagtaagtacaaaaggattccatgcgaaaaactgcttagatattgatgagtacatgg

SEQ ID NO: 27935 - DNA, 1969 bp, Arabidopsis thaliana landsberg
  unsure (1)..(1969): unsure at all n locations
acacatgcgacgcgtttccgttggctgaataagtcttcgccgtctcctttggttcatcatcgtcctctctgtttaaatcaggagagagctcacgagaatccctcttcagatcagaacgccacaaaacaaggatgcgtgtacactccacgcgctctcagtcaccttattcctccttctcttctatgccgtgtcaccggcgaaagctcagcaaccgtacgtcaacaaccaccagctcgcatgcgaggtccgtgtctacgacaacataaccaacggattcacatgtagcggcccaccttcttgccgctcatacctcactttctggtctcaaccgccgtacaacacggcggactcaatcgccaaactcctcaacgtctccgccgcagagatccaatcaatcaacaacctccccacagccaccaccagaatcccaacccgtgaattagtcgtgatcccagctaactgctcatgctcctctccagcggaggattttaccaacacaacgccacttacaatctctccggtaacagaggagatgaaacctatttctcagtggctaacgatacttaccaagctttatccacgtgtcaagccatgatgtcacaaaaccgttacggcgagagacaactaacccccggcttaaacctccttgttcctctccgatgtgcttgtcccaccgccaaacaaaccaccgccggatttaaatatctcctgacttacttagtcgccatgggagatagtatctccggcatcgccgagatgttcaacagcacatccgccgccataaccgaaggtaacgagcttacatcagacaatatcttcttcttcacaccggttctagttcctctcacaactgaacctaccaaaatcgttatatctccgtcgcctcctcctccacccgttgttgctacgccgcctcaaacgccagttgatcctccgggatcttcttcttctcacaaatggatctacatcggaattggaatcggagctggtttgcttctcttactctcaatcttagctctctgcttctacaaacgaaggtctaagaagaagtcattaccgtcgtcgttgccggaggagaacaagctctttgattcatcaaccaaacaatctattcccacaacaacaacgactcaatggtcaatagatttatccaattcatcagaagctttcggtttaaaatccgccatagaatctctaacactatacagattcaacgatcttcaatcagctacttcgaatttcagcgacgaaaacagaatcaaaggctctgtttatcgcgcgacaatcaacnnnnnnnnnnnnnnnnnnnnnnnnnnnaaaggagatgtttcttcctctgagatcaatcttttgaagaagctaaatcattctaatatcatccgtctctcaggtttctgtatccgtgaaggaacatcgtacctcgtcttcgagtattcagagaatggatcgatcagtgattggcttcactcgtcgggcaagaagagtttgacatggaaacagagagttgaaatagcaagggatgtggcagaggcgttagattatctccataactatataactccacctcatattcataagaacttggaatcaacaaacatacttctggattctaatttcagagccaagattgcgaatttcggtgttgcgaggattcttgatgaaggtgatcttgatcttcagttaacaagacatgttgaaggaacacaaggctacttagctccagagtatgtggagaatggagtcattacttcgaaactagacgtgtttgcttttggagttgcggttcttgagcttctttcggggagagaagcagtaacgatacataagaagaaggaaggagaagaagaagtggagatgttgtgtaaagtgataaacaatgtgcttggaggagagaatgtgagagagaagtttaaagagtntatggatccatctctagggaatgagtatccgttggagctggcttacacca

SEQ ID NO: 27936 - DNA, 2102 bp, Arabidopsis thaliana landsberg
attaaaaacaaagctcaagacctcctaaaatttggtatttttacctgatcagaagcaacagctataaacttgattatggtgaagaagtgcttaatcaattcacagagttactaaaacaatctaacgcagacgcatcctttaaaacaacaaagagaaagggcacgcatggattccaagaaagcaatcaactttctcgaggaacaaaaaaaaccataatccaagggacgagaacgaattttgcagataagaataagggataaagttgagatttttatggtaaagggttctcgttataagaaaaagacgaaattgaggctctgttaacctttaatttaggggaagaaaggtcaaaaagaagaaaacttttctctgcttttcttcttcttgaaatttgcgctgaggtttaccacttggattcctttagtttttcttgagctttgcaacgtagaaggaagagaagaggaagaggaagaaaggatgtagaaagtgaaagaggaacaattattgcgttattgtttaatattcagtgtgaaatagacttttctaagtaggcacgatctacggattacagacgcctctctcttttactcaagtttttatttttgtttgtattcagtttctataccacaacggctctaaaggttctaaagaaacttactttaaaaagatcttaatcttgcatcttttttttttaacttttttgtttttggcactagaggaggaagatggaccacaattctgattggtttggtttggttcttgtatcagaaagttgtttggtcttgcttggttataaactggtttaaaaccccattcacatgaatatgataatcacacttcaatgtcattgttgtcttcactagctttaacattcccattaccataagttcagtgaagtagaaggataacacgagaagctaagagaagaaacataagattgaaagtgataacaacaaatctgattggtgtatgtatcaaacacacgaatctatatgctacatgtgccacatgagtagcttcaaattggttgctcatggtcaaaaatatgatctcttacagttaaaaattacgaaactcatcatccacgagtgggagtggtttttctaagttcagtttccagctttgcagaaccgtcaggcaagtcatagaattcagctaagtatgtcaaagcttcaaagttgttgttgcataccttccacagtgcagaaacttctcctttagaaacagttcccaagttttcacaagtctcaatgaattcaagcagctttgaatagaaagcatcataattcatcacaatgaatggaaccggcaatgcagatccaatcctttcgagctgaatcaatgccaaaatctcaaacatctcatcgagcgtgccaatgccacctggaagtgcaattatcgccgccttctcagatacattgtttctaatcacagcatctactaatccatgctttctcgccgagaaaaacctaacatggatttcgcattttagggatcactcattcttgtgcaagcacagtaagtaataaccaatggtgtgtggctatgtttacctgcaagtatggtaattctgaggagggagatatggatgaaacttcgatgcggtccattcaccggcttctttttctattttgatgccaccgaccggtttctcagcttccaaagcaccttcagtcacagcatccataagccctggtccagcaccagaccatgtagtacagtccaacagagttgctgcctgataaaatacacaactctgagaaatctatatctaaactaagctcttgtggagtgttaagggtcttacttacttctctgctcaactcttgtgcttgcagataatgtgaatggtttggtgggattctggcggaacctaagtatacaatgcctctcccgagcctatgtacgaggtcgaagcaaatctcaagctctttcttaacctttcaaacaatgagaattcaacagaataagttgagaataacctctatcgaaatggtctttcaaggggaaactatcagtacttaaaaaccgccacctccaaagaagattaaagatagagtgaagtaaacttcttcattcaattgaacaagaaaaaaggccaa

SEQ ID NO: 27937 - DNA, 1546 bp, Arabidopsis thaliana landsberg
gctttcttcggttttctatcgaagataaatgaccttaaaggaatacgagaacgatcttgcgaagactgtgtatttgattcataaagtgaaaactcctcacttagtttctcgagtgttgtatcagcatccttcatcagttttgtaacttgatctaaacctgtgtgcaactcttctgcaatcctattgttttccttcttcatgttggaaacctcgccttcgaatttggctccttggtagattgtaagttttatttcagagtcttcagaatctgttttgagagcttctgttatctcattgtgtatgtcactcaaagttgaagctctgatgttgatttcttcttttaaaagcaaactcttctctaaccaaacagtcatttcggtgcgaatctcgctgaggtgtttgtatatgggacgaacatttgatctcagagtgttttttcctccatcttgattcttttgttttatgatcttcaacatctcaacatgtaagtctttgatccctgtgtcaaactgttgtattttgccaaaagagttgctaaacctcaccaataagttcaagttctcgcttagtaatgcatcaactcgtgctcccaattgctcttcatttggtgacatcctctgtttttgaccagttattgcatttgtggcgttatcttctctgcaaattagcatgaacaattggccccgttgttgatccttgccttcatctttcaaggtgtttacatttttcagtttagtttcagtttcatgtagcaacttcttcacttctttatagttccgaagtactttggtgtattcagttaacaaatgtttttctctgccttcgatcccatgtgcgagcaacttctgcaagaataactcatctgatgactcttgtgttgttatgatgtctgattttggtgatgagatgtgtttctctaaatcagataacgaagcttcctttgttttagtttcaatagtctcttcttggttaacttcatcggaaagatccttttcagcaaaaaccacctcagatgctgatttaatgtctaaagcattttcagacacaacggtatcatcaatgttttcctctggaaactttgtatcagtcaaagatcctatatcttgaattggcacattagtagcctttaattcttcatcttccccttcttgcgtcaagctttttaatctcttggataagaaacttagtttcatatgtgctctcgtaagatgtttatcaatgttgtcactcttttcttcaacttcttggtctatatctttaacaccattcaccttttcctccatctctttcaacttctttcccatgtccatattgtcatcagtttgagatgaattgttttctttttgtagagctctaatctgtgctttgagatcatcgatttcttctcttagtctgtgtattaaagctgcttgagatgagaacaaactctccaaattgatcacatcattcacaagctcatcgattttatcagccacatctggaatagtaagacatgacttagcctcagagtcatcaaactcatcatttaccttttctcctaatgact

SEQ ID NO: 27938 - DNA, 1341 bp, Arabidopsis thaliana landsberg
atcattgaatagtataaacatattttcattttatttttgtttttgtttaactaagctcacagcgacacaattccgaatattagcaattggagaaagaataaaagacacagagcaccatattattcttttagcccaaaaatttccacaagtacaaatccggcaaaaacacatacatagaccaatttttggtttactgacgaaattttcagatcagaaaaccggatttgattcaagtgggtccctaaaccgtcggttttaaacaatattttcaacgatgagctttttcaagtcaaactagcgaaacagctatcagacctagacaaaactttagaaacacaatcaaatgattatcttgatcgtctttagatggactattaggcatagatctaagcattcttggtgaatctaagcttttttctcaagatctgtctcatcgtagagatcaaatgtcttgtcagattcgatggtgggcttgaggatttgaacttattacacttgttcatgtgtctcgccatagcttcttcttctgttgttaaaaatctttttgttctcatgactttgtacttcacagcttcagaacaaaatccagagatccatttccctatgtaacgctctcttatcatctctgtgtacgattctgtacactcgtcggttaatccgcaacagtcacacgtcaccgaatctagctcatcgccggatatttgtgtcaccggaaccgttgagataattattacatccggtgttgaaattaacattgttggatcactaagtacactatcagacatggtttcttgatttaaaaccctgttgagaaaatttcgatcaacaatctgattcttacttcaacataagaaactataaagaaaccaagaagagaagttttatcagtagcaaaagatgagaagataacgcagtaagcttgtgatatatcttctttgttttgtctctgtttctgaaacagaggaatggtttttaaaaagggattcttaaaagaaattggaatacattttttttttttttaacgttcgttttgccactctctgtcttctaaattactttcatctccgagaaaaatttcacaaaacaaaacaattgcaaaaacagagtattaaaaatgctttttatcttggcttttcttgaaaacaaatagaaaaagttaccgtttctctttacttcacggaaaaaaacattagaagttcataaaaattcactcgaatctcttgttacttcagaagagagaaaaaaaaagtattgttttggaaatatatgaggaagagaaaatgagagaagaagtttgtgcacgcgaaggagaagcaatggtttggtgttttataagagaga

SEQ ID NO: 27939 - DNA, 1622 bp, Arabidopsis thaliana landsberg
  unsure (1)..(1622): unsure at all n locations
tctcgagaaatattaacatttgttacaagagtgtcttttgtcatatcttacatcacatgggggcctgggcggttccacgttgtttttagtatgttttcctcatttgtttattacacagattttcttagtggttttagtaatagctgttttgttcgataacataataaatagtactgttattatacttaaataatttttggttactaaactcaaggtacgtgacgaaaagaaattaaaaaggtaatggacgtgtggacgcgtgattgatcattgtttaattgcacgtatagtatataattcattaatttgtcttgaagcctactcttttcctttcttgcccatgggaatctgagctttcagattaagttttaactcttaatttttaatttttaatttaatgatttactccgttgatgatgctgttcacataataactagaacctactagttaatgctacaaaatgcaaacaaaacaatttcacatcgcgacactcttaattaaaaaagatttattacttgatccccttgatccacaagttaatataagtagtatttcctaaagaaagaaaatgacagttaatgtgaatgacagaatgagtaagtaaaccccattaaaaagggccgatgatagaaaaacaccgtggaattaaacgagagcactaatctcatttaattagttacaggtaaaaagagagtcaactaactaattaatggttagatctctctctacttccccttgatttgttacagtttactctcttcttaaccatttttgaaatttgaaaagaaattttttgattggacattttttcttttaaaaaaagaaataataagattgttgatgtagccatagaaaccgggaggcacaaaaaacggcaaccaaagaaaggaaaggaaagaaagaaaacaaaaggagtccaagaaaccagaagattgtctcccgacgccattatccttcaccctcggagcttttcttgaagcagggattcttctaatcattaatccctacttctttctttcttttttgtttgttctcctttgagatctatctagtactagtagtaaaaccccctcccctccattgaatttgaattgaattgannnnnnnnnnnnnnnnnnnnnnnnnnnnnnnnnnnncgacattccttctacgcctgggaaattcaagatgatggataaatcccccttcttcctgcaccgtactcgttggcaatcctccgtcgccaagcttgccttttggtcccttgtctttttcggattgctcttcatcttcttctaccgatctcccatctccaatcccgattcctctcgccgctctcttcgcacctactcttggggcggtcccgcctgggagaaaagcgaccgatcctccgctagtgtccgcacccgcaacggcgtctccgttctcgtcaccggggccgccggtttcgtcgggactcacgtctctgccgctcttaaacgacgcggcgacggcgttctaggcctcgacaacttcaacgattactacgacacctctctcaagagatctcgacaagccctcctcgagagaagcggagtgttcatcgttgaaggagacatcaacgatctgtctctcctcaagaagctcttcgaggtcgtccctt

SEQ ID NO: 27940 - DNA, 1783 bp, Arabidopsis thaliana landsberg
aaacgcggcactctacgtgacaaacggaaaggctcatatacaaatggtgaacgacaacggagaaagagtgttcgaccaagagatctccagcggacagttactagtcgtgccacaaggcttttcggtcatgaaacatgccatagggaacagttcgagtggatcgaattcaagacaaacgaaaacgcacaggtcaacacactcgcgggccgtacctcagtcatgagaggtttgccgcttgaggttataaccaatgggtaccagatctctcccgaagaagctaaacgagtaaagtttagcacgattgagaccacactgacccatagcagtccaatgagctacggaaggcctagggcttgaggcttgatgagcgcgtggtggaatagcgtttgaatctaaagttcggtttggtacgacttgtaatatgaaataataatgtacaaagaagttctacgcttaagggaactgttttgttttgagctttgtattaggacgtctagtgtacaacaacgaacgtcgtgtataagcgatcgttgactctgcacatgtaactctttcctgaataaaaaatctttaagtctttaatttctacatcttttaggattatataaacgttactatataaataaaaaagaaaaaaaaatcagttcactaacatgcgagactttgggctaaatatagtgattccaaagaaaatgagttataatattaattaatataaagctcattttctttggaatatcgttataagaatattttaacttggatataactgggcttacgccatttgcatctcgaggattttttgtttttgtttttgtttttttaatacattctcgcacttacacactaaaaatcataatgatcttcttaattctttagcggaaccaccaattaatctttttattaagaactttattacttatttcacttatttgtgcatacgtgcattattttggcagtaacaaatatcgcgttatatatactgaaatccggacgcattaataatagggatatgattatatgaaccactatctagctttggtagaaacccaattataatcaaataatttaccattattgaataaattaggctatataagttcattaatagatgctataggtttttcttacaaggcacacatttgattgttattttctttcatatacactgaatgtacatgtgtacacttggcatacatggcaagattatgtgttacaatatagactgtgccattgccatgcaatgtgactcctgtggccatttctatcacaatgtgtcaatcttggagtatccgttgtttatcctctaatttactgattaatttatgaacatgtataattatttatatcatatgatctcgtaagatatcttagcattttccaccatatgttattagtaaatcatctagatggattgatgtaaataggaaagttaaattaacacaccaaaaaagtaactgattaaaagcatacaacttaatattcagattatggtaactaaatcagtctcatgcaaactccaaaaaattatacgagtcacaactcttgatttttttccggttaaacaaaatacatattttcatttgtatgcaaccagaataaaacactaactatctcctttaaataccattttccctacgagtctacgacgctctctaaactttttatacagaacaaaacacacccaaatatgcataagcttgtgttatctcttctctacgtcgtctcactctcatttctcctcttcttccatggcgccgaggcacaccagcgagaggcgccg

SEQ ID NO: 27941 - DNA, 1998 bp, Arabidopsis thaliana landsberg
ataaggggatggtgaagaaagtcactgaatcttctttgtactcgtctcttttttgtaaaatgacattataacttggcggccaagcttaataagtgaatagtttcgttgtccgttttaattatgccttttgacaagtcttcgtacgtgaagttcaaggacttttgactctttatgtaaatcatttggaagaaagagtccacgcgattatatgaatccactgactgaatttatttctgggcttaagttgggccttaacaatccatttttttaatatttgttagcccaaaatacataatcaacccctggactctggagggattcacacatcaccgtcacttttctcagtagaaactaagctgttcaatttcaaaccaagatcaccaaatttgattccctttgctttacaagaactatagaagctaagcagcatgaagaaaagtgtgagaaggagatcatgagaattttcgtttccccgatatggctgttctatttgatgagacatgagcaacagataagccttgcttgtgtgcttcaaccattgaatacacctgcactccaaaatttgttccttttcaaccatcacatccaaggatagtcttttaatatgttgaagacgaaaaggaggtacctttctaacagctgatgtcagtcccaaggtagaaagaacatcactgctcacacacttccatgttagagtgtcctttgcctgacctttgaacagatcttcggttccgcctgtaacttcttgttagtttctctaactatatgtaaaaaagagacctagaaagaaagagatagatagtggtcaaacctgcaagttgtacaactaatagctccacataaacttttcgacgaatgtgagtgaatatgtggacgaattctccgagttcttctcttgaaactatagtgcatgctttcttgagttctacatgaaaatgaaatgcttccttaaggtagacgttgattgcgttcctccttgttgccgaatcagcttcctcatttaatataacagatgggaactcccaaagaccagcaagcagaccttgttcgggtctttttacaagaacaaatctacctcctgattggttcctctccagattatgtatctccaaaacacaaacgcaacaaaagtcgtgccttggcttggccttgattacttttgtaggataatctgtcacggaaatcgttctgttttcctcggaaagtgaaaatgcacgacattggctggaaacaggacaagaagagcaacttggctttgatacagtgcatagtgtagcaccaagctccatcagagattggttgaaatctccagggcgtgaaggatccactagctgagcagctagtttcctgacaaagataaatgatttctttatcctctcttttagtattgtctcaatagcgaaacattcgagcaaatacaaaagttatttcaccagaaattcctggccgtaagtcggtcttttggattagctgagatggcttttaatctagcaagcactcttatcacatttccatcaacaacaggtactgcctggttcataataagtgtcaaaagacgtaaagataattacttagatgtcttacattgatgactgaaaaaaatgaaactgacttcacctcattgaaagcaattgaggcaattgctccggctgtgtactgtcctattcctttaactttcatcaagctagacgcttgattagggaaaccctccgtccctgcaacaaccatctttgcaccctgtgagaatcaagacaagaagaaaagatcactatgatatttagtgaacgtatcaactaggatcaaaccccagattgcagaagagtatttacctctaaaagaaaacgtgcccgccgatagtatcccaaacctgcccacatttcgtttacctcctgcagcgcgaagaactcaatttgattagcagtaagaatcacttttttctcattccccctgaagaaaacaaatcccaatggtgtgcattaaaaatagagactaatagag

SEQ ID NO: 27942 - DNA, 2230 bp, Arabidopsis thaliana landsberg
  unsure (1)..(2230): unsure at all n locations
tgaaatcaatgagatgatagcaaagatggatgtgaatggagacggggccatggatatcgatgagtttggatcattgtatcaagaaatggtggaagagaaagaggaagaagaggacatgagagaagcctttagagtatttgatcagaatggtgatgggttcattacagatgaagagctgaggtcggtgcttgcgtcaatggggttgaagcaaggaagaacacttgaagattgcaagaagatgataagtaaggttgatgttgatggagatggtatggttaattttaaggagttcaaacaaatgatgagaggtggtggatttgctgctcttagctccaattaaacattccctttttttaacaataatttttgtatagatgattgaatgttttgaatttgcctaattaacactagttttctgctaaaataattgaatgttcaatgctaggacaaactatgatctaaggaggagcaatcttcggtatttttcgacaaatgcttatagatgaatcaagctcttgtttgtatttgacattcaagtttcttaacattctccacaatatctcgaactttaagtgacaattcttccgtataatgttcaacattatcgataaaagtcagggatcgatccggatacacatcgcataaccggtcctgacactcgatctcctccgtaagctctttaatcttcctttccttatcagcctacaaaaatagtaacacaaatctctctgcatcaatcatccaattcttgtaatatcaaagcaaaaagaccaaaaagatgcaaacttggaagacgtacaaaggaaaatcaagtaaccaagtcttgtaatagcaaattaagacccaaagatgcaaaaaaaaaaatgtaacataaacctcactttcttcaagcaaccaagtctttgtaatagcaaatcaagatgacccaaagatgcaatatatgaagacgtacaaaggaatttcaagtgtttgtaatggcaaatcaagtaaccaaatcttgcaatagcaaaacaagacacaaagctgcagaaacacagtaacacaaatctctctttttcaaccaccgaagtcttgtaatagcaaaacaagacccaaagaatcaaaatttgacgactcaaagatgcaaaaaacagtaacacaaatctcttttcatcaaccaaccaagtcatgtaatagcaaataaaaaagacccaaagatgcacactctttcttcaacacatcaagccttgtagtagcaaacaagaaccaaagatgcaaaaaacagtaacacaaatctgtcttcttcaaccaaccaagtcatgtaactagcaaagcaaatcaaaaagacacaaagatacaaactttgaaaacgtacaaaggaattaaaagaagaagacccaatgaattgaagagagtgattgtgttctttgatgaatctagtaacaacccatttcccagatttctccattttcaccaaaatcgtagctttgcaaccttctcgtgaactagaactagaactannnnnnnnnnnnnnnnnnnnnnnnnnnnnnngcttgttacaacctaatcttctcgctagtgttcttccatcaatacctgatcttcgtctctgcatcatacgcacaacaaaccctaatcttttggagtattctacatagaaatctttagcttcttcttctgattcgaatttcaaacctacgtaaggttcatcaagtttcagatctccggtcatcatcggaataagccagatccaactcacaaaacaaaaccctttatggatcgagttcgttaagtttcagatcaagctctgttaatccggtatgtttgattcaccacattaatccggttcaattttcctaaaacttaatccggttcgattttcctgaacattaaaccggtttaggttttactgtatcttacgaaccggtttaatgtatcttacgccctcctaatcatataccttaatccaaattttgtttttttcttcaatgtagatgtaactaaataactttattcactaaaaataaatttaaccctaaatttttttgtataatcttcagagtaaacagaaaatcatttgttatattatccaccctaattntcttaaatatcttctcttgtaacaaatctaagcaaaagctggtcacatggacatcgcatcacacagtgtcgcagtatacgttacttatataaagtggagaaatgcatagcaaaacaatacacgtgcgaacctttaatgacatttggtcac

SEQ ID NO: 27943 - DNA, 2317 bp, Arabidopsis thaliana landsberg
accggcgcaagagatatcagagactgaaaaagattgaaactttgggtcaaagaaatttaatgatgagaacaaagaaagaaattgaacaagggaagggagggagagtatcgtgttcacttctgggtccttcgtttgcaaccacggattagaatcctctacgtggttatcctctctccaaagcttcaccctttttttttttttttccttcaatctctttctctcactcagtcactaaaggtgaatcctttttgtttgtcaatcttcttcttcttcttcctgatttttcggtcggaacacacaaattcagctcaccagaattcttcgctatatttattttacatttaacaacttcttaatttttagtaaaatgtatattcttaatcttacttaccagggggcattttcacttttatttatatatttacttcaatttttctaatagaaaaaaagtaagcaaatattcatatgtacttttcagtttagtttttggctaaattaaaaaaaaataattctacttttaataataacaacttaacaacttaacttaacttaacttaacttgttctatttctaaaccaaaaaaaaatatactaagatgaaaagctttgaaaagatctgcatgcatccatgggagatcttattatatgatcaaaaccaaaatcctgcagaaattaaaaatccaacaaaaaaaaaaagaatttggaaacaattcgagaccagctagtaatggaaaactataatcaagaacattgtttgtaagaattcttaaatacggtagtagagagactagaataactagtaataaagacatcattggtccgcaggatctaagcaaataaaaagaatttctttttcactgtcttcaacgcagggactctctttctctctctttattcacacctcttgttaccttcaaaaccttctctcaatctcctccattatccttctctttttttttctccctgcaactggctccatcccaaagtgcttcgttctggtacagcgaccatggcagtttttgttcttgtgatgattttgttggccatggctggtcactcaagtaagtatatcttcgtctcttttcaaatccttctctgtctcatatagatcctcttcttttcttctatggcaaaacgattcttcttttctttgttcacccactctgttttacaacagaacaacatagtcacaaacttcttagctttcatagtttttaatgaaattttccacaaagaagggccatttttgcttttacccataccttcttttcatatttcctttttgactgtggagttcaacaatcttgtcccctcttgaattaaacattaaggtgttccatttcacacattatcagtgaatgagatttgaagaatgctcattgaagtgtttatgtgtgtctttaggtgggacatggtgtgtatgcaaagaagggttaagcaaggcaatgctgcagaagacattggactacgcatgtggtgcaggagctgattgtggacccattcaccagaccgggccttgctttaaccctaacaccgtcaagtctcactgctcctacgccgtcaacagcttctttcagaagaaaggtcagtctctgggcacttgtgactttgctggcacagccaccttctcagcctctgatcccagtgagtctctcctaccaacctcactacattagaattagtgcaaaaacaatttgttcatatttggtaacttaactaggtaaagttaaaagcagtagttgaaaaatggaacccaacttgaaagcaaatcagaaaggctagtttatattaatctaaacttcacatgtttcaatgtgaatgatatgataaataaagtatccattatcttattatatagtatcacaactcaagattctctacacagatttgaaactagattgtagaacatatcatttttattagtaactgttgtctcttgtaccattgtggtcttatgatataggctacactacttgtcctttccctgcaagtgccaggtacacacccttctttctttcttcacttcttatttgttgttttgcaaacaagaattggctttggtcttgaggatctttgcactctagatctttgtttaagctgattgatacaatctgagagatgtgtttgtatgtttgttgttatttaccatttaatgcagtggaagtgggacaacgactccagtgacgacaacaccttcgacaagagtccctacaacaactaatacaagaccctacacaatcacaccatcaacaggaggaggtttgggaataccgtctggtattaacccggattacacagatccatcctttggattcaaa

SEQ ID NO: 27944 - DNA, 2476 bp, Arabidopsis thaliana landsberg
ccatgataccagttatttttataagggtttgccatctcccataatttggaagtgtatgtaaaagtttcttaaacataaatataacatccaaagaaaagttgtaaacacttaacatcttgattgaaggggaatctcgctaataattgtgactgaacgatagtaagtattattgtaaaatatcgatcaaaatttcaacgatatgggcgaaccagacccaccactttgttgttccttagcagacgttaaccatgaccattattagttgaaaaaaacaccaaacaaaaaccccaacttccttttaattctttttaaattctaaatttcagactaacaaaaagtattcataagcttgttcatgtatgaatttaaatcacgaataataataacttgagccattaacattaaccaaaaaaaaaacttgaacaatctaatataattccctgtttctatttaaaagatggagatgggaaaacaagaattataaagaaacattgtaaaaatgaaacagagacaaatattttcaagcaagtcttgtttcatttcatttctgtttgaaaaatgacaagtttaaagtcatgtctcatatgtgtaatattattaactttaaaatataacaaaataaatatctttgattactttttgaaatgttttttatctcaagaatttggaaattttcgttgattgatacattataaaatctgaaaattagatgtgaaacacgactttttgtccaccaccaatcctcctagaaattatcagtttatcactcgattactgaatgaatgaatgagttatctctgaaaagttgtcgtaccatttattatcccacgcggatttactgccgtgagcatgacgttaccgttatctcaaattactaaaattgtcctttccgatggccgtctaaaggaactaactcgagggcattttgtcattttgagaaattgttatgagtttgagtacaaaacaaaaggacacgacgactttgtattatttgcttcaaatcctctgttcttcaccttccttgttccttcttctctccttcttttttatatagattttcctttcatgttgtaatacttttattctattagcgttcatattcagctaaacagacattttttccgcctttaagtcgaaaggatagaaagaaattaaagaaagaagaagcttgttgtctttgcttcttgaggctctcttcttgacttgatcatctcggtaccgttgttccacgaaaagaacagtagctttgcctttccatatagggttattatctgaaatgggtaattgcttagattcatcagctaaagtggatagtagcagccacagtcctcatgctaattctggtaattttcttttaaatctctctatacctctaaagtttcttcctttatccaaatttcgttgcttctgaagtttctgtttttggaaatttctccttattctttaagatggtgaagattcgacttttaggcttttgttctttttgtaacatgttcaaaatcaaacctttcgatatacccatttctgcttatgtctgatttctcttagtaattttggggttaaatgttggaacaagttggtgttttgaatctatatgttactccattatctcactatttgactgtttacaagattgagattgaaattcgaaatcaagttatgatcatgctttaagtctgattagtaatcaattttattgaatttttaagttagaaatcaatctgacatagatatctttatttggatctcttttagcttcattgagctcaagagtttctagcaagacaagtcgttccacagttccttcaagcttaagcataaattcttacagcagtgttgagtctttacctacaccaagaacagaaggagagattttgtcatcaccaaatcttaaagctttcacctttaacgagctcaagaacgctacgaggaactttcgacccgatagtcttttaggtgaaggaggttttggttatgtgtttaaagggtggattgatggaactactttaactgcttcaaaaccgggttctggaattgttgttgccgttaagaagcttaaaactgaaggttatcaaggtcataaggagtggttggtacgctcttttgttcctttcttctcttattgattttgatcatgaattgtgttatctaacatagtttttgtatttgtttggttttagactgaagtgaactatcttggtcagcttagtcacccaaatctcgtcaaactagttgggtattgtgtagagggagaaaaccggttactggtatacgagttcatgccaaaaggaagcttggagaatcatctttttagacgtatgtaaaacctgtgattatcaaagcaatccttttcagaatcagcacatcttatcttcttctttatacttgttttgtaatccttgtcaaatgcttttttgatcttccaggtggcgctcagccacttacgtgggctataaggatgaaagttgcaatagga

SEQ ID NO: 27945 - DNA, 1732 bp, Arabidopsis thaliana landsberg
gagttggttgccgaaatccggcgacgaaatcaaagctgctgtatgtttctgtcatggctatggaagcacttgcactttcttcttcgatggttcgttagatttatctctacttgcatcatttagttgaaaggctcttcttttaatatatgtgggaaaaaaattgggttgttttacaggtatagcaaagcaaatagcaggttttggttatggggtttatgctatagaccatcctggttttggtttatcagatggtttacatggtcacattccaagttttgatgacttagcagacaatgctattgaacagttcaccaaaatgaaaggtatatctaaattgtacctgttattgctttttggtgttgaatcttgcttttgggttttatttaagtggtttgattcctagggagatcggaattgagaaatttgccccggtttttgctgggacagtcaatgggaggagcagttgccttaaaaattcatcttaaagaacctcaagcttgggatggtcttatccttgtcgctccaatgtgtaaggtaagtctctaactatatcattttctatgcatgtaattgaggtctggagatttgtttctcaaatctgcaaataagattttcagtgcttggaagtatctgtattcacattttacatctagttagttcatgtttgaaatacctgaccttgggttgtctcaagatttcagaagatgtaaaacctcctccactagtcttgaagacgttaatcttgatgtcgacactatttcccaaagcaaagctctttccaaagagagacttgagcgacttcttcttcagggacctgagtaaaagaaaattggtactttctcttagtttttcaatggtacattttctgaagcatttttgctaactttgtctttgatgtttttgttctctgtggataaagtgtgagtacgatgtgatatgctacgatgatcaaacacgtctcaaaactgctgttgaacttctaaatgcaacaagagacattgagatgcaagttgacaaggttagttgtagaaccaaagaaataaaggaaagctcttctcatcatagacaggggcaaaaaatgagatctttcttttctatgttgcaggtctcgttgccactgttgatacttcatggagacactgataaagtcacagatcccactgtgagtaaattccttcacaaacatgcagtcagccaagacaagactctaaaactctatccaggtggctaccattgcattctagaaggtgatacagacgaaaatattttcactgtaatcaatgacatcgttgcttggctcgatgcccgcgttgatcccaagtaaagtgagatcatctctccacaaacctatacttattattgtcttctgaatactgtcgagtctctgtgattaaacatccggataagaagaaaaaatagatatgtggcttacaatgaatacacaaccttagccgttgtttgcttagctagtgcttctagtgctacatcagccgcatctttcgaagtgtagttagtattgtttgggtgcacataagtcaggctcagaatcaaattgatgactgatctcatttgaaccatattgctctgacagatccttgaaatcttgtgttctattctgagtgtattttgtcaatggacaggcccggtctaaagcacagacagaggaaaccgtacatatgaaaaagtgcatagcaggagctccgaaaaactctgtgaacaccaagtaattact

SEQ ID NO: 27946 - DNA, 548 bp, Arabidopsis thaliana landsberg
ggctgcgaccacccaacacaggagccatttttgataataaagaaagagttgctatggaattgaagtgttcagatagtgttacctggggagggcgaaaagcgggcaagttcatatcagggccgagtcgagtagtcatttcctgcaaatggatgcaacgttagaatcacaacattatactttgaattcaaagacgacacgtgatgagatagacgaattacctgaaaataagaagccatatattgcgtcagctgtccaacctgctcctgcgctgctcgagcctgctcctgtgctgctcgagcctactcctgtgctgctcgagtctcctcctccagctgagcctctcgagcagacctggaggagcgagaactccctctcgaagaagatgccttcccttgacctattgtcctgttatactccacaacgccagtgccaaaggcaaacctgcatgatacacatagttgagccattaagtggacacattcttgttaatgaaatcgtcgaatcaaacacaaacacctcacctgccatgctttctacccccaccactg

SEQ ID NO: 27947 - DNA, 1197 bp, Arabidopsis thaliana landsberg
ctatctgacagcaatataaagtgttgattatcaggttcaacgagagcatgagctaatagccttctttgtgcatgaaccattgatatctgaccccaagcaaccttcacaagattaacataataaagctacatgtaggaatgactactaatcaaaatttctgcataaaaccgactgaatggtgtaaccaaactcatttaccttgtgactgtgaatatctcgaccaacaaaatagctgcttgtatgtacaggacttttctttgaggcatgcacataaactgaaaatttgttctcatgaccctgaatcaacaaaaaggaaccatcactatttcgtcaagaaatacatttgacaaaaaagtcacatctctaagaaactccaactgattaaaggacattgtaatgagaaatccttacacggaaaaacatttcccagagaggctcaaaaggcagcgtccctggagttaagaacatgaaagctaacttgggatttgctgtcttagattgaggtaggttcatgatttcattcatgacaacttgagcagcagcttcagagtcagtcaattcccgagtaggtacaaacaaaaactgctggtataaaggacatccaggaccagaaaacatatagcaagccacagaattccgcggaggatatatgaatgcggtaatgacaacaaccgtaaccagaacaaccaaagtgataatccatctcgggcccttaaaaggaggcctttgacgagactctgacataaccgcaatatttcttaagctactactggatgaagtatcaaatccatcttatagtctgctttaacatctcactctttagaatcactgaacagaagtaagagaagaaacattaaccagtgagaccttgtatacagatattccaagagaatacgagattcaaaaacagaaccaccaaatatcatttgaaccacatccaaatgactcaattcctaaaatggggaaaacaaaattcaattttcgatgcgcgtggcaaagatcatcactgtcgtcgtcgtcaaaatgaccgtagtcaagatataatcataatcgagctcaatgaaacatgattttatccgaaacagaaaggaaagagcgcagaaaatggattcggagagtaaggccgcggacgaacattaaaagatctagccatcaaaaacatcagtggcgcagagttgccgaaattggccgccacgg

SEQ ID NO: 27948 - DNA, 1531 bp, Arabidopsis thaliana landsberg
agaggatgctcccggcattgtcagagacagcaaaacatgtgtgatatgttcttctttgaatttgctaaggtgtttatcttcttggttgggattaaaaacatgtccctcttttgtgagatatatagagttcgttaatcgtcgttattattataataattagtctaagagataatttctggtgttttgcttgacactttaggtggccaaaaatgagagttgcaaaagaaggcagagctatagttcacggcttgctctcttttttggggtcaaagatttagacttaagagttcacaacgtgtttccccactcgaacactagtcgacttcttcgctgactaaatctttacaaaacgagtaaggtctgacttctttatttccttttggtttttagagtaaagagctgacttcttcttctttgcctcggccaacctatctagggaccgtttcatcatgttagaatttcaagaacgattttagatccatagacggattgatttagatggtctataaagaacttaatcaagagaaagtaggactatccgagaaattaacttggcgttttgaactagtacgttaatttttttcaatccaaaattaattgttttcatatttaataaaaatcgatttattctttttttttttttctaaaatcattctctaatattaaagttaaagtgttaaagttatacaagactacataacgaaaattatcagatatgtgagccatcttctgaaaaaaatatgaagaaataacgatgcgttttggtcgaaaacgccttattcgctaatgacaacacatattcgtgatatttcttcgactttttgctccagtatgactcttttgcctttttttcttgaggttgtttcataatcgtattagtaaaacccattacgcctgatattagtcttggaagcacgactatctgattagtccgcatcaatgtccttgaaactatcataaaccttaacctgacttcaatataaaccagtagcactatcttctccacaaaatcaacattgccaattctcctcctgaacatttctataaaaatatggtcatcttctttcatccatgcaaagagaaccagagaatacttgaatttgggaccaaacattattagtaagtcctctttgcatgttcgagtggaacatgcatggatgaaatatgacctctggctcgttttttaagtggaaactatcgagtattaatttatagagatttagtatagaaaaatctatttatattctattgtaaaaataatttgagataagtggaaaataatcatttttcaaacataattggaaaattagtcatttttttcaaatataatttagaaattagttatattactattcacaatttgtaaaatgatcacttttgagtgtttgatttgtacacctgaattgcaaagtgactatgttgccaagaaaccctaataataattaaaattttcttaaagtatttgttcactatatatataactgtccctccatagaccatgtttaattcttccacccttttgcaagttctc

SEQ ID NO: 27949 - DNA, 1027 bp, Arabidopsis thaliana landsberg
cacgagttggaaacttgacagtcatttgatcaaaagcaagagactgttcaagaagagaagaactatcttacttatggcaacatgagcagctggttctcggggatagtttttggcttctgtgtatatacagcccagagcgatactgcaatgttgtatgcagaccaaaatcaagttcttgagttcaggatacaaagataatcacaaaactacaatagaatttgattgttgcaaaaaaataagaaaaaactagaatttcacttcacacacctttgtagcccactatctatgagaagttccagacaagatctatagcagtgacttagagcattctcagcagctgtatgatactttactgcatacttgggtcctactgtatggataaccctcctgaacaaaagacaaacaaaaaacacatttttttgagttggggactaaggcacaaatctatttcacagtccatattaaagtcgcacagaatgtttggtattttgagaaatgagaagttcctcagaaatcataggatgtagtactcacacagcattaaaaaactgtacatagtcaacaatggagaagctctatcatatggacaaggatagttgatagatagagcagagactagattcaaggagcacaatttctttctttttcagtcctctaataagtaaagaatttattttaaaccgtcttctccatcaccaattacctcgctggtagatcataggcatttgttactttcgccatccctgtcctgcatccaccctgccaagaaacaaagaataagcgaaaaatcctctttcacgcaacaatagaagacaatacataatataatgtttttttcaatagtatatataaaaatcttgttttagaaattagcgaaagaaagtgtttataccaatgtagcacattgctctgcaaggccaggtccagcagccacatgtagaccaggactgctatgtgcctatccaagttctgtcctccataccaagaaatttaaccatatcatcagacgcacattaagagaactact

SEQ ID NO: 27950 - DNA, 2095 bp, Arabidopsis thaliana landsberg
cagtactatcggaaatcgatcagctgtagcatcaccaacagaacctaacataattgaagacacaagaatcttcagtacacaaaaaaaactgtttcataaataagacccttgaggtcctaattcgatgaatgttatttacagtttcggtttattcggtaagagaaaacgaagtaagatgaatatttacagcaggtgttgctgctcgcttggtaagaggaaagagtttagctccattgcctcctcctagaatgattgcagccacattttgcgggtctacctttcttctctcaaacatggaagtctttactgtctgaaaagacaaagcaaacagaatcaagaactctggacttttccaggaatcgattaagcagtcttcttgaggcaagtcttaagaattttgtctaatgccatttaagagaaaagagtaaactgatcaacataccatagccttttttggattatctgaagtggcaacagcgtaaacaacaccgtgcttgaacttttgattcctaaacttcttggagcccaaatctgatccaaaacgtttacacaaaccattgttgttgttcttctcaccataaaatctgttctctacattcctgaaactgagttttggcaaaatagaactacttgtccccaaggcaaaggagtaagaagaatccatctttttagctgcaaaacacacaaaaatgaaacaacagaaacctcggaaagttaatagcagatacgatttgctgagaagaataataaaagcttcaagtaaagtgaataacacacaaagcgtttcagttactatttacttaataatataatcaaatttagtaatagaataatccaaacccattgttcaaatctaagcaaagtgttaaagtgaaaccgaccagaaaaattctgaaaaaaaatctaaaagacatttcttgagagtacccaatagataaatcctcgaaagctacgaactttccacaaacccagatggttcacaaacacagatccctgaaattctcaaaacacaaaactctttgaagtttcaaaatactctaaagctcaaaattactatgaagcttgaatttgaacattaatggttttatgagtaccaggctttaaggatcattatactatgaagcttcaatttttcatcatgaaactaaaagaacatatcctaaagattaactttttttctagtgcacattggttaaaaactaaacccagagaagcaaaatcgataatgggaatgaaaaaacctcaaaagatagaaactttttacatgttgagaagctaacaacaacgatccagatagaagaagaagaagatctacggatttgaatccgaaatttaaacagaaacttaagaaacaaccaaaaaccattataaacagcattgttagcagagtatataaactcaccagaaagtttaacacttttttctgattatgattatgataaaaatgtttgttgatcgtttgaaatcgaagactgaatcagtgaagtgcgtagttgacggaggaagctgttactttttctggttttgtcctgtgatcgccccacgagaaagtatacttttttgttgatgaataaatttgaatatttttttttattttaagagaaaaaatattgagaagatcatagtgatgtgactatgtgagtcatgtgactgttacacaaaacggacggctctggtttctcccatactctttctctactgctacacggacacgtttaacccctcagcccatattcatctaacacacgttctcttgtgtttaaaacaataagaatagaaccaaatgctttcatttgaaaatcttctacggacagggtcagggttgcctagaagggtacaagaacaaatatctaaaacacctatcatgtgcaatgtcaagtgtgtgaaagtgacgtgatttgtaaccatttgtatgactcaaaagtagtgaaccttgattgaggcttaatcttattaatgggattgttttctgtcgttgttgaactagttctacagccgcacaataggcatataactcattttggtggatttctccagctttaaactcgaatttcttacaccaaagttgattgcccacctcattgatctaaacata

SEQ ID NO: 27951 - DNA, 1359 bp, Arabidopsis thaliana landsberg
taagtgcactttatttttagactgggaactctttaccatagcaaaaactttatcgtttcagtggttacaaatcacataacataaataaaattaatggttgtaaaaacggtatcactaattatctcttatctaatttgctacctatcaatgattttattcaatatcgaatcctgccaaattgtctaaaccttaaacataagtatatagattggaccctaaaaacaaccaaaaatatattttgaacgaaaagttaaatataaatctgaaaaatacgaagcagatacaacaaaccaaaaaatggaaccaaaatatataaatcaaaataagtataaattttataataattattattttttacaatctgaaaaagattaagaaacaaggcaacaccgcgcgagcatcaaagacaatcaactcaccagctcgacccgctaccgaatccgacccgaattcacctttcttcgcaacccgacccgcaatcactctacaaatcaacatcgctctcctccctcctccgccgccagtgctcgcgtgcgcttctccgctaccggaaaacgtacaaaccgccgctcctttccctccgggaaaaccccacgcgccgccgtttatccctcccggaatcggacccaacggaaaaaacctcatcatctcattcccatcagcggagcaccgcgcgttttcatcacacgcgccgccgtcaactctatcagaatcaactttcgaacacgatcgcgatttcacagcttctctatattcctcaaaccgggtcacagcttttgacccgttttcaactttaaaaatcatttcaacccgacccggaaactcatcggagctccaactagattggaatataatctccacgacgtttcttgacggatgaccatcaggaagatcggtcaatacgggcaatacagattccgaggaagctcgagctgatacacttcgtcgggtcgggtgatgagaattggagtctaattcgggtcgacgagaagagcataaacgtcttaaactcgggtccggttttgggtttttcttaacggttccgggttgtgtattgacaacgtctctaacgttttttctgcagctgtaacttggcaataagagtttacctttgttggagtgatgatgatagacatcgtcgaatgcttttgatttgcaatgtaaggatttgacccacccgatcggcatatttcgggttgtgttttgatttgaaaccggatccgggttgtgtcttttgaaatttgaagtttgtgatatgtttagagatttgtgggggctttgaagtttttggtgtatgtatgtaatgtacccatgaagtatgaacattgtcccgccgtcttagaatggacgttttatcgg

SEQ ID NO: 27952 - DNA, 5634 bp, Arabidopsis thaliana landsberg
tgtagtatttttttaggtgcattgcgttcaaggatggtggaacgggtttgccgcttaagtcggcaagttcatatactctgggtcggacgaacttagagatcaagaacggtccttccagattcgcccctagcttcccagcgttcggttcgacggtgttttggaagacttttcggagaactcggtccccttcgtgaaaattcactatcggacgttcgaattgtaataccgagccatttcattctgataattttgtattcacaccaagggtgaatctcttcgttcattgattagatcgagttcgtcgagtaaccttcgagtattatctggttcgtgctcaggagataggcttcgcagcaggctcggtaccgtcatttcggctggaattacacattccgttccgtaaactaaggcgaatggggtttctcccgtggctcgacgcggcgtcgttagatgcgaccatagaacaccgtcgagttcgtcggaccacgagccctttttagcggcgagacgtttcttcaaaccatcgaggattgttttgtttgcggccttggcttggccgtttccttggggatatcgcggtgttgatttgcgaagtcaaattccccatttatcgcagaagccttggaagtgggttgatataaattgtgagccgttatctataacaatctcgtaaggtatcccgtggccacataagatatgtttccacacgaagctctcgacttgagtgtccttgatgctggcataagattcggcctctatcgacttagagaaataattggttaagacgagaactaactttttctgcttcgaggcatgcataggtctgattatgtccatcgaccaacacatgaatggatatggcgaggcgattgatgactagagctcggtcggctgatggattgttggcgcatgcctttgacatttttcgcatcgttttgaaaaatttttgcagtctttgatcattgtcggccagaaaaatccttggcgttttattttaatggctaaagcccttcccccggaatgattttcgcacgagccaccgtgaatttccttcatgatcttgcaaatcgctactccttccacgcatgtcatcaagggcccggataatcgccacttgtaaagttttgcatctactagaacgaaacgtgcagcctgagctttaaatttccgagctttccatttgtccgagggcaatttcccttcggatatgtagcttatgatgggttccatccattctgagttgcagtcatctgggtcgtcttgatccgcgctgatttgtattgggaggacgtgttcttctttgccgagctcaatacttggcttctcaatgaattccaccgggataactcttttcaggctcaggtcagatgtcgaggctagagcagccagggcattagccgatgtattttctcctcgtggaatccttgtcaactcgaattcatcgaaattcttcgctagattttgaacatgaatcaggtaggcttccatcttttcgtcccgagctgtgtattctccgttgaattgattcgcgacgagctgggagtcgcaaaaagctcggatttttcctatctttagtccccgagctagattaagtccggcaacgagcgcttcttactcggccacattgttggtagcctcgaagtttaatctaaatgactgctcgaggacctctcctcttggcgaggtgaggtggatgcccacacccgagccttgctttgatgacgagccgtctacgtgcagtagccaagttgtgtcgagtggattttcctgggcctccttagtgggcagttcaacgataaaatcagctaggacctgggattttgcacatgttttgttccgatattcgatgtcctattcgatgagctcgattgcccatttagccaggcttcctgattggcttggactgtgtaagatggcgtggagtggcatggatccctttactatgatggaatgggattgaaagtagggtcgcagcttctgagccgacattatgactgctaaagcaagtttctccatttgcggatagcgagattccgcgccggtgaaagtctgcgagacgtaaaaaatcttcttctgttcggctctgtcttctcggactaacactccgctgactgcagtatctgataccggaatatacaaatacaatggctctccgattacgggtttggcgaggatgggcggagccgctaggcactttatgagttcttgaaaagcttcttcacatcggatcgtccactagaactttttgtttccccgtagcacatcgtaaaaggctaagcatttgtctgttgatcaagagatgaaacggttgagggccgcacctctcgcttgttttgaggcgatgccattcccaacaatgcctcgatttgctttggattcgcctcgatgccgcggtgggtgaccaggtactcgaggaactcgccggatcttacatcaaagcgacactttgtggggttaagtttgacgttgtataagtttagttgtttgaaacattcgcgcaggtgggctatgtggtcttcccgatctgtaaggcgaaaattttgttaacgaagcgttgataggtcgccccggcgttcttgagtccgaagggcatcactcgatagcaaaaaattccttgctctgtgtaaaaagcggttttttcttgatcttcggggttcatcataatctggttgtaaccagcaaaagcatccatgaacgacagtagcttgtttccagaagttgattctacgaggcgatcgatgtgtggtaatgggaaactatcctttgggcaagctttgtttaagtccgtgaaatctacgcagactctccatttgccgtttttcttttttaccacgactgggtttgcgatctagtcggggtacttcgcctcggtgatggatctgatcttcaataatttttctacctcggcctttacggcttctgctcgttcccgacccaattttgtcctcttctgcttgatgggtttaaaagttggatcgatgttgagctcgtgtgatacgatgttaacacttactccgggcaaatcctctggggaccacgcgaaagtattgacgttctctttgaggaaagcggtgagttcagctgttagttcttctcctagatctccgccgatttctacgcatcgctcgggctttgcatcgtcaaggcaaattgagatgaccggatcgggagttggtatcttagattcccgagcttcttcgttctttaattgctataactgctcggagatcgacttttctttggctcggccaagtttggccttcttatgattcgcgtcggccgtcgattcagtgacggggttcctaagcttgtgcgctgccatgaagcagatgcgagcatttttctggtttccctagatggttttcacgccgtcgtttgtgggaaattttaggcataggtgatacgtcgaggcgacagctcggaactgatttagccatggggtgccgaaaatcgcgttgtacacggttggttggtcggtaatagaaaaatcgacgatttttgttactcctttggctcggactggtagtttgatggttccgagagtcatagtggtttcacctgagaacccgagcacaggtcgtggagttggcacgatttgcgtcatatcgatcttcatttctcgcagagttgtaaggaaaatgatgtccagtgtgcttcccgtgtcgactaggactcgttcgacgttgaaatcaccgatggttaatgtaatgactaagggatcgttgtgtggacggtctaaaccgttggtatcgctttcgtgaaaggttacttcgtcatttgatccattaaatggccgcgtccagttacgatttgcgtcggctttcctttggtatgccttgattgatgctaccgtgtcttgacagaaagccgaatcccctaaaattgtgaagatccttccccgagcagcttctggttcatcgtcgtctgtttcgcgattaccccggcttcttttaggtccttcggggttcgccgcgagggcggtctgctcgggattggccacagcattgacctgctcggttttacctttttctgcctctaaatctttgtgggatacataatccgaggctcggtgcagggcgtctcggattgtcagtagtttggacaagtttagttcctttttaaattcagatttgtaccatagtgctttcttcagagccgagagagccgccacgtcgttgattccttctactttggctagggtggatcagaattttgcgaggaaatctcgaagtggctcattaggctgctgagatagtgaccatagatcggcgtctgatgtgccgggatcgattagcaccgaatactgctttaggaaaagtgtcgatagctcctgaaaactattcacagagttcccttcgagtctcgagaaccaatgcagggctggccctttcaagtgctcgacgaacaggtgacagatgccggcatctctttcttctggtctgaatttggctcgggccacagagatgatgaatgacttcaagtgtcctttcgggtcggaagatccgttgaagtactcgattcttagttttcctggatctgagattatcgcgttggagatcctgtgtgtgaacggtgtgttgtgggactcttccagaatgcggtcgatgttcggggccgaggagactgcgttatgcatttgggatcttaagagcttcatctcgttctctgccttggctagggagagcttgatggcgcttatttcctgttctctggcgtattcctcagcccacctaatgttctcttccgaatcttcatcgtccgagaccccgatctgatcggcctcggcaacctctgctcggggaggagggagctgtggttcgtttctatctgttcgattcgtttcccgatttcccaaaatcgttggctcggttcggtctcttccgatttccggtgcggttctgcggatgggccttgtagtattgtcaggtgtgtgaatacgagtcgtgtggggttgagatctgctgctgctcgtcgatcgtgaagatgcctcgcgccgaaacgagtaatcctgatctgtccttgggaggtagctgcttcgagttgttgcgccaaggattgatttgcctgttcttgatcgttcaccttctgttgaagttgagccatcatacttctcagttccgctagggtcacgagagcagcggcttcaggaacgtttgtctggatcggagggattgggttcccctctacatcaactgtgttaccggggatttgattattgaccaccgtgaattgggtggttggttctgtgttccgggagtaagagaaatctctcccctccttctagcgccaaattgtgagagtcgaaacttgcacaatagaatttattttaagggtttcttcaaagaacgaatctttgtgagattctcaaagaacaacagaattctcaattaccactgacggtgttctttattgtattaatgagaaagtatcgatttgatcgtacaaatgttctagagtatgaaaataagtgtttttgcctttaaaatcagagcgtttttgatagcctgaagttgagagcgtttttgtttgtgtcattttgttttccttcgaggtgctttttatagagctcgaaaatatcgcctctcgcgatattctcggaagatttccgtttatctttaagttgtgaaagtagat

SEQ ID NO: 27953 - DNA, 1332 bp, Arabidopsis thaliana landsberg
  unsure (1)..(1332): unsure at all n locations
tgcacacgaaacagagacaaaccaaaacgtgtgaccatctaacggctgtgcttggtgagcatggtgtgagttgtgagcttgaactagctgggcctgagttagagagtgtgcaacgattctcttcacttccacctttggctgctgatgagctgtttggcccagatgggtttgatattagcggctctagctctaacaaagcggttcttaccgttgataatcagttgagccctgcacatacgttgcttcagattcgttgtgttgatcaaaagggacttttctatgatatcctcaggacttcnnnnnnnnnnnnnnnnnacgtacgttaaaactgatctctctaacattaagagaacctaaccttacctctgctaagagaagttgggacttctatggttgaaagatttgtataactcaagtagttcttgtttctttatccagattgcatacggtaggttctcctccaaggttaaaggttataggaatttggagttgtttgttagaggcacagacgggaataaaatattggacccaaaacatcaagccaacttctgtgctcgacttaaggaggaaatggtgtgtcctttgcgagtgattatcgtgaaccgaggaccagatactgagctattagtagccaaccctgtggaactatccggaaaaggaagaccacgagttttctacgatgtcacacttgcgttgaaatcactaggaatctgcatcttctccgtaagtactgtataataatacattgtgttctctaagctttttgaacggttattttcggtttgttttaagattggcattgcgttttcttgtaggctgagattgggagacattcgactttagatcgacaatgggaagtttatagatttcttttggatgagagtcgtgaattcccattggctagcctccgtgcgagaaatcaagtagtagatagagtcacaaagacacttatgggttggtgaagcggatgagagtgagctttcatgaacgttatgctacactcaaggggacaaagaaacaaagtcttcttcgcttgcggcttcgggtcgatgaaaagagtgatgcaagggggttgtgattgctgttgtgtggagctaatagcgttgtaaagctttggaaattgtaaaaggattatataaccgcaattgcaatgaatgcttgtaaactcactttgcaaaggtaacatttccgttgactaggtggtcactacaagagagcgacagagttgacccgagccagaatcgcaaacatgttacatttagccatgtagtggcctttgggggacaatatggtaattagacaaattgtatcgaaaaataaatagagtgttgc

SEQ ID NO: 27954 - DNA, 1588 bp, Arabidopsis thaliana landsberg
ctaccacacggactatacttttcattacacgatttaaggtaaatttacatattagaaatttagaatgggataagaaataagaagttaaagttgagattcatattaaaaagaaagaaaaaaatgatgaaaacgacgacccaatttgaatttgtaggtccaaaagtttattacttgtgtcgggtacccatggatatagatggatgcttgattacccttggcttctcccaaccaattgggccaattttgattcaattttcatcagttgatactatagtgaaacttctggttctataaattactagtattagataaacatctcacatatttctttaaaatcaattattttattaaatatatcacgaaatggaatactaataactaaaaaatcaagccatttacttacatttgttgtatatgctttttttttttccttcaaccccattttacaggaaagtgtatataataaaatgattataaaaccacttaggtgaaaagattattgttaatgtccataggtgaagatgttttgttcaacacaatctcgaactcacttgtctcattgtctccttctccctcttcttcttcatcgtattcatcttcttcactctctccttcttcttcatcttctttatcaccaactttttccctctgatcagtctcaaactcggtctgggtttcttgcgagagaagcaactgtctctgtggagtcaccattagaggcaatggcaatggcattgccccacttttgttcctctcgttgtacaaagcttcgagctggtgaaaataagggcaagtcttggaatcaaggggacgtttcttgttgctttctttgactttcttaaagtacttgttgatgttttcccacttctctttgcagcgtttcgcgcttctattgtatcccaatcttctcatccctgcagagatctcttcccataatggtcccttagtaccgttttcttgatagttagcttcaagattctttcttatccttatcaaggcctcgacctcggttttaggccatcttgaagaactaggagacaccgaatgattgttatcgtaattccccatctttattgttgtatccaatagaaccgccctcggctctttactctcaaacgttattgaatgatcgctttgatattgtttcctttgtgatggtttatgattatgttgttgcgggtgttgtggttgacctcctgagattttgtgcaagaaggatatgattgcaacgtctttagctgctgcattggacctctcatggattaatgactcgtgggctctgctgattctccctatctgttggacccttcaggcttcttctcttgagattctctctttctgacgatacttcagtgtgtacaagaaccttttttgcatctactcttggatgtccattaactgttttggcaactgtcgtaaacaaccctttccaatactgcctcttgtttctcgagctcttaacctgatgatgatcttgttcctcgtctgatgcagtacatgaacaagttgagctccagaaaagattcagcgatgaaacattgctcatgatgtcctttgaaattggcggctggctaacagtaggtgtatt

SEQ ID NO: 27955 - DNA, 1678 bp, Arabidopsis thaliana landsberg
tgtttcgttttttctcttaaagaatgtttgtcctgctccaaaaattttgaaaacacacagggaatattttttgttatagccggatggttagtatacctatgtcgtatctatatgggaagaggtttgttggtccaattacacctcttattttactcttgcgcgaagaactttacttggaaccttatgaagaaatcaattggaaaaaaagtcgacgtctatatgcaaaagtatgtagtgcttgactactttcaatcttgaaatttgttttttcttggaagaaaactccacaaacattctgccattccttatgcaggaagacatgtattatgctcatcctttggttcaagatttgttatctgacactcttcaaaactttgtggagcctttacttacacgttggccattgaacaagcttgtgagggaaaaagctcttcagcttactatgaaacacatacactatgaagacgaaaatagccgttatattaccattggatgtgttgaaaaggtaaaacgaatacagtccttatgcagaaaggctggagtactcagaatttatctttgaattaactaaaacttcagattctttttgaaggcattatgcatgcttgcgtgttgggttgaagaccctaacggaattcatttcaaaaagcatcttttgaggatttctgattacttgtggattgcagaagatgggatgaaaatgcaggtgtcaatgaaaattcggaatctatttgttatgtcacttaatggaaaatttcgtgtggcataaaaatttatgagtcatgtattttgcagagctttggaagtcaattatgggattcggggtttgccctccaagcgttagttgcaagtaatctcgtgaacgaaatcccagatgtactcaggagaggatatgactttttgaaaaattctcaggttcgatatcctctgcagtattattatttgtgactttaaattattagagaaagtaaagatgtcttacggagctgagagttcttaaggttagagagaacccttcgggtgactttacaaacatgtaccgtcacatatccaaagggtcgtggactttctctgatcgagatcatggatggcaagcttccgactgcacagccgaaagtttcaaggtgattagtcagaattcgattactataataagctggtcagctttccacctaattagcacacttatcttggtttgtagtgttgcctgttgctttcaatgataccacctgacattgttggcccgaaaatggatcccgaacagttatatgaggctgttactatcttactgtctctacaggtgacctttataccatatatagaacgcacttgctcaactttttgttataagaaatgtctgttcacttgctctggctgcagagtaaaaatggaggtgtaactgcttgggagcctgcccgtggacaagaatggttggaagtaagaaagaaatcccatcaagatatttgtatcacaacgtttatgaggcatgtgaaagaaattctcagaaacatcttgttacttttttcccatgtttcagttgctaaaccctactgaagtttttgctgacattgtggttgagcacgagtacaatgagtgtacttcatcagcgatccaagctttgattcttttcaaacaaaaatatccgaatcacaggacagaagagatcaacacttccgtc

SEQ ID NO: 27956 - DNA, 1547 bp, Arabidopsis thaliana landsberg
agagactatagagtaaaggttatagtctacaatatcttaaattgcagtaagaacaaataaacggtcattgaaaattatgacattttaagaactggagtattaaggatttaaagattatattttgtaacaaaacaaaacggagaaaaaagaagagaacaaaaaggtttttatttttatttattgctcaggaatagaaaccaggactggtcgccatggttttcttaaaatccttaaccgaaatgattgaaccgaaccagatgaaccgaatcgacgagccgttaactctttgacgtcaccgtttgaagtgacgtttaacggcgaaatctcgcttttttcttctccatttccgtctatatcttctctgcctttgtacgggggcgacggcgatgtgaccaggagctctttcaattgtcgtctggttgcacggtggtttcccctcttcttattcccggaatttccatctgattccggagattcctcaaggatctgacggagattccgtctgcgacagtcggagctcttatcgaacaacatccgcagggttttgcgtcgtcgaagattgaatacagggctcttcgtcggactcatcgtgggactccccgcggtggacgcttccaagctacgatgtgccgcgaagagcttgaatttgtgtagacgggagagtgacatcgtgagatcgatacgatcgcgaattcgccgtctgatcgctctttcttcttcacttttttctgtttctttctttttctgtcacatttatagaagatgcgagaatttagcaacttagtaacggcgaagtattcatagtaataatcattttagcgtgattcaaatatagatttatgtatttaaccttaccaaattgcaattaaaaagatgcgccataacgaagaaaatgttaggaagcacctgacacgtgtatataagccataatctccaccggactagtctaattgcatgtttacgaggccccctctcaatttgtcatttagcctaaccacgcgtgcgaggcccacatatacacgagaaagcccaaaatatgtggacaataataattgagccattttgattttgacataacgcgcttttattagtctgcatgattcttgtcacaacttggtaaaattgaataattctagtctcatcgaatatgtctgaacaaaattaaccaatacatatatatatatatatgggagaattcaagtcgcaacattttatattcttgtgcttcacaatacttgagaatgaataacacttcattacgtaaatgagattatttatagacagatcacctaaggggaaatgacaaatgagatggaccaaaattacccttagctccagctactaaaaaattctgaatggatcttcttcctaagtacaaaaaacaaaatagctaaaagagagataaaaataaagcaagccaaataacaaaagaacatgattttatttctgtgtatttagaatatatgcagtagatgtattaaatgaataaaaacctggtctatatttagtgattttgtggctgtgtctcatcttgggtcttggcttta

SEQ ID NO: 27957 - DNA, 2404 bp, Arabidopsis thaliana landsberg
tttgttttctctcatttctcgttcctattgtagaaaaaattccttattcttttttcttttcttttgttggcccacgtcaattataaccgcattagaaaaggttagcacatgttcatttgcacagaatgtagtcaatgtacaattcatctataatttatcacctttttgttaaaaatatttatagccatgttatatatattttatcatgttgtgttttaaactctagatttgttctttcacagtttatgggatttatcatttcatatatttcctcctatatatgagtaagatgtcatttttaaattcttaattaagaatttagaaatcaagtttattattttgttaaaatttataaattacgtatttttcctttattagtgagattaagatataaagagtctagcacactagagaaatgaaaacatacatatatctagaaagggtttataagaaattagtaaatggaatcagaacatgaaggagaagggaggggccaccataccgacgggaatgagaagtatgggacggacaagaaatcaagtgtacacacatgaaaaaacccaccacgtgaagatctcctattggtgtgtcttctcctaagtactaagtataaaccaaagtcaaaacacaacaaagacatattgcttgcgagccagcgagtgtgtccgagtgagaagagagtttgggacttcactgtttagagagcctcattcgctacctagattcggtttatccacgtggagagttcacgtagcttctataataataatacattatataagctgtttcggtaaaataatcttagagttggactactatattttctatatgagtgttttggaaataatcttccaagtttatggctatttagtaaaactcaatccaaaatgagaacaataacttttttttttttttttttgcaatgagtacaataaacttatgattggttttggggactagaaaataaaatagagacatatactttaagaatagttgatgagaaaattaaacttttttcgaagaaagaaaaaaaaatatactctggccccttacatattctgtcaaatgccattttattttctttattttgcttggtccatttctggattcctgaaatgaacacaccataattttcatgcccatttttgtcctcccattaacacttaccaaacaccaaacgtaccttccttcctttatatgtgtctctatgtctatatatcactcccaccttcaaatgctaggaaagtggacatcacaccatagtctgatagtcatgaatctcatcaagtagaaacctccaaagaaacagattgcgtttgctcttcttcttcctcctctttcgaatcttctattttcgtgtcaaaaaagaaacaaaatatgatgatatctaccgcaaaagctcaatgtttgccacttaaattctgtctcatttctcaagatttttgatcatctcacacttactccgttccgcattttacgccttttcttcaccattgttgcttctcgaatcgaaaccatattggttttgcagcgttaatggcgcactgagtcttcttaaagccgttaatctttccctgccaaattctcaaccaaaaagaaaaaaggataacaaatgggtcacaacaagttgccataaaggtcccaacagaagaagaaaagagaagtttccccgtgtcactttgtcacaagcttcatcactatttataactaccttgccaagaagaaagcctaaaaaggtataacagtttctttgtctttagagatcatcaaaaagatgtcgatctcttgtactcgaaatttcttcgaaagattctgcgtcgaggaatacaatatagacaccataaaacagagtagtttcctctctgccgatcttctaccatctcttggagccaggatcaaccaatctactaagctccgcaaacacataatctctccttttaatccacgttacaggtaattttctcatctactaaactctgttttaagtactctgttttcaactatgttttcaactattcaggttataagtagttttaactactctgttttaagtactctgttttcaactactcacgttataagtatatttaaagactctgttttcaatcctctgtttgttgaaacagagcgtgggagatgtggctagtattactagttatttactcagcttggatttgcccatttcaatttgctttcatcacctataaaaaagacgcgattttcatcatcgacaacattgttaatggcttcttcgccattgatattattctcaccttcttcgtcgcttatctcgatagccactcctatcttctagttgacagtcctaagaaaatagcaataaggtgagaaacattttatcttaacttgaaaccttttataagtgaatgagaatctcaaggtatgt

SEQ ID NO: 27958 - DNA, 1990 bp, Arabidopsis thaliana landsberg
  unsure (1)..(1990): unsure at all n locations
cgcttgatcagactaggaaaaggtgaaaaaacgtggttaacacgtttgcaagccccatggagaacaatgccggttgggatccggcaagaacggcaccaattgagccaagtaatgcataaagccattctggagcattcaactttattagttcccatatcattgaggacgagcttattaaatcttcgccttttgaatctttttcagtcttctcttggtcttccctgaagcttgaagtccttcttgagctaaaaactcttcttgaactatatgatccagcttgagacctacaagattcatacatgactgatctcaagttttcttgaggttctgtgtcttgacaatttacaagagtggcataatctcctcctcttgatatcagttctgagtgacttccggtttccctaacttgaccatctctcaagacaacaatcttgtcaacatttcgaatggtggataatctatgtgcaatgacgattgttgttcttttttccatgacattgtcaagtgcttgctgaacaatcttctctgattcggcatcaagagcgcttgttgcttcatctaaaagtaatatctttggatttcttagaaccgcccgagcaatagcaatcctctgtttctgccctcctgaaagttgagttcctccttctccaacctagtggaatgattttatcaataataatcaagtggaaatatgagaagatatgagtataaattttttggataatgtacctgagtattgtaaccattaggtaatgatttaatgaaagaatctgcgttggctgctttagcagcttctatgatctgatccatattggctttctctttaccgagaagaatattagaagctattgttgtggcgaataatgctggttcttgactcactaatcccatctgttctctcaaccatttcagcttcaggttcttgatgtcatttccatccaagagaatctcccctgatttaggttcatagaaacgttgcaccattgatatgattgtgcttttccccgaaccacttggaccgacaaatgcaaaagtcttgcctgaatgtatcgtgaaactaagattctcaaaaaccatgtttggtctcgaaggatatgcgaacgaaactccacaaaactcaatcttgccaactacgttttgcaatgttgttccgttttctaatctctcagagctttcaagattgttgtttcctatcattttgaaaatattaacagcagcaaatctgcctttagaaattgcggataagctaggcacggcttgacctaaggcgctgcaaatgcaattgaatcattcagtttgatgatatatctagcaaaatttctcggatttataagacttacaatccacttgaaaattacattgaggatggttgtgaaggcttttnnnnnnnnnnnnnnnnnnnnnnnnnnnnnaagacttgcataccacaaaagcaaagcccaagcacagaacaagaggctatatgttaatccaactcctaaacctttagcaagaccgctccttttaccgagtttcagagctttcttgagagaatttgagtaagattttacagctttctcttctcctacaaaagcatacactgttctcacctgtgacataacctgaagatccatagaattgtgtttttcaggatcaaattaaaagaattgtgtttgctttcacattttgcaaaagtattttcttgaaaactaaaatatgttttgttatgtgatttcttttgtgagactttcttcacacgtaaatgcagaaagtagtttatgagaaaatctcagtcatagtgtataaacaaacctcttctgcgacttttcctgcatcagcataagcagtctcactcttctctgagattgtagacatgactatagcataccctcctcctgcaatagctatcagtggaaccactcctaacgtgagcagcgttagttgccataccgacananaaccaatgacaaatcccgctatagactgagatagataccgcanaacatgggtc

SEQ ID NO: 27959 - DNA, 836 bp, Arabidopsis thaliana landsberg
  unsure (1)..(836): unsure at all n locations
ctaactcatagcaacaagtcgctttggccgagtggtgtaaggcgtgtgcctgctaagtacatgggctctgcccgcgagagttcgaatctctcaggcgacgtttcttttgttttcggccataaaggaaaaagcccaattaacacgtctcgcttataagcccataaagcaaacaatgggctgtctctgtctcactcacacacgcgttttcctactttttgactatttttataaccggcgggtctgacttaattagggttttctttaataatcagacactctctcactcgtttcgtcaacattgaacacagacaaaaccgcgtcacaaaacaaaactcgctacaaataaatacctttgtttccctcttcttctccttcactcacaacatctcaatttcattctctcttctctctccaatttcacaacaatgggagtcaaaagtttcgttgaaggtgggattgcctctgtaatcgccggttgctctactcaccctctcgatctaatcaaggttcgtcttcagcttcacggtgaagcaccttccaccaccaccgtcactctcctccgtccagctctcgctttccccaattcttctcnnnnnnnnnnnnnnnnnnnnnnnnnnnnnntccccaaagtaggaccgatctcactcggaatcaacatagtcatatcggaaggcgccgccgcgttattctcaggagtctccgctacacttctccgtcagacgttatattccaccaccaggatgggtctatacgaagtgcttaagaacaaatggactgatcctgagtcagggaagttgaatctgagtaggaagatgggtgcagggctagtcgctggt

SEQ ID NO: 27960 - DNA, 1453 bp, Arabidopsis thaliana landsberg
tgaataaagaacaaaccttgggaatatcgccggaagagaagatttggcggcgatcggaatagcttgaagatcccaatcattctccattgatggataataaacttgacatcgaagataagtctcacaagtagctgtaccaatgaaacataaccttcctttgtatctctccagaagcttcctcatctccagcacagctccgccgttcgccgccggatgttccactaaccatttcaaatctccgagatcaagaacaacgccgccactaccgatccgagtctccaccaaaccggagatttcaccaagcctcatcgccaattgtgaaactaactctttctccaaacgaatcacctgaaaattacgaagcgctccatcggagaattcgccgttctcgatcttctctagaatctcattcaccagaagttgaggctctgaatcgccgacgagaaccgggttacgtttccgggttcggatcataatctcaatgacccgtttcgcttcatctgtcctctgtaccatcatcccactttgcataccaacgccgggttgttgtaaccggggattaagataaagattccggttaaccggtgccggtacggaacggtaaccaaacccaattgcagacgggttaataattccagctgagccggtttgtctcgaattagaaacagagttaccaatcaacgactgttcgatcgctgatttcacagcgggactagagaagctagcttcacgcatgacccgactcacactcgggtcatcaaggatcgatataataagctgttcaagctcaactttaacagccaaaagcggttgctgttgttgctccggacaaccacggcgttgatgagcttgagctcgtttaagcgccgccataagtgcgtttgagatcggtggatcattccccggagtggttgtagctgttgggagacgctctaaggcgacgctgaagcagagctcgagggctcgacactgtaaaggatgagaagaattggggtgagatcggatacaagctcgtcggagaaacccagcaggagaagctagaagagtggctgcaacgtggagaggagtggtttggccgtgattacgacgcgcggcttcggcgattgattggtttaaaacggtggcagcctccggcgtcagagtctgttgaatcgtacttaaaccagctctcatcgttcttcgtttacttccacttttgtgttatctctctgtctctctttcttcaattatatgtgggtattaaataattgtataaaaatcgaatcttttattaggctaagactttgaaggaaaatggaaaaacgaaaagttgaatcttttgagttgggttcttaaattattcagacaagttttatgaactgagttctgatcgggaaaaaaaaggataagaatatataagatttttggttgaactcattcaaagaatatcccaccggccaaaaaaatgaaaagg

SEQ ID NO: 27961 - DNA, 785 bp, Arabidopsis thaliana landsberg
agatctgaatctttgcatctttaattaaaaaaacatatagcatctaattaaaaacaactaataaaaaaattcaaagtatactaaatgaaaaaacaatatttcagttagagatttggaattgtgtagcttctaatatatcgtaatgtttagtgacgagctgtaatttttttgaatggtaatagatcaaagtttgggaggtaaaacgtgtaaaagcataaattgggatgtatagttagtttgttacagtcagatgtttgggataactttatgagttctaaaacctagaatataagtgttagcctataacacctaaattaaaatttatgatgaatgacacaaaatttgttatcatagcaaattttatttcaatgtttgactaaattcatcttctaaatacaatggagagaagatgtcggaaaaaaatgcaatgaaaggcttataaatcaaaaatcaaaacgttcttagcccatattcatatgaaggacatcttttgaacgtacggtacctggctttgcgaatgatatcaaatccgcttgttatttgttgttttttccattgatcgatcacatcgtcgcacagcagaacgatttgtgcggtatcatcacatattcacaatcacatctctagactcaaatcataaaaaattaagtggccaaaagaaattgtagggtgtttccacaaacacttggttaattaggtattcaaatacttaactttttagacacaagttatgtgctattcacaagaattaaaagattaattgtgccaatatgcaccttatgtct

SEQ ID NO: 27962 - DNA, 1590 bp, Arabidopsis thaliana landsberg
taacaaaaaaaatttcacattctcctagaaaatggccaaatatataaagataatccaacctcgagttattacaaaagggaacacataaaatacaaactgctgaagtcaaagctaattagaactatcacaccaatacaaccataaataacacaaacaccactaaagcccacaaaacaaagtcgttcttaaatcaaaaagtagaaattaaggagcactataaactccaaaaaatgatgacaagaacatatatgtacgtcaatgttgatggcaaatgcctccagagaatagctatcaatctaaaccaacatggttctcatcatatcttctgtaccggaggtagaccggctctttgagcttgcgatggggagaaggggcggagactttccgggagtttgtgacgtcagctcttcagctctctcggcttggactttccaatctgttctcaaaagtgcacacaacatgagagaagcacaagttgcttgagctgcaagcaacccgaaccagagacctggaaacccttgtttgaagacaaacccaaacagaatagcgactggcatgcccacaaagtaaaatgaacccaagtttatgttggccccaagtgtaggtcttgcacagcctcttaaaaccccacaaccggttgtttgaggacagtttccgagctcacataaccccacaatgggtaatgcgatggaagtcagctgaagaatctctgcatccgtggtaaacaagcgtccccaatggtgcctaaccagcacagcaaacaccatcgccattaggcctaaggcgatcgcgcagaagagtgagatgatcatggatacccgagctttcgccggacgtttagccccaagctcgttgctaattcttgtagagacaccaaggctgagagaggatgggaagacgtagaccaaagccgtcgtttggatcaagattcccatggaagccacggtggctcttgggttagccaaaagtccacacaaaatgatcataaactcgtaccaccaccactccaaacaaacagatacacaagtgggtatggcaagtgagagcaaagccgaccaacctttaagagagtcaatagtaattgggacccatgtatcactatgcacgctagtgaaatacacaaaagaggataagaggactacaaggttgagatttgtcaaaaccatagctatagcgactcccgctactcccatctcaagtttcaccactaggaggtagttcaaaggaacgtggaggagaacggacacggccgtggagtaagtcacgggcaatgtaatgttttgtgttcggaggtaaattcgaagagggtgaagcagagagagaaggaagaggtcagggatggcgaatagaaggaactgttgagcaacagaggagatctcttcatcttggccgcaccataagaggattcggcgcatgttgagccacgagaaggagatagggaccgagcaggagaggagtaggaggacggttctttgaagggttagtcctaaaagcttcatttgtttagctccgtatgcttggccacagattggttccatccccatggacaaaccggagatgacggagtaggggatcctctagagtcgacct

SEQ ID NO: 27963 - DNA, 1449 bp, Arabidopsis thaliana landsberg
ataattataccaaatataggttaataaagaatggtgtgagaaaagcaattgatacatttatccagtaaaactaccatggaagtaaacctatttatttggtgtcaaatatctcttctagaaagtatttgttgttcagcatctttcctacagtacttttttgtaattgcaaaatcatgtggataaaaatgttgtcaccttaaaccaaaaaagtacaagatctgcgtgctactgttaattaaaatgtctaagctagttcatcttttcttataacgacaaaagcataccttctcaatgttgtccatcatgatccccttgacctcagttatttgggccttcaacttagaaagtttgctcatctcttctggatggctcatacaatactgcatatgctcctttagtatgggcctattagaggggaaagaaaagaatcagaacacagttgcaatgcgaaacaatgaagtgatatcagatagttacagctatagacagacccgaactccctgtcaagattgtatgcaacgctaaaccgatctccaaacaaatcatcatcttcgtcctcatccgcaagaggatgtcgctcatcattctttatactcgcttcataccgcttcttaaagtcttccttgacccgttcgagaaacacgaaaggaacacttcttccggtggactcatcagcaaccactagaaacactatacacgcaacaatcacaaagcatcaccaaatccgaagtaaattaaaaaagctttcaacttatcaacaagtagaaaaaggctaagaaagaaaactcaccaaagccattgtcaacaaggaaattgaaagtatgaccatcgcaagagtaagtatacttgctgctatttgtgggtagcttctgcagacattgaacagcaatggtgctaaagtttcctgaataaggagtatgctctgctagaacaactgttcctttaccaccacagctatatatcaaacccttttgactaattatcgaactcgtgaaactttgaagaagaagtcaaccacaaccacaatcagatctggaatgcaaaaccaaatatggaatcataatccagaaatatatatatggaaaactatagatcactgtagaaatcagataaaaccctaaaacaccaagaggaggataacagtaaatcgcaaaatcgggagataaaatcactaatcgtatagaatcgcgatttataattgagaagaattacaccgaagcgcaacaattataaatcggaaaacgtgttcttatgctccgattaggttgaaaatcgacgcaattaaaagatcggtgctatttacttccggaagaaaagtatagagatatgatcggagaagacgaaattgaaggaggaatcaaacgacgcatagcagtagcagtagcagaagaaacaaaagcgaaaaaggaatgagtaccttgagacttagcttggtgatgaaggattagg

SEQ ID NO: 27964 - DNA, 2291 bp, Arabidopsis thaliana landsberg
agtagttgtaactttagttagcataagagaaaaatatttaaataatttgcaatcctcgggagcggtgtggctaacgttaaggttaatgaaatacttagttatatatgaatgtgttaatatgcggcgcagcatagacgtgctccatattttagttttaatgcttattctattttaattaagattaattttgtggacattgggtttccataatttctttgatattttaattaagatttgataaatttgttttgagattttataaacgaggtttacagaactttttaagagtatactctagttctttgttcttagtagtatatagcctatcaatatattctcaaccagtttaaatagatttatttgactttttcaagaatttcaaaactaaaccaataattttgctatttatacttatttctttaatgggatcagttgcctatctttataagtattctatacgtcaatgcatgtatttgcaacgatttataaggcatgtgaatgtgaatgaagtatgaagaacgtgtgattagggccctacttgattcaagcaataacactaatcgacatcacacaccaagacgtacaaccccaacccaacaaagaacaaactctaaaaattaaaaaataaaaactctgaaattgtctgatttagaataaatatatcgttactatagagggacgattggctttgatagtaatactttttttttgttttcaaaatattaaatttatgaatcaataatttacgatcattaatgagagattgatgactttaaaattatgttaaaaagatttaaatcatggatgaatcattatggaaatctttagtcttgaagagtactaagtataggtttttttttttttcttttcggttttggattccaatgttctttttcaacataagaggcaaatcaactagtttgtcttagaactgcgtttaattgaattcgacaatgatggcattttagattttttttatcatgatattcatattcaaatcaactagttatgcacccttgaaattcactaacatcatatgaggttggatatctcttggtaagttcagaaccgaaccaccacatgtccatatctcctcccgtaaaatcagctatgctatcaatcatattgttttcttcttgtttgagagatagggaggaatatttgggccggaggacagtttattcctcccggaagtcatttcgaatgttaatttgtttttgaaaaacgatgccatggcataatccgagggaaagagtctctcaccttgactaacaacaaacaatctaacttggtccgcgggcaagtggtcgaatcacctaacatatgctcaacagcaatacaacacaaccgatgttccccataacaattgtgaccctatgatggaaaccaaaaattagtcccaacatatataccataaaaatatgtaaattgataaagcagaacctagtgtttggaaaggggctctattctttctaccccaaagacaaaataataaagataataaaaaatgatgacaagagagacaaaagtaaacaaaaaaaaggattttagaaatgtaatagatttccaatatcaacgctcctttttgttcccgctttaacttttcccactcgcaaatcattttacctttggattcaagcctcatgatactttttctttttctcacactttttacactattctctgttttgttgttactcatctcttatcaaacattttaaacttgtcgactttcactcttcactagctaccattgttaacttttggttcttaattcatattttctgctccaactttgtagagaatcttttgttatcccaaagaaaaaggtgcctaaattcacgtttgacaatgttgcttgaaaaaggtttgatcttgaaatttcaaaagagggaaaaaagtaaaggagaaaaatttggagagacaagaagtgagtcaagggacccaacaacaaagacaaagacaaaaactttggattttgccaaatactatgattaatgctcattcaacactactattaccatttccatcatcatcatctctctctctctctctggttttggaaaactgcctgagaaaaaacctagccataaccatcttcttcttctttctcttgttcttgaacataattctgcttcatggacaagcatcatcatcaacatcttttattacagcatcatcaacatcttcaccatcatcagaagctctctcttgccaaatcatccagacaaagctgtagtgaatggtatgttctctttcatgagtaaatgtaccagttgaaacactttaag

SEQ ID NO: 27965 - DNA, 1409 bp, Arabidopsis thaliana landsberg
  unsure (1)..(1409): unsure at all n locations
tatgtgcattttggaacattaatatgtgattggtgcatctaggtgtttcacggggctgacaacgatgttatctggcttcaaagagacttccatatatatgttgttaatatgtttgatactgccaaggtatacatttctctatcctgctctaaatatttaagcttttggaatgagtcagcatagaagaatttgtgtgttctgctaactccgccgtttttagaaaatgttgttctttgttattctgttatatgcatatacccatgtatttttatagtaaggtgtgaataaagttggtgttgcagtattctaaaagggttccactaaattgcgataaatcaggcatgtgaagtgttgtcaaagcctcaacgatcactggcatacttacttgagacagtatgtggagtggctactaacaaattgctgcaggtcagtgctttaacattacactagtcttttagccatgtcttactcttttctatcgaagcttaagttggtgactttaactcttttgctttgatattttcaatgaagcgtgaagattggagacagcgtcctctgtccgaagagatggtgcgatatgctagaacagatgcacactatctgttttatattgcagatagtttgacaactgaactcaaacaattagccactggtaggcatctttgctatggagaaacattttagtatatgatggaaaagtagagctaacccggcaacaatgttagcgatattgttttattcttgcaacaaagttctaaaatgtgaaatgtatcagaagattcatctagccccgatgacagattccattttcttctcgaggctagtaggcggtcaaacatgacctgtttgcaattgtacatgaaagaannnnnnnnnnnnnnnnnnnnnnntgcgtcttcctcaataatttatcggcatttaaacggacacggagataagtctaacatctccttgaacgcagaagtatgcatagccctcacctcattatgtgtactcaattatatatcgaaactttttgttgatgttcgtattttcgcaacaggagcttgttaggaagctttgtgcatggagagatttaatggtgagttgattcccctgttttttttttttttaattagtttcaagttcaaaatgttgtagctgcaagacattttccttgtcgttatttcattcagacatgattttttgcagggacggattcatgatgaaagcacgcgatatgtgttatctgaccaagctatagttggtctttcttgtaagcagccaactacaaccgaagagatatatgatacaatagctcatattgatttggctacagagtcttccccgagcttgagttcctctgttcagtctccatataatgtaatttgtagtcatttggatgacatatataaaatgattctggacaa

SEQ ID NO: 27966 - DNA, 1433 bp, Arabidopsis thaliana landsberg
cctttggtttgtaatgcgagagaaccttgttgaataattgcgattctatataactttgatctgttgccaaaataaccacagcctttccatttatttcttggttcatctaccaaaatgatcagaattggcattatttgagctatttatgagaatacacaaaaatctgcttcttgatttattcgcggcaagatgatttgctagttagttaaaatatgtgttaccaagtgactttatcattggttttaattgtgttctatacagagaactcaaggccaagtaaccctaaaatacacaaaagattcctacttttcaaccattgtttactctgtggtgacttttcttttccaacaatcaaaccctttttgtttgcagtttcatttcatattaatttacaagagattttaaacatataagtaaccttacagaggttgtatctatcacaatggtgaagtcaaattgctagaaaaaggcgttctcacattgcagtatagacataataacgttacaagttacaagactaacacataaacatacttagcgatcgaggtagaagagttgatgattgcagaaagagacaagaaaattatgaagtgggtcttaataactaagatcgttggattgtcccattttacacaatctttttcgacatgtcaagcttcctacttctcaatctcatcacacatcccatcttcttgcctcctaatactctcactgtttacccgcttcctcataaattgactcgttacatatctatataccgagcggtcggtggtactaacctccaattcgcaattccctaaggtagatcaatatgcgatttcagccttggtcgagagagctaagttaggagttgtaactagtcaatgttcacaatttactgtgtcatgtgtagtagatatgctttttttgtcggcatgtagtagatatgcttaaggcggtaaataactcttgttttttggtgcaaaaggcggtaaataactaaaagtaaataaaacgcgtatattcattaatggtaacgccgttatctctgacgaaaacaatccatcccaacgacgacgtcgtcacgagcttcttctctgttttcttctttctcttttcccggcccgtttagcgattagaacgaaaccctaattggtcgacgaaatgaaagggattgcgaggcttgtaacttctctatcgcgaatcggaggtcgtatgattgtttctggaacaagtactgtatcttcttcttcgtcttcctctcttctgctatctcgtcgctcgcttttcatctctatcaccaatttacttaattctcggaccaaggattctgctcttccttcattgaattcttcttcacttgttcagaaatggaacttcctcggaggtatcgatcttatagaatatttatagttcggattttttaggcttgaagttagaacgaaacgaatgat

SEQ ID NO: 27967 - DNA, 1714 bp, Arabidopsis thaliana landsberg
gaagtagtcacgtctcagaatcgccttccacctgttccatggtgtgttgcagtaagcttgaaggttctcagagagcatcgaaaagtagaatcttctgtcatagataacctctttgctgatgctattgaacaagtttgaaacatctactgagttcccgagatagtttacgatgatccctctgtggatgagcaagtcagcatctgtaggggatttaatgaagcaaccgagcagcatgatgtagtcgaggaagtttttatttgagcaacgacattgttcaaacccaatgatgtttctgtagagggattccgtgagatcatcgacgacaatggttggaatcttcagtactccatcagcaaaactaatgtcaagtaaacaactactggtctctgctggcttgaacctaacaccagcagtgtgaagctctgttgcttcaggtgcattgtccactttcactgtagtgtattctaatttaattggaaactgtggcagataacaagacctcagaagatcaacaaaatgttctggctctgtaataaacttctcatcatcaatgcggctcaagaaataactgaagtggcgttgcgcgagctgtatgattgaaggtgttccttgttggtagtaattcaacaagagaagaaatatctccttcacaacgaaaaagggtaactgattttctatcaaaatcatgtcacggcacacgtcggtgatcatcattgaattgccaaatatgcgatcattctcgcctctaagtcgaggataatgagacctcaaaagaagttcaaccaagaagctaccatctacaactaacatctcaacaaactcatcgctatgaagtttcacatcttctgcataacagctgcgagcattttgttcccaagtcctagcaagtctaacaaggtcctctagactagagttcgttctagggataaaactcagcaaatacctgtatttctgatcttccatagcttgaagctcttctttaccacgatgaagcgggccaaaagacacaagccgaggcgtatatgcatcaggattgagtctgcggagcttattaggtaccttgtatatacagcatttggtggaaagagaagataaaaaggctaacttcgctttgatggaatcgacaagggcgtcaccttcattctgattcatcctctcatatgcaaagcaaagccggtctacaaagaaagagaagaagaagattctccaaacgaagctaagcgcacaaacagtggtaaaccttgcaaaagtcaacgtttcacacacattcttttggactttaagaaagacgctttcagacatcttcaaccccaaaaatatcaaacgtgggtccaacaagtactgctaagctttgtatacttcaatctttaaatagttgattttaacaagacaaaggaaagctttcgaaagatgatttggtggtgaggttggacaataacatttttagttggttgtatcattaatagatggtgtcgctgtgttatccatttaatccaactattctatcaaaattgtgaaccactagcgaattcatcatggtcaagcacaccagggaaaacaaaagagcataatacaatggagatattctgccaaaaaaatcactcccactgcctaaacaagccagcttctgcagatgaagtgcaatcgaaagagatttcttctgccgggtggaatcgtacttacgacattgcagttctctgcagaaactggcgtt

SEQ ID NO: 27968 - DNA, 1251 bp, Arabidopsis thaliana landsberg
  unsure (1)..(1251): unsure at all n locations
gagatgctcgcttatgctcatgagacacaacatgagaagataataaggtaatgtacagtaaggatatttttggttaagaggggtgcattttatcttgctttagtatttcactaatcaacatccggaatgcgtttttaggggattggctctaggaatagctcttacagtatacggtagagaagaaggagcagataccttgattgagcagatgacgagagatcaggatccaatcattcgttatggtggcatgtacgcattggcattggcttacagtggaaccgcaaacaacaaggcaattcgacaattgctgcactttgctgtatctgatgtcagtgatgatgttaggaggactgccgttctggcacttggatttgtcttgtactctgatcnnnnnnnnnnnnnnnnnnnnnnnnnnntttctgtgaccactgacttccatttctttagcgcttccagtacttttgtgagcgcttacattccctaacggtttacaatgtttttttttctaaactgtagactccccgtattgtatcccttctttccgagtcgtacaatccacatgtccgctatggcgcagctcttgcagttggcatctcttgtgcaggcactggtctgagtgaggcgatatctttgttggagccacttacatcagatgttgtagactttgttcgtcaaggtgctctgattgccatggccatggtgatggtccaaattagtgaagcaagcgattctcgcgttggagcatttaggttagtgaagttccgatctcttcatcaattggagggagtgagaatagttctcttttgaagactaaaatttgtctgtgcttttgcaggcgtcaacttgagaagataatacttgacaagcatgaagatacaatgagcaagatgggagcaattttggcttcaggtattcttgatgctggtggaaggaatgtgacgataagactgctgtctaagacaaaacatgacaaagtcactgcagtcattggccttactgtcttcagccagttttggtattggtacccattgatttacttcataagcttggcgttttcacccaccgccttcatcggtttgaactacgatctcaaagtcccaaagtttgaattcatgtcacacgcaaaaccatcgttgtttgagtatccaaaaccaactacggttgctactgccaacaccgctgccaaattaccaactgctgtgctctcaacctcagccaaagccaaagctaaggctaagaaagaagcagagc

SEQ ID NO: 27969 - DNA, 1589 bp, Arabidopsis thaliana landsberg
tcaaaacagtttctaggcataaatattgaatccattttcattgcttatatttgtgaaatccttcactccactagcttttctctgcttttaggttgccaacttttgcaacgctgaagatgatgggtccttctggagtcgctggataaaacctgattctgtggttacggccgaagtaaaaattctatcttctataagaatatggccttctatgtcatagtttttttttttcacatagtcatatcaggtttttcagtgtctaaacttgtattacctttttataggaagctcttgcaccacgggctgctaggaatacaaagagttatgtggatcctagccatcctgacaggactagcaaaagaaaaaagaaaggatctgagcctccggagcatacagatagaagtcaaaagcgcagaaaaacggaatattttgttccttcaactccactattagaggggacttcagctcaagttagaggctggtcttatggaaatcttcctaagagagatgcgcaacgattttatcgaactgtacgtcaaaattatttatctaatgtttcattcggcatattttttaagtactggaaaaagtttgaattaaaggctcctcaacttgttcagccgcaatgatttcatggtttcggttagggtttccttggtagcagtagtttctatgttagatttgggtagttccaatattgatttactggtttacttagttttactccatgatgctgaactgacgattgttatatttctcattgtataattcaggtcatgaagtttgggaaccataatcaaatggcatgtattgcagaagaggtgggtggtgttgttgaagcagccccggaggaagcacaagttgagctatttgatgctttaattgatggttgtaaggaatctgttgaaacaggaaattttgaaccaaaggtaaaacttgaaatataaacatctgaaatgaaggctcttttgttttccttgttgttcacttggatatttccaatcttcctgttttctattctctgcagggtcctgtgttggatttctttggtgtgccagttaaagcaaacgaactattaaaacgtgtgcaaggactgcagctcctatcaaagcgtattagtcgatataacgatccaatttcacaattccgggtgttgtcataccttaaaccttcaaattggtccaagggttgcggttggaatcagagtatgtacaacctaaattcaatattatcatatcagcatctgtcttatgttttttatcctaagtctttttatcatttggtgttctcagtcgatgatgcgagattgcttctgggaattctttatcatggttttgggaattgggaaaagatacgattagatgagagccttggacttacaaagaagattgctccggttgaacttcaacaccatgagacttttctacctcgtgctccaaacttaaaggagcgtgccactgcacttctggaaatggtgcagcatattacttgctaagatttctcttggtaattaattttcgtaataacttccttgaagaaatgattgacagtataaaatttacttttcacaggaacttgctgcagcaggaggg

SEQ ID NO: 27970 - DNA, 1795 bp, Arabidopsis thaliana landsberg
caaagctcgacaaaattattagcagttagctggagctataagttttttggaattattgcaaaactgtataaaaaagctgtacgcgaaagctgtataataaagttgagagtaaaaatatttgtaaacttttaataaaacttttatgattgatagaaatgaaagctatataaaatataatactctaattttgttcaccctcaaaaccataatacttgaaagctatgaaaaaaacataatacttgaaagtataccgatctagttaaaataaatgatttaaaatgtgcattttattaagtggttaaatttatttgattccgttttttcttccaaaatttgattgcattaaattgtattagcgcgtataataaaaattatttatggatgggatcttatcgatctaaaaatatcaacaaaaaataatctatttctaatcactactaagagctaacagataatatcatgattaaaaactaattgttgctaatgtaatcgacgtattatcatttcattaaggttcaagtttatatatttgatgctgttaacaattaaaaaaaaaggcactactactatatatggtgcttacttcaaaattactactagtattattcacaagcgccatcaagcgggttattaccgaggctcgaacactcacaaaaaatcgaaactctactgaggtagagaattgagtttaccaccagagacaatgcaacttggttatatatggattcgttgattagccatccaaaagcaaaataatgcagaccgaagagttgttaaggggagtgttcctccatggaggacgtggagaagaaaagttggttgctgcacgaggtagagcaagagaaaggttcgttgcaggacgaggtaaagcaagagggaggctcaatttaggacgagaaagagatttgtcatgagatacataaaattgcagagaaaaactcgtttctagtgtaaaaatattgtcttgtttttcgtttctagaattatggctaaacctgacatatacattactttttagattaaatgttgtgtttatatagattgttaaaccaaaactgttaacatagaatttttataaacccaacccctaataataataataatcttataataataataagtctatcaaagatttttaaaaagaaatacgccaattatataaataaaaaaatttgaaatgtgcaccataaaaaatgctaatatatagtattcattcatagtactccatacaaaaagttttaaaaaaaaaaaacttatcatcaaatcttattatcttttacgggttttttcattaaagcaaaataaaaataaataagaacagtacaaaactatagcttacgtatctgaatagttcctccaaatgacgatcctacccttcataatctctctttgtttactcaattccatgaaccgctataaatacgctctaaacgttactcgtcacttggcttgcacagaacaaaccaaccttctagattcttctccttccttcttcaactctctctcacttctccagatatggttacatctccgacgaactcaacaatcaaatttctctgtagctatggcggcaaaatcctacctcgttatcccgacggcaaactccgttacaacggtggtcacactcgcgtcctcgccgttcctcgctccgtctcattttccggttagtttcacgctctcgatctcattgtcaattttgaatttcacaaaaaaaaaaacgaaatcggttttgtggaaagagaaattaaggccacacgtgtggtgcgttttaacagagttagcgtcgaagatgcgg

SEQ ID NO: 27971 - DNA, 1518 bp, Arabidopsis thaliana landsberg
agaacactttctcgttgtcaatcttgaggaacatggttgttaaaagatctatttcttcaaccaacaacttcaagcaataatataaaaaaaaaaatacctcaatgatttagatgttttaactgagtagtaatagtgagcaaattaaacaaacttgcaaagtaagttaccataacaccgtcgacaacgcaacgatctccgacgtcataaggatgcatcacaaagacgaacataaaggattcgaagatattcttacaagtacttccgatcatgaaagcaagacccaaaaattgtgaggagaagaccaataaaagcttggtcgatgctatatccagaagtaccatccaaacaatgaatgtgatcacggtcaagattccagttataagtttgtccaactgcttaaccgctgtttttgtgtcgttcagtgaatgccctatagttttccgacttgtgtatacattaacctgtcaaaaaatggcacaacacacctactttaacttaacaacttctctaaatagacatgtgttatgtttttatctagggtttcctttattggtaaccattagtcatctaaaacaactttgaacacaaaaattaagggtgtttgaagaatgttaccacccattctgtaaaagtcttgcgtgtgatttttccggtgtcggcatcttctattaatgggagtacaaggtctacttcttcctttatcatgaacctcaataggtcatcttcttctatgtaactgagaaattaagaagcaattcgagttgtgatgattaacatgaaaacagagtagaagaaaacagagtatttgtgtgatgactcacttgtggtttggcttagcaacattgttgaagacgtcataagcagcagcaacagcctccatctcatttgttatctctttatctgttctctctttcttattgttgacctcgtctagagtgctggatatggttgatatacctgaagttcccacggcttcgatcaaaacacgcattgtccaagcagagaccttctcttgtttcatcctgtgaacctttcccatatcgatcactttcttgtctttcacctttccatctttggttcttgtgaaacttaggtgacctgtgcttggcacgcgcccaacgttctctgcctcttcgataagcggaggtcccgagagagtctgaagaacgtattggtggaaaacagactcttgaatcctctcaaagaagtttctgacgttgaactttgaagcaagaactttcaaggcaaacgtcttcaccaagaaaaggattgaccctacgagaagagagacaatagtccaagtgatgaagtctagaaatctcttggtcttacgagtacgtttaacatcaccatcgaacagacatatccaagcaatcagaaccagactaaaccaaatgaagacttgaacattcttcttcaacccatgcacaaagtacaaaacttttttccgaagaagatagttcttttctatgatgaacaccacaaaatgcatgaaccaatttgtcaccaacatgccgc

SEQ ID NO: 27972 - DNA, 1491 bp, Arabidopsis thaliana landsberg
ccttaatggtgagacgtcatataactatatatattagcactcgtgcttgtcggacttataactttagcctaatcttaaactgtttctggccagctttgtgtcattgggcctgaaataaaagagtttctcccttttgttttgctcttctagacttttggcattgaatagggaagattaaataatctctaactacgagtctacgacttcataaattaattgtttcatgagagataacaatgatatttcaaatatatctacgttgataaacttatataatcgctccaagtcttcaatgaatacggaaatcaacatactaatttaaatgcttaaatcgtgaaacagattaaaacataaacgtagtttattcataattcgaaattttaccacaatttccctttaaagctactcgtaacgcttagctggtctgaattcgctctcgaatgaactcctccgccgcagccgtaaccgccacacttcgccaccgtcctcacactttccaccaacgcttccgtttccacatcctccgcaagaatttccgccaactgctccggacttatcacaagcctcaccttccacactccacaaccaccgccactcaaagccgccattatcggcgtcttcccgaaagacattctgtacggcgttgatagttggtcggaggaatccagttgagcggtcgcggctgcggaagaagaaagaggaaggaggtagtagatgttaccgggaaagagttcttcgccgtggagaagcggtggagatgagtggcggaggcttaaagagtcgtggatgacatggccgggaaattcgttggtgatgaattcggcgaagatgggaggatgaagctccatcacgccaccgtttggagtcaccacttttatcaacgaatcatctttatcgtataattttcttgaaccaccattgcctttgaatacgcagttacccatttttgctacataagttagaaataataactgattattttgtgtatatgtaatgtatggaatccaaagaaaaccccaagacggagaagggtttaagacaaacgttttctttgagcagatgaagtatatatctttacgacgtaaagaaaaaatgtaaattgcaaatggatcaccacttttcttgtaaacaaagggaccgaagatattgtgcttgcgatattatcatcattactattattctagtctttgaaagagaaatgatcattattattgggtatttgagaattgagagtaatgggcattggtctgattgaagaacaatggactacaagaagatgacatttgaaggtcaaataacatatgaacttatttctgtggaataattggcggattaatgaataaaatataaccttatctaaacaaattacaaaaagtcacacaaatggtttcccttaacctattttccatttagaaaggtatgtgatacggttattaatgttcacctgaggtcaaactgtgaaaaggccgtcagagcacaacaagactttaa

SEQ ID NO: 27973 - DNA, 1315 bp, Arabidopsis thaliana landsberg
cacctttaagcaaaaaagccaaagcagaaggcacaaaatctcttataaaagcttgatcataattcaaaggcatctaatctccaggatcattcgccgccactgtcccaaccggagaaccacaatacctagcaacagcgttttccaaaatcctccacgcttctttctcagcttcactctcttttctcacaactttctcactaccaatagaaactgtttctacttcttcttcgtttttgtgtatcctttctaaaattgcatcactttgaacatgaattctctcgaaactcttgtcactgagattagtttcaacggatgttgagaattgtcttacggagattcccgtcgtcttctcggaaaatcgatttggtaaaatctttgattgggggaaacagtaaatggacgaagagacgaatctctggcttgatgataaatggcgaattgaggtggttcgagataaatcaaaaaatgaatccttggagaaagtggagaagaagaggcttctgtgaaatcgtgaaggagttttcgtggaaattttgcggaggagatggattgcgctcatggttagagatgagaattcgaagagggacacgaaaatctggagaatgtagaaatgaatcaaatgaagagttagggttttataaattgggggattagatcagttaagcgatggagaagaaggagataaaattgggaatgagaatattcaattggggaaaataatggggttaaggttaaagtttcgggattggggaagaagacagattaatttctttcctttttaggaaaagcggtcttatatttggattattattttggagtaaacaacaatcaaacgaaacaaaatgaaaactgtaagcataattagcattcaaggatccaaaggttgatcagatgaactctgagattcaatgaaccaacataaccctagacacaatgagttatgcttcccaaaaagttgtgaattcactagaacgtagcttacgaatgtgtctcgtgttataaccctagagaatgatttattatttccacttgataaaaaaaaagtgaagagttgaaaactaatgatgaaaggatagtcgccacggctgcacatttgacagatacgctcgtggtcgctgcgccagtggccatttgggtggttctctctcttgcaacggaactggcggttcacgtcggccaagtgttggacttctatgacgtcagcaatgatgtcaaatgatgtttaacaataagttacaatgtcagttccaaatcaaaattaggctacacattatcatatggagtgaagcgaatgataaaacttaaacatatattc

SEQ ID NO: 27974 - DNA, 1525 bp, Arabidopsis thaliana landsberg
aggagtttgagtgagtctgagcatgagacagaggcaaggagtaacagaacaaaggacagcagaggaagaaagagacatgaagatgattctgatgagtctgaggatgaagatgacagacgtgtgaagagaaagagtagaaaggagaagaggagaaggagaagccgtcgtaatcattctgatgattctgattcagagtcttctgaagatgatagaagacagaagcggaggaacaaagtcgcagcttcttctgactcagaagcaaatgtttcaggcgatgatgtttcacgcgttggacgtggttcttctaagcggtctgagaagaagagcaggaaacgtcatcacaggaaagagcgagagtaggaaatcgatctatatgagccattttcactctccatttctctcttatcaatgttatgtacaataatgaaacatgtctttgtatgttggatttgatttgtgttgaaacatgtctttgtattttcactctccatactctggtttggtctgtttgtttcaagcttgtgttataacactattgagatacttggtgttaatttgtgtctttttactctattccattatttacgtcggcaagttagagctcacgtcggcaagtgtcgttgtaaagagatcacgagacttgtgggttggatttttggcatggctctagcctaggaggacaatgtcgtcatttaactggctcattgctcaatacatatctcgtcgtgggtccttgttaatctcttctccaccgttgaaccatagtttaaaatatccaccgttaaaagcccctttatatcccaagaaataggtgaacttgttacagaacaagcaaagatcaaagagaaaaatatcccaaaaccaaaaacagaggaagaaagaagaagaaaagatgccttcaagcacattctccgggactgttagcacgccgaagctgtcggtggcagtggacatgggaaacccttttctcaatctcaccgttgatgccttcctcaagatcggagctgtaaaaaaactcatctctttttgatggatcattttgttaatttgtgatctgtttctcattgttgttttcttctttgatgggttttaggttggagtcactaaatctcttgcagaagacacttacaaggccatcgacaaaggtaagcccttaactttatcaaacacaacacataagtgttagttcttgttctgtctagttttattatgtaactttactgttgtgtttttggtgatgttgatgaattagtaaaggcatagaagaatgtattgtatatatatagaacaactagcacacacctttgatggatctgtttttgggcttatcattaattacctttgtttgttggagctgcaaaatatcattttttactccatggttcatatattggaggggagtctctacaagagcactttggagcatgcggtgagtacactactgaatcaaactatgtgttttggcttgaagacatgtggtatcttttttaagtttctggaaattctgttgatattggtggagcta

SEQ ID NO: 27975 - DNA, 985 bp, Arabidopsis thaliana landsberg
aaaacggagctggggggatactttttctatgggatagtcatgcacatattcatgttaataagtaatgctgatccaaccacaactatatataataatttgagaatagtcttttggtgccctgaagccttccttacttgtcagttttcagctacttttcacttatatatttgctcttgaacccttcccaaccaaaccttagatactaagtgtccccctccctgtaattccacgacagtttgtctgcatttcaatactgaagtttctgtgattttcttctataggttgattataatttgtatggaatgggtcatgtgcatatatcaaagatgaagttccgtagcccagtgcctcaccatttccggccaaggagatttgatttggatgattgtccgggacaaaggattgacgaagtggctattacaaaggtagatcttcaaatacttgatgctttgcgttatattgtgtggtagttttatcttcttttatatcacaatactgaaacaatgtagcaggcaaattcaagtgctgctgcaagcgtcagttttcctgtttggagcttgtcaacaatcccaggtcagtggatgtggaatctctctgaagaatctgatacaccgttgagccagagccagcataggcaccaacaccattacagacgtcagagtctctgtgaacttgagggagatgctactattagtggtaattttcctgattcgaaatttaattgtttgtgtttcatgtatgaccggacgtttgaactagcctcttctcttgtagatattctcaatcaacagtttaaaatgtacaactccctttcacaagcccagtctgatactaacatggttcagtcgcttgtggcaatttgggaggttcattctactttcttggttctactttgaaattatttagttggtattaccttgcctaacctcgtcacttttgttcaggaggagtatgaaaggactggtgtgcgtgatgcacctatacc

SEQ ID NO: 27976 - DNA, 4291 bp, Arabidopsis thaliana landsberg
gcaggtcgactctagaggatcccccatgatgtgttagaccttaacccataaaacatctcctgtgcaataaggaagttatccgaaattagacgtccttctacaaatgctgattgcttttccgaaataagatttggtaaaaccatcttaattcttttgcataaaaattttgaaataattttatacctaacattatacagattgataggacgtaactccgtcatccgatttggttgctccattttcggaatcaaacatatattagttgtatttatccgtttatcaagaacttcattttgaaaaaaggagtttacaagaagtaataagtccgcttttatggtattcgaggctttttgaaaagtaagctgtcataccatcaggacctggtgacttctccggatgcattataaataatgccacacgcacctcattctctgtcgcgggtcccgtaagaaaatcattcgtttgatcggttattaaagtcggaacttctaccaaggaatcctcgacatcctgaggattagtcgaagtgaacaacttctcaaaataagacaccgttatatgttgaatctctttatcctctacagaccacttacaattctcatcatttaatccagttatccgattcctagcttgtctctgtttagtcagattatgaaaatattttgagttattatcccctaaagtcatccaaagactccgactttttttataccaatattgttcttcatctcgataagcctcttttaaccgtagtgttagatatgtaacctcctctcgtgttctcgagtcatccctctgagccgcacttaattcagatataagatcctcaattgttttccgtccgtaaggatttaattctttccgccattgagaaatagcccgcatgcaattggtcaatttttccaaaaaatttctctcctaaactagtgtcgagattccagctgttagaaattgcctctagtaacccctctttgccgatccatcttttatcaaaccgaaactttcgcttacggcatggctcttatccgcaatcgtagttatcaccggtgcacgatctgaagctaccatttgtaaatattcaatgaaggaattattaaataaataatgccaatcttcattacctaaagcactatccaacctacatcgtatttggttttatatctcgctaatcccgccaaagataaccaatctccaagatgagggaactccaaaagtctgcaatcttgtatcattaaattgaaaggtataaacgaagatgcatgtggtaatttaccccctcttttttcatgatttccttttaattcattaaaatctcctactaaaaaccaaggagtaccccgagatataccgattcgtgttaaccgtacccaaacttgttctctgttttttggaaccgggtctccataaacaaaggtaagatttattgtaatacctttataaacggcttcaatgtcaattaaccaattactttgataaatgattgtgtcattaaaatcattattataggaaagagctaaaccaccactgcaaccaatagggtcaactgttgttaagtttttatacccaaaatgaccaacaaaattttccatataagaagtagattgttttgtttccgataaaaataaaaaatctggccgatgttttttccataaatcccgtaaataaccgattgttactttattccctaaaccttgacaattccaacttaatactatcttcatataatattttgttttttcaaaagggtgctttgacccttccctaagaccatttccgctagcatagatcctcgggtaaaatccataaccgatttggattttaaacttatgtttttccttatgaaaaccaaggcatatttatataaaagagccatgcataacccattttgaaattccccgtaaaatattccgttaaccattaccgaagttaccttgaaagtaagagtcaaatgacacttaattattaaaattatatttaatttggtcataactccgtccctgataaagaaagaaaaaattacaaccaaaccattagtataactgatgatatttctttggtttaagaatttacaacagtacatgagaaccagaaatttcgaaaccggaacatacaccaatagccaatgggtaaaaaatttcccttgtattattactttgagctcatagatgatatgaaaaacataaccaaactgtaactgatatcttacattgaaacataaacagactataccaaataaaatcggatttaccgaacaaaaccggaaattgaaacaacattgaagagcacgttcttgtaaagaatttatttctatgaaataaacttttcaccactcacccaaccagccaaaaggacacatcactatgattaatgtttaataggaggtttctctctttgatgagaaccagcacccaccgttgggccaccagtttttggaactggtcttttgcgaggtgatgtcagataattcctcttcctagagctaactactgtcaaaaatcttttatttttacccgttttcctttttgcaagtgggtccgggtgcaactcatcttctgcctgacattctccctccatttcctcctcatgtgcttgctcatttgggacattctccgaaacagaaaccatatttacattcatctcagagaccgagttgattggtagcaaaaccacctcatttttgcccccatcaaaatcctcttcatttgcaacgaaaaactctccctcctcatgggttagctcctcaccactactttctttatcctccattgtggtatccataaattgcaaagaagggtctccttcaagatgagaactttgaacaagctactgacttatgtcatcagacaatacatcatgttgctcagccaacccgagagcattctctgccttgctttgaatagacacttcttctggacccgacaaaaatttcttacggtccaccctacttggcatcgtgccactaagaataccttccatattagcacctagagtacccaaatctgtcaccgtcttccccgcttcaggagcaagaaaagtctccagcatcttcttctcatgatccggaaaacccatccccacagtatcttgttgtagctgggattacttatttaccaaaacagccatttgagatgatgaagcttggacagagccacaaatagattccttctcccctttttagccttaataccatagatctgcttggatcggttagagctgtcctgaatagatgcatccttcttatcaattgaactcagtccttgagaaggttcagcaaagacagccctagtcgaacccgaggaagttccaggaactgaaccattaatggcagcacctttgtatctttgaagcgtattatccctctttggatcctctttgaaaatactctgcttccccttgtctccaaagatcggacaacgcatctgctcatgacagagactataacatctttgacagaagccaaaaagtctctcataccacagcgagaccattgtctcttcgccactatgaaactctacagccgcctcaaaacacaatggtttaaaaccatcaagtttaacttggacccttctaaagtccaggtccaccgcttgaacctcacctatatcggaaccgatacaccgaaaagtttcatctgcctagaaatgtagaggcacccccaatacccgaatccataaagtaataagaaaagggtatctccggtccaccacttgttcccacctaaccaaagacaacatccaatgatcaatgaaatggttccacttccatgatctcctagatatcctcttcgtgttcaaaatcgaattgaaaacgaccttgacccaagttagcaccaacaactctatcctctaatttccaaatcttaggcaacatgaacagcaacgacttcatgtcttgcattgctggattcatacatctgccgataagagtcttggaatagccctcgatcaaggaactgttatcaaaacgaggaaccttgatcttaagcttcatggtgttactcacgttgctgccttgattaaccaaaccgctttgcgacatccctcttcctaacccaaacaagatccgaacaaatacaaacccaagagaacgagtaacctgaaaacactcaataaagctgagtagaaacctttgaaaaaactcttgggacactgagactgtgaaaaatgattgcgatgaggacaaccatcagttcgtacctctgatttatacaccagcagatccgctgatgttaattcctggaaccccttgatagaagatattatttccaaaagaatctcccaatattaagtcg

SEQ ID NO: 27977 - DNA, 478 bp, Arabidopsis thaliana landsberg
ccgcgtacaacggaaccccccaagttggaaaaagacaacaatttctcgacaaactacaaaaagaaaagagtactagaggattaaaacagacagcctcaccacacaacgcctatgataaaacaccgtcacattaaagcaaagagatatatctgatatatgattaaaacagtcatccaatctcgatatacccaacatggacttaccactgagatgcttagctctttacatgtttccttccaagttgagatgaacaatttcaaagctccttcagaaagagtgaaatcagcgtcattgacactgaaaatctgcgcatcagaatcatctgccgatttaggtatcttttgtttcacatgtcctctacgcaacttagaggggcctcttctaagcagcttgggagaatcagatttttcatgattacgactttcagccttccttttcttactggagctcccaagctgcttaacctcttcttcagcag

SEQ ID NO: 27978 - DNA, 1783 bp, Arabidopsis thaliana landsberg
acgaaagcgaccgccatttccgtattttgtctccctagcaccaaaattacatgaccatttatttacttacgtggttctttttttctttgcagcagaattatataaatatgcaacactagttagtctaacgctatagatatggatgatattttagatatctatgtatacatttttgtagccactttgtaaaataaatcttggagttgaaatttatttacagtggctgccactgacatttaataattgtttttgataattagaaagaaaatctttgaattaaatatttgacaatcttcccaaaatctttccacattaattacacgattagttactaaaataaaacttccaaaatatttaatatcatttaattactataaaattatcatttttgatattgtttttctacatgaatataataattcgattataatcattaaaccgcaaagatatttgatagcatttaattactacaaaattaaaaaatatttagacaatgattcataaacatatcataaataaaatcagtgagttttttttacgggacggattggcgggacgggtttgacaggacgttacttaataacaatcgtaaactataaaataaaaatattttatagataaatataatttgcaaacttttatatatagtaactttaaaaaataaattctccgcgatataccgcgggttaaaatctagtaagacctaatagagtaccaaggatagaacaattaatacgagtatcgcgtatgaaaaataatatacatgtattctgataactatataaagtagtagatgaaatgattttgattcatgaatctctatgttgagtgagaaaatgaatagcctgagacaacacaagtgtaatagctttcacgcttggacttgtgtctgaattttggaactgatgatgtttgctgctctttctagaagacctgttgaaaaaagcataaatacgctctgttttcaaatttggcaattgatatttgtttttgtacgtgtctatttaatttttggtaaagaacgcacgttgtttatacttacacaccgcccttccagaagaacaggctctcacgtcatttgcatacaacttccatcttctggaaccaatggatccctgttacaaaagttgctcttaaaacataaacaaaaacaaaagaaaagaaaacatttttatatttgtcgtcaataataatggccactttctgcttacatgtatatgaatgtatatattactataatacgtagctgctcgtgtttcttgtctaagttctctgttatagttaggagacaaataaagagaattagagaacagaagaccagaaaaataaagatgaacacaaccaacaacgtgtttgatgtgtcaccgttcttgcttttagaagcatctgcagattccgaagctggccacgacagcgttgacgatgataaatgcgttaaggattacgatcttggtcatgagtcttgtagtgccagttcttgcgagacgtcttgcgtgagtcagagaacgagtttgttaggttttgacctgcaggacgatacggtgaatcatgaagaaagagacgccggagatgaagaagacgaagacggagaaggagaagtgaatagctacataagatgtgggagaagccaacgtgaaaatctggctgtggattctgctgcggtggtgagtgagatggatcaaaatcgaatgttctgggaagcttgtctcgcatcttgatctgtctttattaattaatgtcatctcatcatcaacagagaaaacaaaattgtatatatctagct

SEQ ID NO: 27979 - DNA, 1903 bp, Arabidopsis thaliana landsberg
ctctttgaatcttatttttcgtttagctcctttaacaacattgtggctcctttaaattatcctcataattcttgcttttgactccctagactaaccaataaactctaataaaaaaagaaaaacttgctacattgttttaagaaattttgcacatgaaagcaatcaatcaaacctcgatatttagagaaaagtttatgtaagggagtgtaaccatttttcagatgacatagccattggagatttggaaaaggtagtatatacagaaaattcaaatgcatcttttaaaattataaacataaaacatgtattccaaacccctaagtgggatattaagtcaagaaatagcattacataaagcaaggatcgacaaagactgaaatttgtcaagcatgaagttactaaattttggaaattttgtttacgttaaatttgatcattggttatgcattaaaagctgaaacagttatttagaaggaaaagtagttaacgttcccaaaaagttctaaataaaactagattccaaatgataatgaaaacgtcgcatctactatatgtttggttttaagtttttgttttgacaaaaaaatcatatgtttttggattcttctatgcaaacgaaatataacaccctcatgattcaaatacaaaatacatataaaaaaaataattcaaattatcgaacattttttccatctcccggatttaattcacacattttggcttcaattaaaattccaagaaaaagaaacaaaatgacttataaaagacagaaactagtaacttagatggatgggttaagacttaagagttaagactatctcactttcgaaaaatgatttatttagctgaggtgcggagtggagtggaccttgtgatccttttccctacacgaaagttttttcgtgaccatttaatgtgtactttgtacacgtttcttctcatatatatgattgaaaagggggcatttgtgagcctgaaggtagtagtcgtgatccatgagtgcatgaccatagttttatgtgactttaagatgagttcttgactccgttctacacctttgattacatactcaagtttgcatggtggaaatcagcttgaggtgccatatttgtgcttgagggggccctaagtgcaatggcatggtactccaaggagaacggttgcgtatgtgggttccccattgttattgtgatgtgatcagagtcgcaagataatcgtgagctgatattacttgttgatctagaggcagcgtgcattacctcatatagaagataccatggactttgggaggtttttttggaaattcttccatgaggggtttaccgcgcacttgatacatgtagatgatggttttgccgtttcgtttgttcgctcggtctcattgtcccacaaacatatcttgcatgatgtagttgttgttagtatcgactcaaatatttactctctccaaccagtaaggttttgcttttatcctagccacataaaaatcagaaataaaagtactatttgctaaaaatgaagtgaaagtattgaattaaccgaaatcaatgtattcaaattttgtctcgcttttcttttgtcgactaatatattatcatttgaagataatatataacttttccaacaaaaagattatcgacaatttattgtggtaaatgattttcaggatgtatccagaatcgacagtctaccagtactagaatatatctaatagataaatggttcttcttacactatgctcattatggattctttaatttactctttcacaaaagggacgatgacgaaggagtctctctacagcacgttagaattcttttgataggtttacttccattagtctgaaatggaatcttatttataagtctgcctgaaaaatcttaacaattgatattaataaaac

SEQ ID NO: 27980 - DNA, 3877 bp, Arabidopsis thaliana landsberg
tcaaactcaagccatttatttttcacccttgcccaagtaactttttcactggatgtcgcattataccatcttcactaccattgctgaaatgccatcgcagattctcacccattctttttgatctaaacatcagtttcagtctgtctttgattggaaaataccgaaggacctttgcaggaatccccttcttttcctcaccactgcgtttatccaactcccattttgacgcactacatcttaggcagctttccatctgagcatactacttccgataaagtatacattcgttcttgcatgcgtgaatgagatcgtaaccaaacccaaagaccttcaagaactttttcatctccgtagtggactttggaagcacattatcttcgggcaacatgtcttttactgtcgtcaatacctgatcaaagaagttttctgtcatcccactcttaactttaaagtggtaaaggactgttattgcagaaaccttgttgtacttctgacatgttgagtagagtggagtttcagcatcctctaacttattactaaaatcggattcttctacagtttgacacttatcagatggttgttcatcactaacttaagagtcaaaatacgttgtcttaagcaactcataagcctcttcttgtgaagtgggaacatcaacaaatgttctgtctctcttgtccccatgcttactccaacatggattcctcttatacttcaaatccatacctctgatcactacatgatccaatactgtctctgtcagctgagggcagacatttctacaatcaacgcagggacagaacatctcagtatgattccccaaactaattgatgctccagagacaaaattctttgctccaatctcatactcaaggctattcctaagataatataaaacaacaacacattcaatatcacgataagtaaaactatctatgaaaatatctgacatatgcataccttggcagccaagcccatgccttgtccattttacaccaactcgacacaagagtcccaccacaaattattcatacatttgtgataataagttcaataatcagacactaagatagatagtttattcactggcataaaacaacataaacacaaataaataacaaggtaggattgttatcttacacagataagatgaaacggagaacaagtttgaatactaggattctgcaaaaatagagtgacatgattaagtctcatgaattattacaacacaactcatttataattgaacagatacagagccgtaaatgcctaggttatgattcaaacaggtaaaaatgagaacttaagagccccactcgatcatttggtcaagtagaaccaacatgtgacaattttaagaactaaaatgcaatcaacaggggatacaagtaacaggtaaatacaagtgcaatcagggggtgaatacaaataaatctaagaagaatagaagtcctaaggatggattcattgataagggcaactctagggttcatcaggtggctaacaggtaaaaggcagaaaccctagacgatagattcaaaaaccgggtcaatccactcccgtgacagagacccccataactctaccacttcctaatctcaactctcgttgatgaaacatagcagagcagggtttaagcaacaatctaccaaagctaataaacagactagccaatctcttggtctatagtctataaatctctggatttcgtagatcagacaatcatttgaacgtcttttggacgctggacgtctatggtcgaatttccacattagcccgcgaaaacttcataagggccaacgaatccagaagggatctaacctaatcttaaccacctgactaacctagagattaccctaatctaatctatcctcaagaaccctaatcactactcaagcaacataactatgaacacaaacccagaaattactgaaatcataccaaaatgtaaatctaaacaaactaaacaactttactcaaagaactaaatgcaaaaagaaatagattaagagtaattaagttttgaagattcaagaacacaaagaaaaagtaaaggataaaagcaagatcctttggacaaatcccaaagtgatctattatagtaaaatgttgaaaaccctagattactagaagacaagagacttgaggcggtttgggcgagtgctcgatcttggggatcgagtaaagagggtgctgcaaagtctgcgcctttgtgtctatcctcagagtgatcaattggtcgagtagatgcttcttcctctcttatctgtatgctcagatgtctggttgagtggggaatgaggaggatccgaagacgctttgatagatcaacaagtcttgtagagtaggtcgcccttggtcgagtaaatgggtcgagtagaggatcgagtaggagggacgagtagatcaatctactgcttcttctgaggctgctttgatcgagtaagtgggtcgagtgaattgatgcctcctctatggctgtcttgatcgagtgaactggtcgagtagaatgctctactgcttccctcctggttggatagagtagagggtcgagtagagtccttttaagctccttctgcacctgaaaacacaccatgcaatgcgtatgcaagattatcctaaatgcctaagtgtgcaaaataagacaaaatggtgcaaaatgatatgatacaatgagcaaatgcaaagctaaatgatgataaacacacacctaaaatgagtaaaatacagtgttatcactaccttgaaactccacttccatgccgatgaaagagagaaagaagttggagggttggggtatatcaccttcttggtactctgaaatcactactcccttaccattaggcagctagatgctatattaaagtcctctaccaagcacggaatccgccaaaactttaacaaggaagaactccatgatttgtggttaacaatagtcggtccgcttccctacaaatcagctagggctaagagttcagcaataaggaatcccatgcttagctatctccacctttgtattgcaaatactttcttcccgaagaagacaaccggccatgttaatgagggagagcttaggatgctcgatcttaccttatgcttcattttggggcacacaaggaagcaaatagagatggaaggggataggtctgatacatctctttcggtggtgtttatagatcattttatgagctagcgggaatatgcaacaggcattcaccaatccggttatggaggcagcttgtgtgctggagaagtcatcacaccgatccttgtagctgctggagttcctcttcatgctcccgatgtcagacctaactacattgatatggagtacttgaagagaaaatgctacttggatagatctgcctcagctgatcaactccatttcaagttcaagcaccccacgctaggtctctctaggttagcacttccttgcaaggagtacaccacagttagaattgggaacaacattgactttgatcctccaccatcaatcttagtcaatgtccttgcgcctttacaagcagagtggagcatggggagtgagtcacaagaagaaggagcagagttcaaccaagaagaagctgagcaggaagcttatactcggccgagtatggccaggtcgagtatgaacaagctgagttcagtcgagctgaacagtttgatgagcaagaagactcgtgtgaagctgcagtggagcagtatttctttgaagattatgatgagtccgatcaagagagagatcccggtcaagtccacaagaagctgggaatgcacaagggcctagggaagtttcagagaaaaatgatcagtgggttgaagaagaaggtgagaaagatgaagagggcaatgaacggcatggcggttcagattccga

SEQ ID NO: 27981 - DNA, 1898 bp, Arabidopsis thaliana landsberg
tcctcaccgccaacactgccgtgtatcctccttcgctctgcgccacgccaccacctcttggtaaccgccaacactgccgctgtatcctccttcgcctctaccgccacgaccacctcctcttgagtaccaccaccaactccatagccacaaccaccttctcccgagtaaccgccaccactgctgctgtatcctcactacctctaccacttcctcgtaactgagccattatcacagtgatgctgcgaccatcgagctcttgtccagccaatccctcgatcacatccttcatggatttctcatccttgaatgtgacgaatctgaatccccttgagcttacctttgtactcaccaaaacaaactgatgcttcttactgcatcagagctactggtgtgattagattgtatattgagattagtgattcactgtcactggagatagattgcacggtggctggatcattgtcatcaccggcttcatactcagcagtgccaagggttataaaatcgaggctttccattccaaaaacttcactgtcagtagaacgcctattgaataccattggctcagactcggaaaggatgttgtgaagtgaactaaagtaacgcctacgggcatttttctgtgatggttcgtttgttctttttctctttcttcctttgctttggttcttggggtggtggagcttgcatttcaatccttgagagcatgatccagtggcttcgaaaaccgggcagttgtaggaatgcttcttccgacactgtgaccattatgtagagacaatccgcaatcttcatcatgtgtttgcgaattgagatggagaaaaaaaatgtatgacataaagccagagagggatctctttcccttatactccttatggtattagtatacttaatatgctactgaagtaatcaaaagaattagataggatcaagggcactaagagagtcactagcagtgcaaaggaaaggtggatatgcatgtcaacacgtattagatgccaattttaagtggaatccttacctcgtctccttcggaacagtatccctttaaaaacccatcacatataggggcgatcggattgacatgcacatgcctatatggacatgcctcattgttgcataggcctgcattataggtattagtattgtgagtagccgcaatgggatcttagtacagtggaaattcttaccttgcagataataagaacaatcaggcatcctttctggaatgacctgtggaagaaataagttatccagttagagatttctgtaagtacaattatgcagcaatgacttagtaggaaaaccttgtgagtcaatttgcaatttgcatttgcacacaatccattcaaaaatttggtgcaaacagcaattttcgagggatcatgaacatagggacattttccgtcatctttgttgcatttcccaaatcttgtgaaaaactggcagtacttcttctttttagccaaccgcaaccgggcattgtgcaggctccatctgactttctcatttgccaacacacgagttcgtttctttggatctctgacaagctggttaccattcccgaaccgaacatatctgcaaaaatagattcaaatgttcaattgaggctccagaatgtggagtatataaatagataaaatgcattgagaattacgtactcttcattgccgatcaccaatctctttgggataaacggtcttttcacaccctttccattttcagaaggtccagagcacggtgaatcaacatctaacaaaaatttatgtttaagctaatgagagatacacaagggtcagacttatacaacgagagagtcctcaaatccgatcaaaacattttgttgagaaaccacaatcacctatagggtgtgaccaggatataacacgtgtgtgtgt

SEQ ID NO: 27982 - DNA, 1558 bp, Arabidopsis thaliana landsberg
gttttcccaagtatatttataggaccctccataatctcaacctctttagcttcaacattgtaacattggtgggtcacattttaccgggctttttcttctttgcacttggtctttggcacctctttaaccacatcaaaatattttctctacacccaaaatcgtacatagcacctttatggttccccttatcgaaaccaagatatttagagcctcttgtgatcattatagcctcctcactttccatttctgtcgaactcttccttggccaaaagaatcaccaaccatttgatcccaatgatggaaccatcccatcaaaccatctccataactttgaacactcttgcatctccttcaccttcatcacctatgcagctttcgccatcgtctttgataaaacaagaccaatagctcatcgatccctcatcaacttgatcgcggccctcgccttcgcccaacaactcttcctcttccatttccactcgtcagaccacacaggcgttgagggccactaccatttattgctccaactcgtagttttcgtctccttggtcacaacactcttgggaatcgccttaccaagtagctttttattgagttttgttcggtcacttagtgtttccttccaaggaatatggcttatgtcaatggcttgcatgctttggacgccaagtttagttcccaaggattgtttccttcacattgaagagggtaaacacaccattagatgctcagacgtcaaagctcttcatagagcaatatcattggttaatatccaattcagctggtttcttgtgatcataaccatctttgcaatgtggttttacatatttttgcaaaggatctacggtgagaaaattgaatactctcagcttcgaacaaaggattaatccaaaaacatggagatcatgatcaccatgactgaagttcatgatgctgagtcacaaaatggagtcgagccactagtttgaaaatcattcccactaaaaactaccaattttcttataatgttttcttatttccaattcagagaagcttgatcatttgtatatattataaaaacatattgtgtaattattgtaaacgaccactaaattttagatgagacgtggcaattacgtctacaattttcttaggtctaaaaaaaagagtcaaactaatctcaaaaacgattctctacaaaatcaatcaatctcagaagtcttctctctctctctctatcctcaaacaaagtatggccctttatcctttcttcatctcaatcttcatcttctctttgaccctcttcactacgacgacccattccctcaacgaacccgacccggattcgatttccaccgtttacgaactcctcccaaagtacggtctcccaagcggtctcttaccggacaccgtcaccgatttcaccctctccgacgatggccgattcgtcgttcacttgcccaattcctgtgagattgaatttgactacctcgttcactacgataagaccatatctggtcgtatcggttacggttcaatcaccgagctcaagggtaggggatcctctagagtcgacctg

SEQ ID NO: 27983 - DNA, 1190 bp, Arabidopsis thaliana landsberg
ggaagaagacccggatcgagaaacaaagatcagtgaaagattacgatcgtggccgagcttccccgtacttatcgaagcacggaacaccattgagatcaaacattatcgcatctactccgatgagatctaacggagttggatcaactcctataagatccaacatcatcgcaatgtcaccgatgcatcccaacatggttggatcgactccaatgcgaactcctatgcggtctaacatggagggttcgactccaatgagatcaaacatcgtcggatcaaccccgatccgatcaaactacatggctacaccgatgagaactcatcacgattttggtacaccagtgaggaatttagctggaagacgaatcttaactgaatcggagttaggaccatcgccatctgaagtggctgacaaattggcgaaagatagatcgcacgaaacggaaagttcaatactcagcgaatggagcatcgatgaatctagcatcgaaggattgcgatcaaaactcgagagatggcgaacagagcttccaccgttgtacgacataggaacaagccatataagtagcactgattacgatggcgcgagcgttccagctgcaactgccgggggaggaatgagttcaagacggaaaactccgacgacgaaaaagcataaccgccgtcacacagatggaggtaatggacttttctcgtgttttagtaagatttgtggtgtggaatgcagtttcgtatgcggtggtggtggtgggccgatggtctccgaaggatctactaagaaaggtggagccggacgtgtgcaacgcacatattccgctgacgatctgagctttgtgtgatctttattttattggtcttatattaacttttattttttttggaaaactatattttttaaggatctgagctgatgaattaatcaaatagtaaacaaaaattaatttattaatgttgtgttaataaatcatttatttttgtgtattcctcttcttcttccttatttttaaaaaattaaaaaatgttcttcttataatatagtgtttaatagaaagtgagctcacacaacaaaattagaaaactgtgaatgaatgtaagagagtgagtggaataaaaaaaaataaaaatgaaatgtaagagtgagtgaacatatgttggtattgtagacaatggtgacttaaaattataagaaacat

SEQ ID NO: 27984 - DNA, 1717 bp, Arabidopsis thaliana landsberg
  unsure (1)..(1717): unsure at all n locations
tagtgtgttgtctgaagtgggccaattccggataggaaaggaagataaacacatcaatgcagtagggtacgtgcctaagattatatatacacagaccaaaaataacgccatttaagtctctctgactgacaccaattactaactctcgcacttgtaatgcaaagaaggtattgaactgtaaaaacggaggttctaattttttactatcaacggggaaagtactaaagacaatgagtgggacaatcagcagctggctcacacggaaactcttaacttctgctctgtaccaatgcaaattgtgttataatgcaccacaccctcctgtacagactaagagaaacaaaacaaggccaaacctagctgtgtaactcattaggcactggaaccttccgggcctctaggacaggacaataaactatagtgtctgcaaaacgcttggcaagaacatgtgtatgaaagggaaaactctctgtaaatatttctcaatacaaaatacaacacgaaactgtttgtctaggagaagaaaacataagtgggtagaggttcctctcatactactcctatgtctaatatgtaattaatagtgtagagcagcattgagcaagcacgcccaaaacatgtcaataatgcatgatgtagaaaagttggccagcttcaatcaaacaaagatttttaaacctatcacagaaataacggtgtggaaacaaaacttaccggtatgtttgtcttcataccaatacaggttaccccattatgctcaaaccccgtcaatttaatcgacgtctcctcaggagcaagtctcactacacagaggttaacacaagcctcagcataaagaagcaacatatcatatacacttcaatatgttaacagatcatagaaataagaagcactaacgattaaatcttttctttgggatcttgccctcgtttagtgaataaagaaactgcttcactgcttcagcattgaatctagcagtatactaccataagtaaaatagtcagatgaatacgattaaagacgaaacaaaggtgaaaatgctattctacaggaaccatgaggagcacctgaaccacaaccacatagtattttgagttgtttggatcactgcaatccaaaatatttgatgcagcttgagtattaacctgtaatatagtccccatctcgtgaggaaacaaacacaggcacagaaattcaataagtagtgtcacaaacacatatcaactaagtagtagaagattttaaaattgttccataaaatacactaaatccgatagaattcaattatatagcaattgaagtaccagaacaatactcttgcagagatggtcgactgaggaagcgccgagaacgtcgcgacngagattcgagaggccagtcatagtaatcggtagcaactctcttgaagcagaagtcgttaacgccgccggactggagaatggtggagaggcgagtcacagtttcgttttcatcaaccggtagagaaggcgacggagcagcagaggaattctgtgggagaaaagagctctcaagaatggagattttgtggaggatttcaatttggagtctctcaagctctgccgctgcagtttccatgccttctccgtcgtccatttcgaattgccgatcgtcgccgcagcaaaaattttgtttcgtttcttacgtttgatttcgtaatcatctgtgctcgtgtctacggtaaattagaaaggaacag

SEQ ID NO: 27985 - DNA, 1357 bp, Arabidopsis thaliana landsberg
cccagagaagctaattctataacgaatcttttgtcttccttaaagctttttctctgtgtatttggctgcagagtttttttgatctttgaatcttttttttgtccctgaaacatatgcggagacttttcctatacattattttttgctagtaatgtttcttaacttgatgctacacactatttcaaaagtttatactgaatatcttttacttcccaacatggagatagagaacaaagaagtggtagccattttcaaggggatctagttaaccatctaatattaaagcgttgtacaggaagaggacagacaagagagaacacaaaaaactaagctaccaactctctcttgatgggttatatcagttcgaaaaactgcagcagaagaattctacacttgatgattcttacaagtttccatgtaggaacacaatcagtaacaaggccattgctgcaaacagggaaccgactgatttgtgcgagccggtattgggcagccaagggtaagaatcaggaggaggcatcacacagttatctccattgaaatagattcttcttggaaacgcccaacctttctcaaatgtgaaagctgatgcttctttctggaaaagtagctcagattgtacattaccaaatggcccagcttgcatcaacagatcattgtagaactttattccccagagaatcccagtatcatctatatcaaatcaaaaacaaaaaaaacacatcaagatttgttcctttctatagaaacaagggactgatagatgatggtgtacttacttatggaagcataaggagtcagaggtttatagttgaagctaaaagtctgagttagattgtcgaaattcggatgctgcacgacgagattccactgtgaatagttcatgttgtagttgaaatttgtgatggtgactttaactctccagtactgtttgtagttgactttcacatgccagtggattctaactggacacatatgctttgtacattggaccagaggcggtatatatgcgttcttccccggatttggaatgactgatgctatccgtggaccttttgggctgtgtggacagacaagacaccaaaattaaccaaacaagttaacatattttcaggtaatgaaagttatgagaagaacttactctacacaattccctggctgagaagtgtttctgcatccacaagagcatgttggacaagaaactattgtcttgttataaaacgatgaaagagatacacagcaagttggtgttttctgagctaagaactgcgagtatgtgcaagttacattccaagtcactgtcacagcagaaaaagaaaagccaaaactcagttttcatttcactcaaaagtcactg

SEQ ID NO: 27986 - DNA, 1886 bp, Arabidopsis thaliana landsberg
tacttattccttcttatctcacccactctctctctatctctatctctaacggcatagttgactcattgttctccggcattgactcgcctgagaatcagaaagcttagatcggtgagcttttagctccattttctgtttatttacatattatttcctttttttctctctcccttttttatctggaatttgttctgctaaattttccagctgttacattttccgatcacgagaagaatcactgggtttttatgttaatcaatacatgttcctgttttctgatcataaatctcagctattaacacctgattttgattctgcgtaataaaaacctctgatttgcttttatcttcactttccccataaacattgcttactttattcgctcttcttttaccgtttccagctaaaaaattcttcgctattcaatgtgtttctcgttttgttgatgagaaaaatatctgacaaaaaatcatttattgcattttatggtgcagattcttagttaatgtcgccttctctaaccaagtcagattaaaaaggagtgttcgtccatgttgctttgttttggtgtttggagagagttttcggagagttaggtgagtgttatttggggtgaggtagtgataaggtttgaagggggagtgattcatcaagtgtgttatgaattcgagggctgatccgggggatagatattttcgagttcctttggagaatcaaactcaacaagagttcatgggttcttggattccatttacacccaaaaaacctagatcaagtctgatggtagatgagagagtgataaaccaggatctaaatgggtttcctggtggtgaatttgtagacaggggattctgcaacactggtgtggatcataatggggtttttgatcatggtgctcatcagggcgttaccaacttaagtatgatgatcaatagcttagcgggatcacatgcacaagcttggagtaatagtgagagagatcttttgggcaggagtgaggtgacttctcctttagcaccagttatcagaaacaccaccggtaatgtagagccggtcaatggaaattttacttcagatgtgggtatggtaaatggtcctttcacccagagtggcacttctcaagctggctataatgagtttgaattggatgacttgttgaatcctgatcagatgcccttctccttcacaagcatgctgagtggtggggatagcttattcaaggttagtcaatgtgagtgatcaaatctattttcagttttttttttttccctttcttccgttcttgcagtacttagagtagaacatgaattagaatatcttaagaaagtcatggttttgaacagatggacctccagcgtgtaacaagcctctttacaatttgaattcaccaattagaagagaagcagttgggtcagtctgtgaaagttcgtttcaatatgtaccgtcaacgcccagtctgttcagaacaggtgaaaagactggattccttgaacagatagttacaactactggacatgaaatcccagagccgaaatctgacaaaagtatgcagagcattatggactcgtctgctgttaatgcgacggaagctactgaacaaaatgatggcagcagacaagatgttctggagttcgaccttaacaaaactcctcagcagaaaccctccaaaaggaaaaggaagttcatgcccaaggtggtcgtggaaggcaaacctaaaagaaagccacgcaaacctgcagaacttcccaaagtggtcgtggaaggcaaacctaaaaggaagccacgcaaagctgcaactcaggaaaaagtgaaatctaaagaaaccgggagtgccaaaaagaaaaatttgaaagaatcagcaactaaaaagccagccaatgttggag

SEQ ID NO: 27987 - DNA, 1307 bp, Arabidopsis thaliana landsberg
attaacccctaagcttttcctatactctctcttacaccctcctactttattatatagaaatttccccataacgttaatatgtctaaaatacccctgactatattctagaactaccaaatcaacccgtcttgttcgccaagtcgctttgatctaaaaagctcttaaactattcttccagcgaccggaagaaacgaataatcggaatcgaaaaattcgaaaaaggaactgagaagaaacagatctgaagatggagtgtgtatttggtctagttgggaatggattcgctatcgtggcggcggatacatcagcagttcacagtattcttcttcacaagaacaaagaggacaagatcatgactcttgactctcacaagctcgtcgccgctagtggtgagcctggtgaccggtaaaaaaacttctccgtctctctctctgtctgtgattcagtagtagtagtacatgaatttgatttctgtttttttttggatttactttagggttcagtttacggagtatgttcagaagaatgtgtcactgtatcagtttcgtaatgggattcctttgagtactgctgctgctgctaacttcactcgtggagaacttgccactgctttgagaaaggttctaacttttcttctacggttttttatttttttatttcagaagtttctctgccttattttagatttggggaattagggttttaatctctttgaggtatatatacttttatgaaatagtgagattgtggggtatcatcagatcagcgattggtgcttagtgcttattcttggttttttagtttcctcttttgatgcaatgtagttgaacttgtctttcttctttagttaaacatgtcaatttttttgaagctttcctctgtcatactatggctttgattgtgttgagagggttgatgcttaatacttgttgatcactttatataagccttcgtgtttcacttcctcttgtatggtggtgtaaaaccattgttgatacaggtagatctaatacttgttaatattcattacctcagagtagctaaatgccattagaaactttacctaatgtgttcattatgtagacatagtgtggcctttagaaatattcaaggtatttcagactattctacacattgttgcagttttatgtccttggatgttacagaagactatctttgagttggacgaagttatgaaatttagaattatgatgcagaaaagatgaaactcggattacagcttaatagtttttttatgccaagcttgatcagtaatattatttcactaactaagaatttacaagact

SEQ ID NO: 27988 - DNA, 1580 bp, Arabidopsis thaliana landsberg
  unsure (1)..(1580): unsure at all n locations
ggtaaaaaaaaggccaagcgaaaagattttatccaagaaaaacaaggaaaatttacccataccaggaagcattgtatcccgagtttttattgccaagtttcttccaaaaactccaccagcagttttgtaggaggttaactccttgatgattttatcttgaatcttgtcgtcaggaaccaatctctcaatgcaatcgagcaccgatagaataagctcactacgcatttcttcgttggtattataaaagagttttggattaagaaagaaaccagcagcaagcaaaggaatatgctgttgttgctcccaccatcgatctataattttccagtatattatgtaatcctccctattaaccagatgtgtcttgattgcatcctttgctcggtacaatgctgcatagacataccccattgcaggtctcttttcagaacaaactattctcaaagcccgcaaaagaggactcgttaaatggtttaccaaagctactgccttccaaaaggcttcatcagtgagagcattcatcaccaatccacttggttcttccgaatatgaacattcattccactcggccgaagtaaccatagcctgcagattggttttgagctcggctattcttcccaatgtagcaaaatttgtggcagaagagctaaatgctggtagcagaatatcattaccagaagtaaatttccacatcagatttaaaacaccactatggttataaacaaatcttgtgatagcttgagcctgttcaatagtctcacttatccagccaagtttcccaaactcctcgagcatctggtctatgcaatgtgcagcgcaaggaacccaatatagagaaggatacacaagcatcaaccttttcccagcatcaacgtagtaatcatcacattttgtaatcacttgaacaacattggtactgccaacttcttcaaccagttcgctaagtagctcaaacaatttatcagcagaagataaaacctcagatgcgtccacagatttcagaaacactaccttttcagggcaataaaccaaaaagttaagaactttaaagcctttatcagagttcagttcctcaaccaaaatagaacagccagtcctcttccacatcgctttgcattcannnnnnnnnnnnnnnnnnnnnncaacacaattcttcagtatccaccctcgaaggtcatcatgcgtgggagcagataccccgaatcctccagaggcaatggcatcgatcatcggttggaaattaacagaattcactgcatcaaaatcagctccaataccaaacaaaaaccttccaatcgccatatgaattgtattctccctatctctaaaggaaggatgcacaatgttcttcacactactaatcgcaaccggaatcaaattatccatatctctaccaatcaaatcaacattgttactcgcactaccattctcaaaagcattctttttactcctgtaagtcctttgctttgttctgccactcaacaagctctcgttntgcacaacgacatccgaactacccggcgacttaaacccgtcatttacatcaggttgaacgaccatcatatctccttcaataggag

SEQ ID NO: 27989 - DNA, 2554 bp, Arabidopsis thaliana landsberg
  unsure (1)..(2554): unsure at all n locations
gaggaaatgtttgatgactctcacatactggtgcatgttgtactacaccatagtgccagaggggggacttgtggtcattgggccaatgtgaatcttctatccacagggtaaactatattacaagcttgcctttcagagttttgagatcacagttgatatgattttcttctgcttttccattgcagagatgaaaacgtagcagaaggaattctcaagctggtgtagtcgatgcttccgagaaaaaaaagaaaaccaaagacatacttttgctgccagatagaaggtataacaacaataacaacaaaaaaaaaaaaagacaacaagtgtatataatatgttgattttgagcatgcttatgaatctatcgagatccataattgcaggagtttagctgcaaagagtgaaactgaagctagatgaaacacaacccatgtatagctttcactattggtatcgttcaagccctgaaatactactttgttgtgttgacaactttagttggaaaaaaattgagtatatctagaatcattggaggtaaaactggctctttgtatagctgtcacaattggtcaagccgtgttgactctttacttggaaaagaaacttagtataagtagaaccattggtcagtcgtgttgactcttatagattgctctttgtatttcgaatcttcttgtgtcttttacattactatgtacatgaaattggtctaattgctctttacctgtacaaggaaccatatagtattgatctaattgcctttatctttgtttggtgatgctgctctctagaaaccctccatggtgacttacaaggagccacataacatagttaaaactaacatagttgttactctgtggacaagaccctgaaaccagagaccaatttgacatgaataaattaatggggcaacactaacaacagaaaagaatctcagcaaggtttatatcataccttgatgactaaggtgtgtagatttggacaactcttgaggagaagtggcattacttgccaacctttatccttgttactctcaatagataaattaaggaggttgttgaacacgggcatggatttacagcagaaatgaaacacctggattttaaatatcacacaataagaagactttgcaagctagaatgcacttcaaattgaaacaataacaagtaggggaaactaacctcgagagaatcaggagacaagtgaagggttttaannnnnnnnnnnnnnnnnnnnnnnnnnnnnnnnnnnnnnnnnnnnnnnncatctggatattcctcctcatcataaacactatcacagtcaccataaccaccagcttctacaagggaacctaaatcaacctcataccaatccgggacatagctagaatagtcaaggtacacgagatttggtgtccggaaccaacaaccatcgtgtgcctcacggtaattgggaaaatggtgaacgatggttagtcgtttgatggaaggactcgaaactagcgcattccaaaccgggggaatttcaatttcatcattacgtagtaagaattcctcaagcaaagggcagccagagatgaaaagttcatacatatcagaatctacaaacgtcattagaacgagagagagtgttttaagctttgggaaaaacacgccaccaggaggaagaagaccatcaggagaaaacccaccggttatagtgagctcaacaagtgtgttgctcgtgaagaactcagtgtctatagtatacaaactttgagcgttcaagtaaagttgcaagcagccgcgctcgaggaaactgcgaatccaagtgttcacttgagactcgccatactggaattcaatattcagagaggttctcttaatggtggtagaatttgttaagagggcaagtgttttatctatgaattcagggaagcctccaggaccaccaattgcgtcattgatatcaagcttgtctacaagagcaagcagattgttccaccttttagacagaacagctgtggaagagcacgttttgtcggaagcaaagacaggactttgccaagaatttcatctggcagactgctaattaaatctctggaacccatatatagaacctatacaaggagaatcaaaaaaaaaaatcgattattagaacccaaattaagttcagacaggtaaaatcaacagatctaattgatcaaattggtgatgatttgagattttaataataaaattaaacgttaacttacgattggaaacgaaacgcaaaagaagggatgtgaaagaagaagcttgcttttgggtgaacaggaagatcaaagaaacagcttactttttgggtgacgacgacaatggatttctcaagagagagagagtcggacaacgagaactccattttattttattttcctctcttatatataataataagatagcgatgtcacctttttttgtttttctcatcaatcgataatccctggattccaacatggtttatggtttttggttaaaaagccaaacaaatttgtgatgtttctttccttgaacaatttaatggttgtggtggtgggttgtttttccatgaatgg

SEQ ID NO: 27990 - DNA, 1956 bp, Arabidopsis thaliana landsberg
  unsure (1)..(1956): unsure at all n locations
tttttaaaggtttgttcttgggaaagaaaaatgattttttctaaaggaaataaaaagaaagaaagagcgggatcaatttaggatttattttggtgcacaaacaagaaaatttgtggcgaagagctaataaatagattcagaggagaaatagagagagacagagagcgagggacaaaaaaaaatcgattgataattttttcggcagagtcgagaaaattttgatatattaatatccgtaattccttaaaaagcctcctcctcttcgtcttcttcttcttctcctccccagtttcgcatcattctcttcgataaccgccacatcctctgaaaccctaatctggagaatcgccgccttctccagaaaatatctatttctataccttgttcctttgatttccaggttcgaatcaccgcctcctcgtttctccatttccgtgtttgtttgttttggtttcgtttgaatctttttgctagatatattcgttgtctttgggattttgattgttcttggcattttgaaattgctttgcagattctgatgaaaccggatcggatctttctctagatccgttctaggtttatcgatttctttctatcaatctctcgcatccggatgctttttgcaagttcttgaagcggattcatcataaatcgacagagaaatgtcgcaggctccgaatccagaagaagaagaagacacgattgaaatccgcgaggtttggaaccataaccttgaacaagagatggctctgattgaacaatccatcgacgatttcccttacgtagccatggacacagagttcccaggaatcgtttgcaagacagtaacggcgaatccaaacccaaacccatactctatacactacgaatacaactacgataccttgaaggcgaacgtgaatatgctcaagttgattcagctcggtctcaccttatcagatgagaaaggaaacttaccaacctgtggaaccaacaagcaatgcatctggcaattcaatttcagagaattcaatgtcatatccgacatgttcgccttggattccatcgaactcctccgtaagtcagccatcgatttggagaagaacaacgaatgcggtgtagacgcaaagagattcgcagagcttctaatgggttcaggagtagtgcttaacgataagatacattgggtgacattccattgcggatacgattttgggtacttgctgaaactcttgtcagggaaagaattgccggaggagatatcggacttctttgatcagatggagaagtttttcccggtagtgtatgatatcaaatacttgatgggattctgtactaacctctatggaggtctggagaaaatagcggagttacttggtgttaaacgagttgggatttctcaccaggctggatcagatagcttgttannnnnnnnnnnnnnnnnnnnnntgaaagagttcttcttcactggttccttgctcaagtattctggttttttgtttggattagataatcctcggttgctcactggatccaaaaattaaaattgaaaaaaaaaataaaaaaaaatgaaaaaatttaaaactgttttttggtgtctttttggttaggctgcttttaggctatgtggaattacaaaataggtgttaagagcgtatatgatgcacaagaatttagtcactaaaaaggttattccatgatcttattaggtgaagaagaattgtagaaatgaaatcatgtatttaacatttggtttagtgagtttgattgttatggtgaaatgattctgcagttttcttattatcaatgataccatttcgtggaattgcgttttatatttcgcaaaactattgacaataacaaacaaatttcagttgtttacaccctttgtttgtcaaccacaacttttccaatgattccactaatccacgttgctgccaatgtctaatatcgtatcaattatcaaaattgtgggag

SEQ ID NO: 27991 - DNA, 2085 bp, Arabidopsis thaliana landsberg
agttttttgcctggttcagaatggcacaatgttaaataaggttctacggcaattccaagcaaaacgcactatagtacctctctgatccagcgagatcaaccaagttcagtcttgcaaaacgcatattagctgttgagtctttttcccatctgctctcaatcacgcatgtaaatacactatgtgatcggctgctttctctgttcatatttgttgctccgactcttcgattcaaagaaccctattgtacaacagataagatctcaggaacattaaacataagacaaaactgtttggtagacggcaatactaacctgtgtgataagccctaagatgtcttgaacactttgtacttcacattcagtgagattttccacatagacaccgctcttaatgtcctctcgaagctaaaaagtgaaaacacattagagaactacgcctttcgcatctacttggactttcaccaacaaaagaatataaaagttacctgcaaatttgttgaagacggttcaagaaggtctgtaatttgttcattgtaaatctcaaggaaagagcatttgcaattgtatttaagtctctcgtctcttctgctctcttcctcctgcaacaagaacaatgaagcaagatgcaattagcaaggttaagatatctctgtaatagatatggtaaaagctatatcataagagaattacagcttgtattcttgcaaataaaaactcaaatatccgaggcatcattcctctgttgggacttggtttaaattctaaatcaccgacttctccaagcattgtatatgtctttccacttcctgtctgcacaatcccaacaaattattgcaagttaggaactgaaagaaatataaggccaaagaaagaaactatccccactaactcctattctgaaaatttaactatcccatctgattgtaaccttgtcagaattaacaaataatttcttaaagaggacatgatattagaattaagtgtcctcaccaaattacctaaattgggacatctttccagctttatcacaaaacaaagaacagctttaccatggtcaccagaaaacgcaaggcttaacagaaataaacttgctagtgtttttagcttgagcctgacccagaggtagtagatcactctcataatctatctctagaatcacagagtaatatacctggccatatgcaaatatacagctgttgtagccagacaagcaattttccaccatggggagaccagctacccgaaaaagggtttcctacaaatttaggatgcaaaaaaatactttcacatatgtgaagaaaaggaaaccaaattttctgatttcgttctgagtcttacctggtcaattgtctcacacgccacatgatcgaactgaaatcgtgtttctggtggtccaatccatgctacgcattgtgaactttcttgctttaagcacctattgtacccatttatactcctctccatgctattaagtggtcgtacacgtataagaatctgcaattcattcagtaaccatcaatgtgtgccgcctaacagaaacttcttaaagtcgaaaacaagttgttaaaagacacaacttggtgcagctaagctaatggacagtgaacaatgagaagagtacagcaattcaaagactccaaaagaaacgaaaagtaaaccatgggaacaaattgctacctgtacgttgtgatccatccagaaagatggatcttccttaaggctaaagtgaggaacttcgaccgagttaacaactgttgaaacttgtccagaagaactagacaaacctttatacaacgaggcataaccaccagctctaacagttccagtcccatctaacttccctctgtaacaagatcctggaggcttagatacactcttagtaggcgtattctgagtcgaattggtctccgaataagctctcccaacaactctaccagttttaggagtcgtattcaacaaagccgcgttcgttgtattagtgatagaatcacacttatctccccaaccaaaccgattcttagaaaacgccgctgcggatcgatacttatcaggcgtccgtaaaggcaatgctggatctgggttcttt

SEQ ID NO: 27992 - DNA, 1068 bp, Arabidopsis thaliana landsberg
acagaacatggtgtgttgagacgttacctgcgattgcttgggatcctgggttaacgggtcgcagtcacaatgtaggttgtggtggataaccaatcgtcaataccttgtgcacggacactgaagtgcacaatttggcagccccagttattagataatcatagggccatatgactccataaccacactgatgaaagagagcagctcatatgttttgtggcctttgttctggtccctggactgacgcgctggccaagaagctattcggctgatacatacaaactgtgaggtaacatgttgctcagaatgtattagccaattcacataggcgggatgttgatgcaaatctctaagcttcccaagagcgaaacaataaagctctttaaacgaacttaagagttaaaaagaagagagaagaaatgattacgttgtcgaggaacctattgacgagctgagtaagttgcaaaggaccagccttttgaggaatatacatggcagaacctaaatgagttccttctgggtctgttaacagacacatcactgtcttcccttcgtctgtatccatcatggtcatcgtcgacgatgagcttcgcaaagacgacctgtgtgaataaggtcttttctttgcggttcttctaagtgaagagagaagagggaagaagaagctgactcaattaggtcatttgtttttttgtttttttttcctcaccgcctttaattaatgggccgaaaacccgattggcccaaaaaaaaagcatcaaatataaaattaactacatcgccgtctgtgggcatcgaacccacggccacgtggttaaaagccacgcgctctaccactgagctaagacggcttcgatgactaattgattgattagtcttttttatatacgcctgtctttttgtttggttcaaaatataaatccaaaaatatgtattttagataattcagtgattttgatccccaaaaaaaaagataagtcagtgatatgtatacttagatagttggattggatctaattagcacaatgccattttttggggttgtcaacatttcatattttattagagaga

SEQ ID NO: 27993 - DNA, 746 bp, Arabidopsis thaliana landsberg
ttaggggacagttctgcttggcttatgtgtgggagagttttgtatgcctatgtgtgaaagttgctagttgtaacattttgagtaattgagcttctcgtatttataagtacatgtacatataatatgatatgtgtttatatattcataaaatcatatcatattgtagtttaagccttcttaagaaaaagtgaaaattcccaatttttatcatctcatatgatatattgttagagtttttttcaatcagtaatatattgatgtaaatttgtgatataatcatatatgagattataatgaagtatatagcactctaatgaaccaaattcaacaagtaactatctcaactgaaatgagaaaataattttatcctagctgacacacaaggaaaaatccaagacctaacattacttgttgtctccttgacaaagactgataccagttgtctcccttctttttcttcgctttattctttgtataatataacttgacaaagactgatcatctcttacaaaaaaagaaaaagaaaaaagacaatgactcgatcattcacgtagaactataattcactatcttgatgatctgaaactcttatgccagaccttaacagctttggtgcttttctcgtgaaacttagtttatctatttttcttatagaatatttttggtttctaaaatttgaagaattacttttttaagacaatgcttgactggctggctggttccacttaatgaactgcatttaaacc

SEQ ID NO: 27994 - DNA, 1282 bp, Arabidopsis thaliana landsberg
catcccctcttgtcatgactattctgatggagcttcggttttggtttcagtcgatttctttgtctcttcatcaatcatttcattggcttcaatctctaaacctctgattgtttcatatgttcttgtgtcttttgtctctacactatcctcctcctctctagcctcatccatgaccacaacttctggagctttggtttcggttctctctgataaatcatctgcagagttgttgtctccttctttgatgaactcgcctatttctaaaagcttctgcgcttttaattcgccttcttcattaacattgtctgctatctcagcttctgaaactttctttgcagcttctttcaccattgcagcatctacttcttttgaaaccaatttatcttccggagcttctctcgcggtttgctccaatgtaacagcttttaagttactcgtctctggtttttctttaatctcagcttcttctaaggctttcttttctgtattttcaggtttatcggattccgagtcagtaacaatctttggtttgatttctaaaggccccagctttccatcaatttccttgaccagatttgttagtgatcttgcattacgagcttcagataacctagtagacaactgcaacataccacaaaaagttttaagcaaaaagtcatgttttgcgctcaaagcagtttagctcagaaaggttgaaatggagaaaaatgtatttgctgatatttcacctgctgtatctgttcagctcggggtttgagatcatccagagatgcttccttgtaaatactccgaagaatgtacatcaaatgagagctaacattatccaaatgatgttgttggacctcacattgatgtacatcagagagacaaccaacagaatgaaatggacagttgacaagtttcataggacatacggttatacaatgcctatccatttcacgtcttatgatactctctgagcagttctgctcacacggaatgatcttgaacgggcatacacaatcgtgattcttcatctgattcgcacaaaacaccgcagttcaaccctcattctcacagttcattgttctatacccacaattcatggcgtgctcggcgagttctccttcggtttggaatttcatctcacaatgtgcactgcttttaaaatcaacgtttttaagcaaagtctgagcgataccttctctatgatcagtcaaccaaaacccgcttatctccatctcttgcgcgaaatcatcgatattatcttctctcctttcgctaagcatccaacccgaaaccc

SEQ ID NO: 27995 - DNA, 2729 bp, Arabidopsis thaliana landsberg
  unsure (1)..(2729): unsure at all n locations
gctctaacggtttccaaacctagctacctgagacttttatcgatattgtacatgaaagtgtcaaaacaaactaacccgcttcaatttaacacgtcttaaaacggattaagataatttacaaactctgaaggacctgccactttgcgaataaatcctagaaacatcaatttgaacatgcctcactttacaattgtcgattcatgtctctttttttacattgcaacacttttcttatttagttgtttttaggtataaacatattctttaaatctatattttatataagattttgcgcaaaaaaaaactaaaatcgttcatttttacaactttacccgtcacatccacaaaatgtaaagtaatgatatgaagtccaaaataatatgcaacataataagattgagagagtaataaattttgacgacaagaaaaaagaaagacaaacatgttccatacccaaaaatatgggagccttttttaaaattaacatttgtattacttgctaaactttagtttaagaaatacatataaattaataccttaagatattaattatacatcaacatttttattagtattttcgccaggaatcataataatagagacgaccttgtgaactaagactcgagtaaaatattcttccttttttatttttatttgtatttccttaatctaatcttcttaaaatataaaaatccacattatctgtcaactttttttttttttggtgcaaccaattttctctcaacatttatcaaaagaatcttcttgtttggaaataaaagaaaatcttgttttacaattctatcatcaaacaatccgatcccttcacgtgcttctatttacgtcccctatttgcttgggactagaagatatgtatttctaatttatcttcaccccaacccaatctaaccacatccacttggcacttctgagctgtcccttcccaccttgtcttaaccaataatagtggactcttcacaatttttacattttcatttttacctcactacttctctcttatttctttaaccccctcaattctttcgattggctccaccagccccagttaaaaaaaaaaattattaacttctaaactttttaaaaaattggacaaaaacaataaataaagattattgactaactaaaaacatgattttaaatcattgtagattgcatcttttttctcttacaaacaaatcgttttggaaccatatacatttttcgaattaaaatatagtttaagagacgataaaacatatgaatgtgaagaataaatcaaaatgttgagtgtgtagataaacatctagataaaaataaaataaaattggacggctttaacaaatgtaattgactcttacaaattttattattttagtcttcaccccactatttctcacttatttctttaattccctcatctcttataattgaccccactagcccattaaaaaacaaaagtaacaatttaaaatcttttcgaaaagtggacaaaaattaattaataattaattaggaacactaattgagttttcccctttatatacaccaccatcaaatctctatctcgatcaaaacaattgtctacattcatcttcttcttcttcaaacaaaaaatgggtttcttaaagttatctccaatgatccttctcctagcaatgatcggcgtttcatatgccatggacatgtcaatcatctcctacgacgaaaaccaccacatcaccaccgagaccagccgtagcgactcggaggttgagagaatctacgaagcgtggatggtggaacacgggaagaagaagatgaatcaaaacggtcttggtgcagagaaagatcaaagattcgagatctttaaagataatcttcgtttcatcgatgaacataacaccaaaaacctcagttataaacttggtttaacccggtttgctgatttaaccaatgaggagtaccgatctatgtaccttggtgctaaaccgaccaagagggttttgaaaaccagtgatcggtatgaggcgcgtgttggtgacgcgcttcctgattctgttgactggagaaaagaaggtgccgtcgctgatgttaaagatcaaggaagctgtggtaagaataaattctttttcttttgattttattcatttttaaaatttaacaaaaaaaaacattattagatttcgaatctggaaaaatccctcaaatcctgattattttacggatgagtcagttttttctttagaattgaaatgggtttctatgaaaattatcgaaaaagtagtaaaaactgcgaaaattcttggattgtttcataaatactccaagaaacttttgataaataattcagacatatcttgaaacttttgtctggggaatgatgagtttggtctgaaatgttgacttttacttttaggtgtaggtttcgaaaaacaaagattttgaattttatggagatgaataattatggttaataaatcttgagaaagacacaaacttctgatgatattttgtgtttatgcatcaaaacaaaatgttgaattttaggtgcacgtttcggggagctaatattttggttaaatctgagaaaattgatgatattttgggcctttatggaccatggtctttaaactttaaagttggtagtgggacaatatggccccattaagntntttgctatgaatctaggaagtcaaggnatggtggggacgatgatttggtatgtgttactgtttaggttgtaacaattt

SEQ ID NO: 27996 - DNA, 1000 bp, Arabidopsis thaliana landsberg
catcttttatcaaacttcaaatcacacttttacctgaaaccagtcttaagggtatgagctagctaacatctgttttaagttggtgactttaaggggaaaagactatttgttctattatgggagttgataaatgcaactagatgtatagatccatggttatacctcagttataggatttatgggttatatcacttgaattatggagatacaagatttgcaactggaatacatatcttatggggaattatataattcagactccgaaaggaaaaaaatggttctgtgattatgcttagtggttttattgtaaatctagttaaatggtgttcttcttgtgttgtgcagtttgtaaatgatcttcatgctctcattagccctgttcccaaagggactccactcccgcttgttctgctcggaaaggtaatgttattgttgctttgcttgcttttagagcttgtcttttccaaacattgattgatcttctggttttggcagtctaaaaacgcgttgctgtcaacgttcttgttcctagatcaaattgtgtggcttggcaggactgggatttacaaggttaggagaagcctgcaatataggagactttatttccttcaggttaaactgagcctactctgtttatgttatgaatctgctgctttaggacaaagaacgtgctgagattcttggacgtatatcacttttctgttggatgggttcttcggtttgcacatccttggttgaggtctgttcactgccattgaattgtctcttacttctggttcaaatgcaataccgcataatgtaataatttcgacatgtttaggttggggagcttggtaggctgtcagcatcaattaagaagttagaaaaagagatagggaacaaggataaacaccaggtacgcaagctttcctcaagatattggttccctttctctatggagtgaagaagaaattttgaaaaattttgagataacatcattaagcagaatgagcaatccgtg

SEQ ID NO: 27997 - DNA, 1204 bp, Arabidopsis thaliana landsberg
  unsure (1)..(1204): unsure at all n locations
ctacacttaaaatgtgttaaaagtgtaatcttgacatcactaatgtaactattaatacactgtgaaatgcaaagaaaattggaaggtagataatgcacaaaataatgaaatatgaagtagagtgttaagagcaaccccaatagtttagaaccaattggttcttaattttgaatcttaaccttgttttaaattaaaatgttgcttttactaagttaagaaaagttatgaagaagcttaactaatttctactctaatggttaagaactattggattcttaagaaacaacaattcaaactattttaaaacaatgtctacccactcaaaacagaacacatatactcttcttagttttaagaaaacatcttaatcaagatgtttgtcttagctaaagtttgttggtttcattgaatttaatcacttttataggtaaaaattagctaagatgggttgctcttataatcttgagtcttgacatcacactccagacccggccttgagttttcaagcctacaagtgaacaatgaaatgggccgcataagttttatctgttttcgtatattgttggtaaacaaaaaaacgttttcggtctcacttgtctcaaaagtcaagtgatgatgtacccaccataattgaaccactagactaaaagaaagctttctagaaaaaagccaaactcaaattatattattagcagctgcaaacctatgcttcggctggttggcccaagggccggctctacataagtctccttctttatcttaatttnnnnnnnnnnnnnnnnnnnnnnnnnnnnnnnnnnnnnnnnnnnnnnnttcttagattgtagtaggttggatttgtttttgaacttttagttacctaaggaacaaaattaatcattcgtaaccattttaaggaaacaaacttaaccattcataaccattgtttctgattattatcgattgcaattgtatttaattattttgatacttatatcaagtttttattatattctagctgcataattttaaagtcttttaaactaccccaagtgcaaggcaaattaaagtagtgaatagggtatcaacccataaataaagacgtaaacgcaagaagacttatgaaaagctaaactaatctagctagagttgtgatataagatgcttttgagttcagaaattatttgtcattttaactaanagcacactattatatacatataaa

SEQ ID NO: 27998 - DNA, 886 bp, Arabidopsis thaliana landsberg
agtcacaaaaaaggagaaacacgtggacactcacacgaggaggtgtctgattttgtctaattaaatttgatttttttttttcttctttgaaatcatatgattgatctacacagaatccatttccgcaaatcggattcatgtttttgctttatcgtaggcttccttcatttgcacgaacaacaacaacaacccttctctgcaaatctatggagcctgcgataacagcgacttcttcttcttctttcggtggtggctcttctcgtctcgccgctttagcccagcaacttcgccaatacaagcccccaccttcttcatcgttcgatgactccgaggagatgcagacagatcaggagaccgctgggaaagtcgtttctcaggttgggtttcaggaatctattgctcctctttcgaaagaccctgataggtttaaacccaagagagccgctgtgttgatctgtctctttgaaggagatgatggtgatttgcgtgttattcttactaagagatcttccaaattgtctactcactcaggttcgtatggtttgcgatttaaagttttcgtctttttactttgaaatcattggcttctttgattttggtcaatgagtatggtttagtgttgaatttgaggtggttgtttttttttgtggttgcaggcgaagtttcattgccaggtggtaaagcggaggaggatgataaagatgatgggatgactgctaccagagaggctgaggaagagattggattggacccttctcttgttgatgttgttacttctcttgaaccatttctgtctaaggtattaataaatggtgttaattctccatgtcttattggtggtgatgcatgctcttagtgagatcagaatttgggattggcattaaag

SEQ ID NO: 27999 - DNA, 1803 bp, Arabidopsis thaliana landsberg
gcctgaacacacaagaagcatttcactagagaagacgcttgctcctaaaccagatgaagaacacacctttaccaccaaacccatatctaaaggttcattcattttttcttcacctcttttgctaattatgatgtaaacttgttcggaaaccaacagagattgcaatttttggtatagaagatagaattttggtcattttgttctgaaatttgtgttccagatgatgaatctaagactaggagaggctcagctaaatcggtgttacacgaaatgtgtgcttccaagcgttggagacctcctgtttatgaatgctgcaatgttgatggaccttgccatttgagattgtaagtaaacatcttctaacccgcacttgcttttattttttgagtcgcaatcttttttgcatcaacttggttttttggttcagatttacatacaaagttatggttgagattagagattcttcagggaaaactgttttggagtgttttggggatcccagacgcaaaaagaaagctgctgctgagcatgcagcagaaggagcgctttggtatcttgagcatgtgaagacaaagccgcatcagtaaatcatcatttagtcgatatgaagtagctggagagtttagtaaagccatctatagttagttctaacgagggaagcttgaaccatattatacctatcttttaattcattatagctctatgggttgtaacagtttttgatctgtatcagaatttgctttgagtaaataaatgtttaatgattataatttctctaacttttctttcaaactttgtgccattatatttctccttagtaaggagcctttatctttatctttatgtttatggaatagaagagctcaagtcatccaagttagagaaagctttggagactttgtctggttagactgaaggagggaattcagttcagtgagatttgaaacactgatttttctcatttgcaactaagatttgagcattcttttttttttttggttttgttgcattctctcttgcgcggacagagactagaagaaacttactcaagaattctaagtaattgtaagatcttattactcttgtaaaaaaggaaaaaacaagaatatctcaaaaacataaaaaaagaagaagccacatccactgctaacaaaagaaacaattttctttttgcagcattctctaattatggaagtggttatttattcaatactcttgtggggttctaaaactaaactgagaaacacttgtttctgaaatcacagggtatagtgttgctggatagcctcaatgtctagtcccttctgcttcactactgattccacgtgacctttcaaggtgtgacgttcccttaacctgaaatttacaagacaagaaatgtttgtaagcccattttctgaggaacctaatggtatggaataatcagttacttgagcgttgccttgcaacttcagctcgtctcttggcttgatcagctatctctgaaagctctctgtaagtgctcttgtcattgaacatatctgaggtttgagctggctgcaatccgtgaagtgtacgttgcgcttgtgcccattgtgcttctctctctccctttccgtagtctttctttgacgtgaaagcggtctgaacagaggaacaaaggttaggaaaaaggattatactactgtgttcttgttctcatcagtattggcctgagaagcaaaccttgttctcaatgacattatcccatgctcttccactcagtgaatatctgatgatgaacttgaggatatccaatgggatgtagaagactatactatagag

SEQ ID NO: 28000 - DNA, 1074 bp, Arabidopsis thaliana landsberg
aagacggttaggccaagccgttaatgaatgtcttgaagctgttaggattgatccttcttactccagagctcaccaaagacttgcttctctctatctcaggtaatcttgagaggctttttgttttgttgctgtgtttttagtttaaagattgagaatttgaaatgatggagtgaattgttggtttagattgggtgaagctgagaatgcaagacgtcacatttgtttttctggtcaatgtccggatcaagctgatctccaacggctacagacgctggagaagcatctccgacgatgctgggaggctcgaaagattggagattggaaaaccgcgattaaggaaaccgatgcagccattgcaaatggcgctgattcgtctcctcaggtgattacatatcattgtcgtatgatatgcttgtaaagatttttgactaacagtgaggttttttctattggtttggacagcttgtagcttgtaaagcagaagcctttttgcgtcttaagcaaatagaggattcggatttttgtgtatcttgcattccaagattggatcatcattaccattctcaaccgcaggtgaaactctttggtatggtagttgaagcttatgtgctctgtatccaagctcaagttgatatggcattaggaaggtgagctttcgaaactcagaaatgttgtgattctttggatttttgcttctccaccggtgagtgagtagatatgataggtttgttgcagatttgagaatgcggttgtcaaggcagagagagctgcgatgcttgatcaaaccaatcctgaggttgtatcagttttaaacaatgtgaagatggttttgcgggcacgtactcgtggtaatgagctatttagttcggggagattctcggaagcgagtgtagcttatggagacggtctcaagcacgatgactccaattcggttttgtactgtaacagagcagcgagttggtataagctcggcttgtgggagaaatctgttgaagattgaaaccatgcggccaaaagccagcctagttacatcaaggcacttctaccctgggctgcttcatatggaaaggcgat

SEQ ID NO: 28001 - DNA, 2042 bp, Arabidopsis thaliana landsberg
  unsure (1)..(2042): unsure at all n locations
gatcgagccataatcaccagtttacctacacatttccctcgaaattgctttatttaatttttaaatcaagaaaagatatttgtgtcaccaaatattctatagttgtccaattctgtaacctaattatcgaattcatatcgaaacaggctgttctctccatacacgacctgaaaccttcaacttcagctccttgtcggtggtgttgttgtcggtagagaagaacaaagccaatttgcgagtgatgattaagccatcttgactatcacgaaccgtcttgtgactgtcacgaatgctcctcggcacgccttgccatgtcagctttctgccattccctccgacctgcaaactatagctgaagctcattgcctcttcttcatctcccataaactgcnnnnnnnnnnnnnnnnnnnnnnttttcctcaggtgaaacgcttcgaagtacaagcagaattttcgaccacaacaatcgagaagctgcatcgtttcaagtgggttaaaacttaaaaattcacaaagttgcagaaacagagcaagataatcagttatataacttttactgtacatccaagtagcatgatgaagatgtttaggatcatgatgaacatatctgtgactgaatctacgcttatcactcatttcaacattgtgatcattccttagatgcagtagtagcctttgaatatctcctgtgacatcacacttggctcctgagtgtggacaattgtacggtttcttcttagggttttcgatgtggtcgttgggacactgcaataggatctgtatattacttgttgtgttcttattgtagtagtatcaatatgatatgatatacatacctcgtagattgcagaggatatctggtttgtatgaaccggaaaatcgagcaactcatgaacccgagattccacctgaaggtcattgattcgaggttccatttcgcaggaattaattaattcacaagccaagtgatgaagtgaaagaggagaaaggtgtatgtttgtacatatgtacatacaatcaaccacatagatacgtttacgttgtgtcaagtttcaacgtccaataattggagacaacgtggagtaaatggtggatataggagttggttccggagattacgtacgtcaaagagcttaattgtaggagagaaaataatacaaacaaaaaaacatatagtaacatgacttgggattgaaattacaaattagtcaaggttcttagttacacgacactcttgagttggagttgtcataacaagtatccaattgggtcttgcaagttgtaaccattcaaatcaagatgccaagtggacaaatgtctcttagccaaatcaaatcattgctactgattgatcttttagtcactcatggtcaagctaaagaaattgcatgagaaaaaaataaatttccaaagatgaaagatctacctgcaacattacattgattactctgtttctgattaactcaaaaccgcaagataacagaatctaaactacaggactttcggatgtgaataaaagctaaaaagaacgatacaatccgagcttcgtttatggctctatcctcctggaaacttgttgaaagatgagaaaagaaaactgtcataaaggcagtgaaagacctgcactttcaaagaacagattcatgtgaatctattgaactaactaagcaacaaaactctatgaaaaccaaacttagaaggcatgtgtgattatatcagatcagatccatacacatacataaaagggttcatcttcatcagatggacaaatgatgatgctataggagcacatacttctgttgctgtcaagtttatcaaaggaacttatgtacatccttattcgtagagctaactatcggattcaaattgatgcatcatcacatttatcgccatatacacagtacaaaggatacaaattggcacacagagaaacaacagaatgcgttgtgtgctgatacacctttgtaaagcaaacccagatgggaattccagtgctcaagaacaaaacaaaaacctgccttgggggactaattcccagattt

SEQ ID NO: 28002 - DNA, 840 bp, Arabidopsis thaliana landsberg
atcgaggcatggttctcccatttcaaccactatctctgtctttcagcaattttaactattttgtggatgttcctttggtatgtactaggttttctacactgtttaggtatatcagtttgaaactactttgaatgcaactaaaatttcagggactaaaagaacacgggatactagaagataggttgcagctacttgtgaatattactggagcttttagacctggtgtgcttacagcattagtgggagtaagtggtgccggtaaaacaacgctcatggatgttttagctggaagaaaaaccggaggaactatagaaggcgatgtgtacatatctggttttcctaaaagacaggaaacgtttgcaagaatttctggttattgtgagcagaatgatgttcactctccatgcctaactgttgttgaatctctacttttctcggcgtgccttcgtttaccagcagacattgactcagagacacaaagggtaacataatttctattatctttcgatcatttttgtgttttttcttggattatgctgacatctctaaacttcaaattcttggaggcgtttgttcatgaggtgatggagctagtggagctgacctctttaagcggggcattagtcggtcttcctggagttgatggcttatcaactgaacagaggaaacggttaacaattgctgtcgagctagttgcaaacccttctatagtattcatggatgagccaacttcaggattggatgcacgggcggccgccattgtgatgaggactgtaagaaatattgttaacacagggcgaaccattgtctgcacgattcatcagcctagcaggggatcat

SEQ ID NO: 28003 - DNA, 8398 bp, Arabidopsis thaliana landsberg
ggtccttcacctaaaagcagtgattaaggaattaggggaaatttattttcttctttcccagcaagtaaagcaacaatctttttggcaggataataaaaaaaaaatatccgttttcaccttaattatgtcacggttcagtaattatcttgaatagtgagagcaagaccatcacttgggagtctgcaaatccacatttgtctgtttaaaatgtttgtgaatttaaacagaacaaagaaggtcataatatatttgcacttacgatttaacgaacagttcaacctcaggaatatgaattggattgattatgacatccaaaacatcaaaagcacttgtaatactaatctcacctttataactgaattagacaatatatgttaattcagacatgtacatatacatcaaatattgactactttagacatagttaagggaagagtgaatacctttaaaattattgattttagcatagcatatcagaaccactgtcttctcgtcatgctttacactttttaaagcactagatattttctcagcaaacgcaccccacaaagtacaagacaaaccctcattgctttaatacagtaacaaacgatttcaatattacttgtttgaaaacatagttattatgaatcaaaaattatatgaaaacaatgttctacttgcctagcatctcttatttgaatctctagttttttgtttcgtttgttttgagccataatatcattcactttttccaactcaccacttgacctaatatgtctcccattgtaaataatactctgttaatattaaaatccataacagacatttagttgagttaaacctaatgatagggaatttagaaaatacgtaccaattagaacatttttatcataactctcggtcttaaccccttcaaaatctgttagatccagaaaaacactatccgatacaggatcacatttaatcacatctgtgttatggttaaagcccattcgatagctcaaactcgatatcttgtacttgccatacgaaggactcaaactgaaggtatcaataatcatccaatcaccaacctttagtgacctgtgaaacttgccaatataatgctttctaatggtgatctgcatcttagatccctatatcaaaaccaaataaacaaaaatacataagaacatgttaaatgtttcgaaccgaaatatatatagattcatatatttaatcaatagcattctctcttacattttcatcacatataatgacatctaacgtttctcctgatgcatctttggtttgcctccatagatgaaggatcttgactcggacacgccaattcgttttgaaaggtttgacatcactaagatacgttaaacctaaaggtaaactcattgattatgtgtatagatgagaaagaaaagtgatgctctagaattgatgatattacttgagtatttatactgttaggacttgattctgaaaccctagagcaacaccggatatttttatatatgaaatcataactaaatatactatctcaatagaatataggaatcatacataattggttggtgatttgtagaatatcttcaagaactaagaatatcttggaaaggaggcaaattattgagcaataaatgtttgctaagagtggtgtttaacgcaaatgggctaactgctctctttgacgccaaatgagaaatagaaacgaggcccattgcatgagaaagaggatctgcgcgtcattgaaacgggtcggttacggtcgctgctcgggtcggctgtgaagagcacaaataatgacggttttacccttaatttgttttgtttgcttttttcctgtaacgtgtttttgtaaaatggcatagaaatgttttgtccctcattctctcttaatagtatagatatgtatatatatttaaaagacggagtaaagaaaagtttagcgtaaaataattttagtttctcaaaatttgccattaacataattgtggcacatgttgatatattgcctatattatcatattatcccatatattaaaaaattaaaattttttgtttaattaaagaattttttctcaaaaaactgatttgcaggtattttttttttaaagattgttttttaatatatacttagttacgtttatatatcgaaaagttattaaaaatcttaacctataataacaactaaggaatttctaaaatatgatattaatggttattattttgttaaaaataatataatcaatactaaaataaaaataaaatattattgttatagttttaaagtgtaagatatcgtggaacctctttttgcaaatagaatgaatattttaaagtaacacatcaatagaatgaaacgaaactggtttatgcatagagtctagtgctattttccaccacctccgagtcttgaatttttcagagtgagaccgactaacttattgtcgtctgaattttatctggttatcaaattatgtttagtgggctctcttccaatatgcactagatcctttgtagtattttgttgacttttatgtttaccaatgtttaagaaagcattaggcgctaattaagtggtgacccaatgcctagcgcttagtatggaaagcaattttaggcatttataatctaaacattataaatatgattttaaacatatatattatagaaaatatctaaaaaataataaatatgttgaatggtaaacaaaaacagaaaaaatattcatgtaactatatcaaacattacataaacatttatactggtttacataaatatacacttagttgaaaactagaaaaatacattaaaacgaggtatatgcgagtttaggcggggtaaacagttgtttaggtgtcgcataagaacctagcgcctagttggggtcaaggtgaccgctttttagaacacttacattaacatgtttatttatgtaaatacttctctaattgtgaaaattacatcacatcctttggtacttacatgacgattagaaaaacaatgagtgatataagagaagaatcacttggatcaaacatcgcttggattaattgataataggttcttactcaattaatcctaaagcactatcatgtcgttgtagtactgaaggttgtcaatccaaatgggtgtgatgctaacaatcaaggtgtgatcagaagtcactaagtcaagccaagcaataacaggttttggtttgttctagcagtcctaagtgaacgtgcagaaaacagaaaattaagcagaaacagtaaaacactcgacccacacagctcgttgtagggcactggttgtggtcgagtgacaggtcgagtaacaggcagtaaacgaaacaaagacactggactgcacaatctgttgccagacaactgggtggtcgagtatcaggtcgagtaacaggagagaaatgcaaaaactaagcaacaggtaacaagatgcagtaaacaacaacagagtaaacaataaaatcaatcagataaaggattcctgaggatggggtaattgagtagtttcgtttcctcagtttaccggtgattgacatgctcaataaattatccctagacaacaagttcattaaccaagtctaagtgccaccgcaacagagaccctcaagttaatctagtcccaaactcaatcaccattgacgagagctaacctaacaggcattacgaatcaacaagttaaagccaaaacgcttcctgcaaccaataccttggtacaaagccacgaatctctggaaatagtggttcagacatttcatcgaacaccttttgggcgcgaaaatgtctggctcaaattccagttgatctgaaagcaataggcattgaacaactaatccagaagggatctatcaatcaaactcaaccacctagcatagtgagaattctaaactactctaacccatcctgagaaacctattcactactcagacatcattgtagagaacataagcgttgaacatgatgaaaacatgataataacaatgtaatagcaaaacgataacaggatgaacaacagtaaacgaaatcaagaacaaatactgaatactgaatactgaatagataaagagaaatccagattacaaaaggtctagaacacagtgtctgcggaataaaacaagataaaaaacttgtcctcgaaaatgtaaggtacatgctacttatagcaaaatattctgaaaccctaatactcaaaacgacgtagtattgggacggattaagaactgtactcgacccaggttatcgagtgagaggtcaagtgatatgctggagtcttcttttcttctttgtgctcgagtgtctggttgagtacggaatggagaagactctgaagctcgccatagagtatgtagtcgagtgatagaaatgatggtacccggcttggtggtagagtgatcgagtgaagctgatgaatgtaatcgaccttgtggtagagtagggtgatcgagtgaaggtgaagtggtggaggtgatggtactcgaccagggggtcaagtggtaacgtcaagtgttgaggtattctactcaaccaaggggtcgagtggtctattgaagccgtgaagcatctactcgaccagggggtcgagtggtttggcatgatcaagtccgcttcttctagttagctcgtcaacagctccgaattaccttaaaacaacacaaatatgcaacatacgtgcaaaactatcctaaacatgcaaagtgatgacaaatgatgagaaatggtataaaacagtgatgatatgatgctaaaatgatgaccaatggatgctcaaaacatgcaaaatacttatcatctttgcctttgtatcctctaacaaggaaacactacttaggcttttaagatcaggttgcggtttaagttcttatactcaatcatacacatgacatcaagtcatattcgactccaaaacactaacatggcttcttctggcttctcaaagctttgatggtgtagtcgaagtctgatgagtcaaaatgggtataagtgttttctaaacacccctaatcaatctctaactcatataatcagtcaaatgcattggattgtgacatagtttgaccatagaaacactaacaaagctatttactacttctaaacaattttttgttggttttagcctcttttagaagaaaatggatataagtgttgtctaaacaatcctaatccatctctaactcttataattagtcaaatgcattggattgtgacacattatgaccatagaaaaactaacaaagctgtttactgcttctaagcaattttttgttggttttagcctcttttaggtgaaaatgggtataagtttgtctaaacactcctaatccatctctaactcttctaattagtcaaatgcattggattgtgacatattttgaccatagaaattgataataggtttttaagtcaattatactaaaacaccaatcatatcgttgtagtattttaggttgtcaatccaaatgggtgtgatgctaacaatcaagatgtgatcagaagtcactaagtcaagccaagcataacaggttttggtgtgttctagcagtcctaagtgaacatgcagaaaatagaaaatcaaacagaaacagtaaaacactcgaccaacacagctctttgcagagcactgggtgaggtcgagtaacagacagaaaatgaaacagggatactcgactgcacagtctgttgccagacaactgggtggtcgagtaccaggtcgagtaacagtaaagaattgcagaaactaagcaacagatgacaggatgcagtaaacatcagtagagtaaacaataaaatcaatcagacaaagaattcctaaggatggggtaattgagtaatttcgtttcctcagtttacaggtgattgacatgctcaataaattaaccctagacaacaagttcatcaaccaaatctaagtgccaccgcaacagagactctcaagttaacctagtctcagactcaatcaccattgacgagagctaacctaacaggcattacgaatcaacaagttaaagccaaaacgctccctgcaaccaataccttggtacagggtcacgaatctctggaattagtggttcagacatttcagcgaacaccttttgggcgtggaaatgtctgggctcaaattccagttgatcagaaagctataggcattaagaacaactaacccagaagagatctatcaatcaaactcaaccacctagcatactgagaattctaaactactctaacccatcctcagaaacctattcactactcagacatcattgtagaaaacataaacgttgaatgaaatgaaaacatgataacaacagtgtaatagcaaggtgaaaacaggatgaacaacaataaacaaaatcaagaacaaatactgaatactgaatagataaagagaaattcggattacaaaaggtcaagaacacagtgtgtgcggaataaaacttagataaaacttgttctcgaaaatgtaaagtacatgctacatatagcaaaatattccaaaccctaatactcaaaacgacgtagtattgggacggattaagaactgtactcgacacaggtggtcgagtgagaggtcgagtgataagctggagtcttcttttcttccttgtgctcgagtgtctggttgagtgcggaatgaagaagactctgaagctggcagtagtatgtagtcgagtgatagagatggcggtactcgaccaaggggtcgagtggtgacgtgaagtgctgatgtcttctactcgaccaagtggtctagtggtctattgaagtcgtgaagcatctactcgaccagggggtcgagtggtttgacatgatcaggtccggttcttccagttagctcgccaacagctccaaatcacctgaaatcaacacaaatatgcaacatgcatgcaaaaatatcctaaacatgcaaagtgatgacaaatgatgagaaatggtataaaacagtgatgatatggtgctaaagtgatgacaaatggatgctcaaaacatgcaaaatacacacttatcaagcataaaggtatttcctggagtttgcggtaaagtttttgtcctatatcacttgtgttgttttagtttcatgtacttatgttgtgactaactttgcccatattttctatcttttgaagtctacacacacatgggatcccttgataaaagggactgttcaatactattatgaggacatcatacaacgtcgtatgaaggacatggttagcaacgcgaggacgagtacagagcaaccatcatggatcaaggataccatctggaaagtaatggttgattactgggaaattgaagaagcaattcagaggagttgtacatattccaaatttcgtatgtctgatcgtggtggccttggtcctcacatccacttatctggtttgaagtcatatcaacaaatccaagatgaaatggttattaacttacattcactcttttctaattgctattttaaactctgtgataatcattgtgtattttgtaacattgtaggaagaggaactcggaagaccagtgtgtgttggtgaagtcttcattaagactcatacaaaaaaagatggtacctttgtcgatcgaaaaacagaaaagattgctcacacctatcaagataaagtgcaagaaaagttgacttagcttacagtagaagtctctactgtttcagatggtgcttcacaacctcgagagctcacagcagatgaatgtacaaccatctttcttcaggtacaaatatctttcttgttttttaacttctttgtagctatattatcttggattcttttctgactttaagaaatcctctaaacttattgtttttttcggatgtgttacagaccattgagaaggattcaagaggaagtctttatggagttgggagcatgaagggaattcttgtcaatggcaaacgcaatcaaccgggagattcttcttcatttatggcaatgcaagagcagctgaaggaagctcatcgtaaaattgaagaggaggcacaatacaatgcacagcgtgaagctgagctttccaaagaggctgctaagcaaaaaggcagactagagcacttgtccttggtggagaagtacctaagacaaactgatccggcctttcaaaacttcatggagagtcgttcaacttcaactaccacagagtctgtctccagtgatctccccccagtcgtttgaactataactccatcagcttaggttactctaagcttctcactatcatgacctcagacttttgttatgttgctttgatgaaaccttgttatctttgaatatttggtgtattgaatcttggttttattgttgttattaagctaagtttcttttgaatcttggttttattgttgctactaagctaagtttcttttgacctcaggcaaacacacatgttattaagcaaaacaccaaaaaaaaaaattccaa

SEQ ID NO: 28004 - DNA, 2073 bp, Arabidopsis thaliana landsberg
gcatgtttcatagtgttgattggaagatcgtagtgtgtggagcttgaagagtatctaagttaactccataagcatgctacggtcaagtgggatgtatctgacctttccttgtgattctgttcgtttgtggggtgtgcttgacaagatgcaagtgacctcaagggttcaaaggacctgcagagactggttagctacccaaggcccggtgtcgcttacacgatggtgtagccaaggtgatgttccggttatatgcatttgtggttataactagggtgttcacgatgtgttgaggaaggcagtgcattcgggtcctaattaaaactttaagaaacgttatcttctttttatgttgtgtgttgcttacttccttctttgtgtactaagattatttatgttatgcatgtgggattgtgggtggggattagactaatgtttccttagggaacccgagctcattgagtaatgctagattactcatgactttacttgttttgcatgtaaccttagaggggattagagggaatggtgaacactagggaacccggagtagtttttcagtgtccttttgtaaaacttaaagtatgtaattttgtatcgtgtacttttgggcctcatgccttggccataaaaacgatgtttatgttgtggttttttcttgtattttcgtaactctaagataatgaaatcggtatttattttaaagtatacgggtttcaaactgataagaatttgtctgagtcgacacaacaattggtaaagtgagggttggcaaacctaaaatggatcccaaatggggaaatgggtaaccttgagtgggctaagggtcggaatgtgtttctgaacctcggctactctatgggaattcatttccattgtggcgtctctgggccgtgccggactgaccgagttctagcgcggaccgggggcgttacagtggcgttccgcttaactccctatatctatagctaagaataattggagaagccaagaaattatcaacttaaatatgcattcttaatgagttcgtttgttcaccttagtagataggccgattcttataacacacctaaaaaccaggctcatcaaataatagatccaactacatatacttatggtgggcatatctattgtctggatgcaagatctagttaattactctagatctagcattaagcataattaaagatgaagaattctacagataacctagcaaagggggcaatctactaaactatatgaatccctaatgagaaaccctattcctaacaagcagattactcagacatattgattgaaggaaacaacataattgagtatgaaaacacaaacacggcaaatagatttaagggaaagaagggatctcttcactgtattaggaactgaatcaatctctgaaaacactcgatgaatagcttatgtctctcagtaacagggtttgcaaaaagcttgatataaaactttgataaaagaaacttaggtctaaaaacaatatatatagaccctaaaaacgttcagggactaataatgcaaatagggaaatcttttgggacaaacttgttgttctgtaaactcgaaagcgtttagggtttttgctgggccgaaactggtgtcgatcgacaccaggagtgtgtcgatcgacactcctcgttgattcctgaaccaaaattgtccttagcttccttttatttagcttttgctccaaaatgtctccttatctccattgttgtctcattgcatagtataccggaaaagacactaaaaagactcgagaaataacataaagactcaaaatcctatacctaaaacatggataaaatcaataaaaatcgggttatatcaggcgtccggcatgcccttccatacaatgcctcataaggcgacataccaatacatctttggtaactgttattgtatgcgaactctatcaacgtcaaatgcttctcccagtttccaccccaatctaaaacacatgcccttagcatatcatctagactctgcctggttcgttcggattgcccatcggaatgagaatggtacgccgtgatcatattcactcttgttcctagggctttt

SEQ ID NO: 28005 - DNA, 692 bp, Arabidopsis thaliana landsberg
ccttctttgcttacattgagaaagggaaaactattccttcatttttgtaacaagatctgacatttccaattttgcttatctaattaaggtgatgcgaaaggaatatgtacatgcaagggtcttagctagggatcaagctcaactcctacgtgcctatgatgagattaacatgtcaacaatgagactacagcttagagaatcggaagatgacacatcgatctatgctttgggccgggacgagttagatgttgctagtgtgctgaacacaaatgacaaatttatggctcaatcctcgttgcttagtataaaagggaaacttcgttatttgaaggtaaatctgtaaccttagtgtgttattagcctgacctcctatttttatcatgcctataagtcatttatatctgtgttactattaagaagtttacgtggatagttacacttgatcacatttgttttgcaattccagctccagagctctacccatttcaattttttagtcacgagaagctatagttatgtctttgtggctaagttcctttttgtgagactttggatcgctggaaaatatctgcttgctttccctctctttctttgattttgtatccaatattgaacaaatcttttttccgttgcagggtttgatgaaatccaaacagaaacaagaatccgagagtccagatctttcctcacca

SEQ ID NO: 28006 - DNA, 1527 bp, Arabidopsis thaliana landsberg
  unsure (1)..(1527): unsure at all n locations
ctgaaagacagaaagagaggcatctccattcgaagtttaattagatggaagaggaggagatgggtgcgctttgcctttcttcattactttcacggctgattttgaggaatctttcttttctagatagagagagagagagaagcagaggagagagttttctttgctgcgattattgttnnnnnnnnnnnnnnnnnnnnnnnnnnnnnngaaacagagtatagagccttttttcatgtttatgtatttcaccctcattaatcattattatgtctctcgctcatcatatacatgcatgattttttatttttttttaacaaattcaatcaattcacaaatgagctaaatcacaatagctccagcgaaaatgcatgatttttaaaatgcttctttcaatgatatagttttattgtaatggaaaaatatttagcaaatagattatatacttacatgagacaagtataaataattattataaacttattaagtttaagatcaaggcttttgtgcaatgtatcaatgaatgttagatgtgatatgatgaaagcaatgttttaaacacatacatagtcattgatcggaatgtgtgttattagaaatgcatgcctaggccgatagggttatctatgtttggtcttggacattatagccaaatttcgaatctaattcttccaatatttttttttttttttttttttgcttagggccactactagtattgcttatcaattttaagagctcatgaaaatgcaacaatatagtagttgcaaatccttgtttcaagagaaatcaaagggccacttgtgaattgaataataataatatttgcaaataacctttcactaaaccataccaacaaaaccacacagatttggcaaagacataacctttgggagacgtgaaaaggctcaaactttgacaattgtccttacaaattcgctcattagtgcaattgtgagatttgtttgcatccaaatccaattcataactcacactcgtctcaaattcgaaaaatgtcgtctctctcctgccctacctaccgctcccgcacttcgtcttcgtctcctttcttgtcgaatcatcatcattcttcgctgatcaatgttgttgacccacgccgctcactctccttccactacgcttctcctcaggggcttaatctagctgagctctgtgttgttagatcgcagaggaggtccgttcagagttctgttgtcgtgcaagatggtaactttaattggattctcaattgggttttcttctttatgccttgctttgccggtaacttgaaagcttgtatatataggattgaatccagtagttcagcttggttttagatagattttctatagaaagtctccgactttagacaaaacattgcatgtaatgaatgttctctaatgcgcttacaattgtgtgtttaggatcagtagccaccgagtcaagctcgtccgaggaggcgaaagatgtaggggtgttaacgattccttcacttgaagctgacaaggttgtagcagagtctgatggcgg

SEQ ID NO: 28007 - DNA, 1506 bp, Arabidopsis thaliana landsberg
gtgtaccgagtgttgcttgagcttgtgaaatgacaccgtccatctgcaccgtttatataatagtcagctcacataagtcatgacgtgttcgattaacttgagaaagccaggcctaatgtacgctacagctgtagagtctaacaaaggttaatcgcaatggagagtttatatacctgagctgtattgcggttgattcccatatgttccttgatcagggcttgttcagacccatatccatcttctaaatctaatctagtccgatcaaattctctaaagtcctcaagaagtgaagcatgctcttgttttgctctaagactggagcgatgtcgataaaactcctgcattttgattgagtcatacatacagaaacaagactgatttacaacaaaggttgagtcataaactagtacaagagaagagtgtgaacagatggttaaaaagatgacattcattccattactaatcagtatataatcaacccaagctacagaagtaggcaattatcaaatggtatgagtcaggaatgggatagtacctgtgttagatcttgaaggatctcttgatgtcgagttaaagtatgggagaccatttctgatccaccagaagaaacccatgcttgcatctgagcattaacttgttgcagttgcctaagaagtaagtcaattccagcttcaatatcactctcagaaccatctgactttgataaagcctttgttgaaacaagtctacgatatgaatgcatctgctcgtcaagctgagcttcaatctttctagcctgtgggattcacaatacaacacaaagcatattccttttaagtatcaatttgatcatagagaatcagccaacaagaccaataaatacccaaattcggatcgaaaccatatcaattcaacatccaaaatcgaattccaagacaggttttcagacactaccagcttcccaaatgtgttatacataatttacctagtagttccgaatcaaacgacagaagaattacctgtttccgtaaagcatcccaagagctaggcacatccatggcgtccactgaatctgtaaaaatatctcctttatgaaagcggatcgtgtcctttccggcaagcgaccttgtcccgatattaatcagatgagacaattatcccggagcaaaaattcttcttcctcgtcctcgcccccgaaagatgcgatccaattggttcgaaattgagagaagtagaaaacggatcggatcgagagaagaagaagagaattggttcggagacgcagacagaattcctgcgagccccttcaacggcaaattgcttcggttttgcgtaatcactgattaattaattaaaccgatgacctgagatttggcgggtatgatttggtgttttccaccctacaataagctgatatactattagtctattacgttaaactgttgactcacacatctagtcaaactaacacgtaggataataatacagacggcttgagccgggtcatcgggttaaaccacttcatcc

SEQ ID NO: 28008 - DNA, 901 bp, Arabidopsis thaliana landsberg
atcctttaaatagcatacagtcaaaatgtttttttttgtcttatatattcagtccttagaaaggttggttattgggaaatcaatcctcgaaagctactcaagggctttggagagcttagcatcaaacatcatagcacgaatcgatgatttactctacgtggacgacttaacaaagcaatcagatgataacaatcttttgtcaagtccagcggtcagtagcattatagctcacaagaaagtagtaccactcccttatctaatatctgcatcaggaactccatatagaacaagcttctcaacaacaccaggcttctctccttcaatgattagccccaagaaaggagagaggagaacaccttactccagcaaggacactaacaaaatcattgagaaaggtcttccttctcgaggatatggagtgagaagagtcttgaacaattatcttggcatggaatcaaaactgaaaatatgcgttaatccgtcagataatgcagatacagcagtgattaaccaaatcagcaaagacgtggaagaagagaagaaaagaaactcaacatcagtccatcaaaagggtcctccaaagtacattgtctcttaaaagctaatagaagaaactcaatagagtgtataatttatgcagacatggattgatttgtttgatatttacttgtagtttctgtcttatttggaatggtaaagtgtctatctttgcaaaccaaatcagatcacaaaatagacaaaaatgagagtggttgtaacaaatattctcatcaaatttgttctggtttggtttactagctttatttatttggtaaacaatcaccaataacgtgtataatttaaagttatgattataatgtttctttttgtaacccactacaaaatgtcgttgtagtatagt

SEQ ID NO: 28009 - DNA, 2137 bp, Arabidopsis thaliana landsberg
ttacatcagagccaaatttaaatccaagctctctgtaagctaattctgctctgcagatcctcgcttgaggatttccaatcactgaaacttccatttcacaagaaaattgaagaggagattatgattttatccaaattcaaccaaaaaagaaccaaatttgcagcagaagatagaaaaaagattaggataaatcgcaaaaagcgtttctgttatggacacaaaggagatagcttgaggattgtggatatggtgaggattatggatttggtttatataagaaaagaaaagaaacgttaatctgcttatgagatgaaaggtggtggataaacgttgcctattaggacattacacgtgtcgataccacaatgctctcatacttgtagccgcttaatatttcactttttcatttttatgcttttgcatttaatgacaattttaatcttcaagtgtgaccacgaaaaatgaaactattaaggaaatttaaaacttagtttattttcgtcaaccgaggatccaaaaaaatatcgttgtcaaaaaaacttaaaaagtattttctagtggtatagttcaaatcgagaaaaacgacaatacaatatcgatcatggaacaattataatgctcgtttttaattacgtgaaatcggaaaatgtaagcatacatgtaattatgttagttttaataaccttcgtcaatgacaacttatggtttctcatcatcacatcgtttaagaagagtagcgtacggtggtgatatggattttagctctaaataatattttagtttatttaactgatttttcctctatataatctattcatttttcattaccatcataattcttgccaatctgttcaaatagttggaatatcgagacgattggaatcttatccaagttaactgaataaacctatgcttgcaagattcaacgaacaatatccagaaccgttctgattggtgaatgatacactaaaatacattaaatgaaaattattttttctgaatgattgcttgccaatattatgatgggcttggccagttggctagaggtaaggaacaacaaattatctccatgcaatcaaatgggaaaaacacaatcatattcataggttgttcgaaaactgatgttacgtcaaaaacggaaacagtaagtggataatattgtattgtcccgagaaaccaacgtggttatgagaaaaagccacgtcatgtcaagttgtcatcgacgaaggtgtggatcttttaaattaacgtactgttcagacaggttaacacgtgtcgtaacatgagaggttaagaaaattcatgctgactcaggtccatgcaagtatgttccctttagattctctatagtactgtgaagctgcgactaattgatttgcatatcgaccacatcctctctctgcttctctctttgtggttttcattatagttttaaaaatataataaattgagtggacaacttgtccatcttctgcattgtatatcgttggcaaaaaatagctatgatttctcacagaaatttcaatttatatgggcttgatatgagatgccaaaggagagataaagtactatacagtcggtaatttatatattttcactatcatttatctagtttacaagttgcggtataaatagctgttattagccaaatatattgaactttgattgatgatagttaaccacccacatagcaaattctcaaaccattcagaaacaacgagccacctgtctttatagtctaagtaggaaactagaaacgtaggataagaaagcgagaataattcatttaaattatatatgctgtagagtttttatttccaatgactttaaaacgagatacttgtaccaattttattttattttataaaattgtcgcattataggaaaaatgcaataagaggcgtcgtggcactttatgtgtcactaaaattaaaacaggaaatcggcgtttgggaaccaacaaaaggcctttaggtccgtgttaggtgggtttgagtttgaaacatttggaaccaagtaacaatttctcccacttgccacttgatagttgacacttgacttgacgatgcgtatacgattcacacattttccaaatgcttaatctatttaaacttctcttatgggattgccggtgaca

SEQ ID NO: 28010 - DNA, 1326 bp, Arabidopsis thaliana landsberg
tcaggccaccaagtcgccggtttaaactcttccggaaacttctcgagcattgttccgatcagaggaagaggataagctttatctagagacaacactctctttatcacttccttaacatcttcttcttcgatctcctcgttttctctcagaaacatttcgatttcgactctcagcttcttgaacagcctcgtcgcgttcctctgttcttcagctagctgcgaaggttgaatcttgctcatcaaggcagcaaaacccgtcgcagatgttaacaacaccgttgaagctatcttcacagcggttacagaatctacaccgtgaccgttaaccgaggctattccggccatcaaagcggcagtgagagtaatcatgttgacagaattgagcagtaaagagttccaattgttacgttgatctccgatgttcttgtgcatctcaatcctatccataacttcttcaagaaccgcattgagacgagctctttggatagaatcagagcctctcttttgtttcaacgaaagaggaagactctctacaaactcaaagctcggttctttaaccgataaagtcggtattttcggaaccgagacgtgaaatttgggtagcttggggattgaaactgctgctttaggtcttgtactagaagaagatgacgaaagaactaatcttgatacctgcaatgaagccattattgataggttttttggttatgttggtttcttaatatctctcaggagatttgtgattgtgtttgatgaatgaagagagaaatgttatgtgtggcgttatatataggtttaagatgataggcataaaacaaaacaagaaaatttaaggaattgaattgaccaaagagagaattattgaccaaagaccaattaggctttgatagattctcctgtgacggtttttggtctaaccgtaaagctagccttccaattttacccgccatcctcgtagaacgagtcttaattacatctaaaccggctcggtttatattggtttgattaaaccggttcggttttgttttgtaggtaggaatttggtcaaattgcttaagacacaaatgacaaaacactagagagagtatcgaagagaagaatccaaaaaaatgggatcttcaccaccgaagaagacgactctgcaacggtacttgtcacagcttcaacaacatcctttaagaacaaaggttgaaacttttcttctcctattgttgatttgaagcgattgatgtagttttctggggtggtttcgttttcttgagattaggtttagtttcattgattgagagacgatgacgttgtttttcgattgaaagttttgtttttt

SEQ ID NO: 28011 - DNA, 622 bp, Arabidopsis thaliana landsberg
tcttctcaaagtggtaaagcttgaatctttctcttgtagagtcctaagttcaagccagtcctagcttctttgatatgttttaccatttgagttctgtgttgatttctccaacagatatttgctggtgggtttcttggaccagcagggcatttctttcatacatatttagataagttttttaaagggaagaaggatacacagactgttgcaaagaaggtaacaatgttcgatacctttcgatgatttgtatgttcgagattgatccgggggttttcttaaacagtgtgtttgagtggtaggtaattctggagcaattgacattgtcaccattgaaccatttgcttttcatgatctattatggagtagtcatagaaagtaagttcctccctttttcacactccatttgtaaaacacgaaccgtcgtggatggtattaagagttctgcaatgttgagtgaaacaggaactccctggacccttgttagagaaaggatcaagaagacttatccaacggtccagcttactgcatggacggtaagtgatagatatcatcaatatagttcatgctcttttaagagaatttgaatcataacaagaattgctggatgattgattctctagag

SEQ ID NO: 28012 - DNA, 2133 bp, Arabidopsis thaliana landsberg
  unsure (1)..(2133): unsure at all n locations
gaatagatggcatatctcctatctgctgtttggacttgttatacttactcatgcccattaaccaagagaggttgagtgataatttcgataacatcctggaagacattaattaactgagacttgtatgtaccctggtcttcatagtcacttaactattcacacaaagaggtttcaagcattagttcctgtgtaaggcctcatgtaattaatgagtggactacaaattttgatattaccaatatacttagaaacttctccagcttatcactaaggagcggtaatccactcatgcggaattcatatatgaatctctgttgctgcatgctcatgtccacttctaaaaatacctgattcatgacccttattcaaaagagaaaaattaaatgaatcaatgaaacaaggctcaagatgcataatattatagagaacgaagtatttcaccattggaagaggagcatgaatctggtataccttctatctgcttcatcttccagaagagcgtaaattattttcttcaatgtctcataactctcaataacagcataatacatgtagctatcactcttaatctttctaaatagttcagcatcctcttttcccttgaaatcttttgccatgtccacagcaataggaatctacattgttgaaaaaaatcattaggaaccatgcttattgaaacaatcacatatgttcattcagcatattctggtttaaggggatgattatccagtgacagaacttttggcccttggtggaaattaagcatcttaacaaaagtcttgagaactcgagcattttgatcaatgaatctttattttctactaaaatggaaggaagtcctccaaaaacaccaattattcattaccttactagcaagcaagaaaggtggccactggatgacagacacatcacccgacgaagatggtacaagcagcaaatccctatctctgagttacagcatataaaggaaacgttacatgacatatatgcttgctaaacagaacaggacaatgatgacaagattgctttctaaaagaaaagaatctaacctgtcactaatcttatcctcgcttctcatagagtaaatgaactcgttccacacctgggagaaattagtgatgtttttctggtccacatagtcatcctacatttcccagtgggaatcaataaatgacagaacagggaatgaaggtgtgatccaccttttgagatatggaaggacaataaactataaaaagcacagtaccgcatgttttctttttgcatcttcggatggcatgagggtgcggctgaaggcaattggtattgactcaaatctagatcgcaacatcccaagagtccgtatctatgaaagccaaaacatgtcaagactcaagaagtaacataaagggtaatatcatctactaggttgcagagtaaacaatagtgtttgttaattcttgtggtatttctgagagtacaaaatcacttacttctcccagatgactgaaggccccatgtatgcctccaaacagagtggaaaaaatggcgtaccatatttgagtatccatcaagtaaacctactcaaaatataatacacgcaaatatgtaagccatatataacagaaattgtttttttcttgggagctctttaatttttactaaccagtacaattggagcccatatagcaataaccactccaatattgttagttgctatagaaaatcaaaaattagtaaaggcaagtgtcatcaaatgttattgcaaacaagaaaggatggtaacttgaaaatttaccatggggaaaaaattcatgccactggtagtgaccaatgtgcagattcatgatcatctttgttggcgtaataaggggtagtatctgtttccaagatatacattaaaaacatatatacacattgagtaacctacttcggagtaactataagtgaaatataaaggcagaaaccagacctccacataatagttgaannnnnnnnnnnnnnnnnnnnnnnnnnnccagaaggtggtatacctgaccattataagttgtgctatatgagaagaggctagtgtaagagttaaaagaaatatttaagaatgtattaatggtgacaggaaatggcgtcaatcactcacttgaagagagaagacat

SEQ ID NO: 28013 - DNA, 1544 bp, Arabidopsis thaliana landsberg
atgataatttttaattttgtttatgttaaaagttatattattttattattactaataaactaataataatatcacttcttctaaaatttcatttctttgatttaattttcttttgtttcactaaaatttctatagattataactaacactaatataaataaatatgaattaaataaacattgtaattagactttaatgtaaaaaacaaaaaaaaatattgactaatgacttgactttgtttaattggatgtttaacacgatgatgtggataccttaacaagagagaaaactttctgattttataccgtggttagtcttggtttttacgtaactttttttttggttcggttattcaatttttgggtctatataaagaaaacaaaattatgaaaaaaacaaggtttcattttggtagattcgatacatcataaagaggtaaactcaaaatcttacaaacatctcagactctcagttcaataagtaactcataaacataaaacaaggttcaatgcaatcatcttcaactaaaactcatttacattgtcactgttacttaaaaagaaattttaattactccattggagatgagaactcttctgctacaataccctcttcttctacacaaccaagcatgattgcagttagcattaatttccctgcctcagcgaaatctttatgactcatcaacacgtcctctacagaagaagttgaatcctcagggttctctcttcttagaggaaggacttgtgcaaagtcaccatcaaaagtgttgactcgggttggtccgtaacaccttttggaagcctggaaaagggccgtgttccttagattctgtaatgtttcttcctcgctccaaccttcattagtagaggcttgatgatgcctgtcccagtcgtcttgatccgcagcatttctccagcattcttccaaaagactcctatgattctcacggaacgaagagctcgtccatgcaaacacttcgaaagcctttatagctgtccatcgaccctggatattgagacaggtttcaatgagctcctctggtcggaagagccggtttctagcttctccatttggcaaagcttttgttatttcttcctgcaagatataacacggttacaccggttatagagagtatttacgtagctgagtttaccaacaggctatacaggataaatattaacacagctgagaatatacctgcagcttcagtaagttgagatcagcttcaatgcgcttcactttcgattcggaatcagcatccttatctgtaatgcgataattatcatggttttcagaaagaaagacaaagaaacaataacatgtggaataattataccacccatagataattaactagtatacctgccacataggctatctttgaaaggttcagaaaccgcttgcggtctgcaaatgttggttgtacatcttcaggttctggtcccgttcttccttcaacagtagtcatagactcttcatcttgtgatagagccaatgtatgaagagtgtcagaagcagatgagaattgatgaagaaacacc

SEQ ID NO: 28014 - DNA, 1606 bp, Arabidopsis thaliana landsberg
gcttctctttttatttacactctaactgaaataaattggacatggactgatcctttcttgccttcggtctagaatcagataatactgatacaattatgaatgcggatgatgtaattgagtcattatctttccattcaccaatattttctgtgatttattatattttgagtcatattctagagtacagtatcgcaccctctttctctactgtgcctaggtattttcagcataagtggactatctataagtgttctgtaatatgtagatagatccgcagaaacttttgtgaggaaatagtaataccgtcagaagataagatatgtgagagtatggtcttaggatcactgtaagcattccataattttgtgattttgcggtgtggtgtgaagtaattagtgttgggtgactgtgccatgttctgtgagtttgtttgtgctggtctctctaagtgtcactcatagtgatattttctgatagaatccgaccttgggttctatcacatctcttgtctgaacactgaaaccgtatattcatgaaggaaaaaggttacattatcgttagagcttctgactttgattatgtatgcgttctaatctacgtttttcgttttgcttactgtagccagcaaaatggtcgtttaactctcacacaattctgaaaagcagtgagcaggcgccaaggtagaataattattgtgttttttttttgcatcaaaatggcttaactttgcatgatcctggatgtctatattcgacatgtgttctatagatataaatatatttgtcagttcatcaagttatatcaatcaagaaataccattgcctctccaccctttagcccaataactaatatttttttatcttatccttacctgactgtttcacagaactccaatattcactgaggagattctaggcagtgagaatgtagagggagaagttgaaccaccaccagagagatcattttgggcgaaatatgtgagtaatacgataaagatcttttgatgattccttctttattttaggtcttgatgtaactttcatatgatacgcagtggatgtatttgataccgctgggactcgtagtgatgaatgccgtgacacaagcatcaaacatggctgaagaacctgcgggtggacaggcaggaggtgcacaagtgcaaccagctgccaggagaagatgattccacttttacttctcccaaagcaatgaaaggtagaccacgccgcaattactatgcacaaatttctcttttacctagcagtctttaaatcttatgatcctaggagaatacatttatatatttgtttggctatcttcgcagctgtggatttatattatttggttgtaacttataagtcacgtggaattaaatgaattcggagtttgcatggaaatatcaacaaggtttaggaagctgtctttgaagtgcgatataagatcaaatctgatttttagcttatgttgttgtagctgcagctggttagagatgatgattcaacagatcttcatgtaaaccatcttgccatcatttggttttatgtaacctttaattttaatcctcgatcggtgtgtttttgtactcaccaatcgagaaatcaaaaat

SEQ ID NO: 28015 - DNA, 873 bp, Arabidopsis thaliana landsberg
ttattgggcaagttgggatgtcttgagtctgtgaaagttggtgttcacgcggacaacatcactgttttcttgcaagctaatctgctggctctccccagactttcatcaaagtgcaacaatatccagttcagctgacctttttcttccctcatgatgtggcattctaaaagtaacttaacatgaatttggttatatcactaaaataccattgaagttcgttacaatctgtttctgaatgttatatcatacgtatgggttttccttcttcgtgtgatgctgtcagctggtggaatcttactcctctgttgccacaaaataaataggcctttgatgtttctagcgaccatactattagttcgatcatgtatggacaactaactcaatttagtagtaacctccccagagtatatcaagtagtgaccattcgattagtttatggttaagagtttaacggaaatatacgttctatattacagtgtttgttagtatgtgttagcttttggtgtgtgctaatattctgaaaaactcttctaagttagatccttagattaatttatgaagggtaataaacatcactctcaagtcttcagaattgtcctagagattcactaagtagtttgcttgtgagatacttggcaaaatcttccaagaggtcttgtagacaacctttgctttgattccgaatttattattcatgtgcttctttgttattgtctcttttattttcagtggattctcttgctgactaagatgtatgcgattgtatcttctatacttgcatagaaatctatggctttcattcccataatcatctgatctgcgtttcttgggtttggattttgattcagattcaaagatggatgggattcggct

SEQ ID NO: 28016 - DNA, 2531 bp, Arabidopsis thaliana landsberg
agacgaatattaaaaaaaatttttcgtcatggctgagttattgcccttatatctggtttattattatttgaggactgagttatgcacatagttacagctgaattacctattacagtttttcaacaccacgtgtgtgctgagtttgctgcgtgctcgcatcatctctccgtttagcaaaccatcttgtcatcatctgtcgtatcgcttcttacagtcgaactatgggaagacttctggcttttgacagtgctctgtgcattgattccgctatattcgtagtcattaaattgtatctatcacgggtaaatgaacatgcgcccacatttcaacacccgctctttcgaggtatccatgtatgtcaggatcacgctctttaatctcgttgaacgcgtcattaaaataagtcagcctataacaccttgccgctttttcaccaaagggaacatatgctttcctttcacctaataactcagccaccatacaaatctataaatcaatcgcaacatgaatactattacagtagttaaaaaacaaaaaaattgccaagttaattcagccgtgttttgtcgtaactcaactaactcagctgtaacgtttaataaatcggccgtaactgcgtgctattatagtaattaatcttttacaagtaagttagccgtaactaggctgagttatccggtaatctagctcttaacggatgatttatgacacacgatcataactcagccgtaacatcatcccataactaagtcgtccttcgtaacccagccaaccagaaaaagataacttagtcgtgtcgaggaaataagtcagccgttttctaataactcagccatcacgttgtctgggttatgctagaaattcctataactcagacaaaattccttaactcagccatcatgtagtgtggattatcgcataactcaaacaacattttgaaatcagccgtaacgtaggctgatttatactcataattccgccactttcttatgactcaaatatttttgtcgtaagtcagctacaacataccgtaactcagacgtaacttctgttgtatctccttacggttgagttaattaatccacgtcagcaatttctgacttggcagtaacatttcttgtaattacattttttcctgtaacgtttactaggggcacgctggatatacaaaaagacgaaaatatgacaataaaaaaaagttatgtatggttctggtcaatacacctaatttatataacatctgaataaattttccttgaaattatatgttgttagtgatttagatatatgttaattgtgttagtggattgaaaatagatattattggtgtgatttctaatgtatctcatattcaaaggtttctattcgtatgccttcaaggagagacaaactataactcaagatttgtgtcgtttgacaacactaataacatgtaactttacactccttttgatatattattttttgttcagtttgtattttttagaaaaaacattatgatttatcaaatgtttttaaattttgtggtttaagggagaaggttacaacctgtgttgcaaaaagtaggtcgtgtcagttgtttttcacgaactagttttaaaaataacttttgtgacttataactttgagtaagtcctcaatgttatctgtttttggtgaacttcgtatttcaatggtaagtttgttaaacaaacccattagtgaactatgtgtgagtgtaattaaactgtattttgttttctactttttctttaggttcaaactgtttgatgagtgagaatggttgttcaacgctttaccttgatccaactcttactggttatgacacacagagacacttgtaagtcacatttttaccaaatagagagtataataacatcatcaattgaaaatgactttcatttttccatgatttacacaaacgcgtagttggacaagttgatgatgatatgcagatgaagttggatcatgttaactaaagttgatcttgatggatgtatctgctatgcttcctatttttatatttatgtatgtcattttattaggttaaactttgttttgaaacttatggtgttttgtgtatgtttgtctaagattcaaactactctttatgattcagtgtattgtttaaggcctcttgcgttttctatctacctaatttatttaatgagatacaccatttaaaagatagtaatttaatagttagaagtaattaaccatgtaggtaattataaacacaatcaaactatgatttatccctatataaatctacatatacatttttgcaacacttttagcaaataaaccatgtacttggaacttatttacaatgtcatgccactgaaattattaatttgaatttaatttcggcgattaatactatgaaaaactattgttatcaaatatctagagcaatccctttagtgtagcaaacacaataaattctttattccttatctcatctataatattcaagaaatctttaatctcttaacattagcataaccgtaagtagcaacttttataggaaa

SEQ ID NO: 28017 - DNA, 2868 bp, Arabidopsis thaliana landsberg
  unsure (1)..(2868): unsure at all n locations
gttcccatattgtatcggtcgacatgatgtctggagaagtctgtaacgtctaaaagtttcttgaactatttggccaaaccaatgtccttaaaagagaattcaaaagtctaactattttgcaggaagaccgtgaaaacattttacgggccaagggcatcaggaaaaggagtgttaacatctccatttaagcttcttaagtcaaatcatcttggtgttgtgttgacctttgctgtctatgacacgagcctaccgcctgatgcnnnnnnnnnnnnnnnnnnnnnnnnaactattgggtactacttctacttaaaatgattctaggactgaagaaattgaacctatgtaacaaagaatgatctctggaccagaaaatattaataagatacacttaaaaacaggtaccttggtgcatcatatgatatgccatcgctggtggagaaacttcttcaccaacttgccagcaaacagacaattgctgtggatgtttacgacacaactaacacttcaggtctaataaaaatgtatggctcagaaattggggatataagtgagcagcatataagtagccttgattttggtgatccatcaaggaaccatgagatgcattgcaggttagttagctctaactgttatggtacatttttataagatatgtttcacttctctgttttctgaagtatgaaagtggcatttttcatttacaggtttaagcataaacttcccattccctggacagcgataacaccgtcgatcttagttctggttattacttttcttgttggttatattttatatgaagccatcaaccgaattgcgacagttgaagaggattgtcagaagatgagggaactcaaagctcgtgctgaggccgctgacattgcaaagtcacaggtgatctttgtgaatcatatagtctcaaaagctttacttgttttttcactgaaatgcttcttattttgcagttcctagcaactgtttctcatgagatacggactccgatgaatggagttttaggtactttttctacttatccttggtcaatattgcatgttctcttaaaatcagctgaaacgtttaagcattttgttacaggaatgctgaaaatgctgatggacaccgatcttgatgcgaagcagatggactatgcgcaaactgctcatggcagtgggaaggatcttacatcactaataaatgaggttcttgatcaggcaaagattgaatccggaaggctcgagcttgaaaatgtgccttttgatatgcgttttattcttgataatgtttcatctctcctctctggcaaggcaaatgaaaaaggaattgaggtataattataaactgcatgaccttctactttcttaatgttttcatatggcaaacaaattccatatgtaatgaaatgttgacttcttgttacagttggccgtttatgtttctagtcaagttcctgatgttgtagtcggtgatccgagtcggttccggcagatcattacaaacctggttggaaactcaatcaaagtaatttactccttacttcttacagaacaacaggcttcacgaatctctactattacagtactcatttgttatttacttaataacagttcacacaggaaaggggacacatatttatctcagtgcaccttgcagatgaggtaaaggagcctcttactattgaagacgcagtgctaaaacagcgactagctttaggatgcagcgagtccggtgagacagttagcgggtttcctgcggtaaatgcatggggaagctggaagaatttcaagacatgttacagtactgagagtcagaattctgataaaatcaaattgctagttacagtggaggacactggagttggcatacctgtggatgcacaaggccgaatcttcacaccttttatgcaagccgacagttccacatcgcggacttatggtggaactggcataggtttgagtataagcaaacgtttggttgaactcatgcaaggagagatggggtttgtgagtgagcccgggataggcagtactttttcatttactggagttttcgggaaagcagaaacaaatacgtcgattactaagctggaacgattcgatctagctattcaggagtttacaggattgagagcattagttattgataacagaaacattagagcagaggtcaccaggtacgaacttcggagactgggaatatctgcagacattgtttcaagtctgagaatggcatgcacttgttgtatcaggtactttacgtacattagtgtctgtctgtctttagagattatagtgagttcactaaaagcgttttattgttctggaatctttgcagcaaattagaaaatttggctatgattctaatagacaaagacgcctggaacaaggaagaattttcagtacttgacgagttgtttacccgaagcaaagtaacctttacaagagtcccaaagatttttcttttggcaacttctgcaactcttactgagcgcagtgagatgaagtctactggtctcatcgatgaggtggtgataaagcctcttcggatgagtgtcttaatatgttgcttgcaagaaacccttgtcaatggcaagaagaggcaaccgaacagacagcgaagaaatcttggacacttgctaagagaaaaacagattctggttgtggatgataatcttgtgaacagacgagttgcagaaggtgcacttaagaaatatggagctattgttacatgcgttgagagtggcaaagctgcattggcaatgcttaagccgcctcataacttcgatgcttgcttcatggatctccagatgccttgaatggatgggtagataactatttttcaatcttatctcttcagcctggtcatttcttggat

SEQ ID NO: 28018 - DNA, 2422 bp, Arabidopsis thaliana landsberg
  unsure (1)..(2422): unsure at all n locations
tagcttgagctgtttcttcttctatgctctagcaatttgagaagtgaatccgtgttttatgaacattgattcaatctatcattcgatttgtgtttcatagagaatgataagctctggaacttatctaagatgaaaagaacagaaagaaatggagggagagaagtattgcatctttaaggtggagaagaacatagataagagagaaatttagattagatattgttgttgatcgttttcgataaccattacagagacgaagaagagtttaagtagaagacaataagaggaaattgggcttaacactaagcctaaatcaaagccccactaaagcccactcatcttcagttttggtttgtatcagtatgctgcctttgctccgagatatcagatagagaggctgaacttgaggctaatgtttgggatagggaagtaactaaaactttggagtacattcgtaataccaatgtttgaggtatgagttactgaacatcgtagaaattatcattagcttcatcttttttattaccaaatctcggaatcatgcacccttctagatctactaacatttttaccggttgcatatctatgtccttcatgtaacttcagttctgtctacttcctcaattgaaagtgaaagtaatccctaaacatgaatcttcatcagcgaataattttttttttttttattgttttagaaaaaacaaatctctccttaaattttgttttcttttagatacaacattatttcattttaaccatgtatagtatagttaaaacaacgtaattaactaaattggtaaatataccgggcgtaaaaaacacctaatatatatttagccacatgcacaatacaagatatatatgttgcatttgcaatctacatttttttttaatcgtaactgtttctattaaattgagattaaaatataatcgaaattcgacctatgaatccattaagtttaactggatatactcaaccatagatctatttatatttaaaattttaaatagttccacctattagcacacaaattaattagtaataactttatagttgtattagaaataaataactaactgctagaaattcaatgacaattataaaatttaattgtttatgagagaccacagaataatatatattgaaattaatgaaaataaaatttaggatatatcagaataaactcaagatttgttgtccgaatctctatttttaatatggcagcttcatgtttaggttgataaaaataagaatataagtgggtggatatagaactggtaaaatagataaatcaagagtagctaaattagaatggtgccaattcaactaccacagactgcggcaccagatctaacccatttctacatttaaaaagatgtcctccctcttacttcactccttcctttaaagtttcttcaacatttaataagaaaagagttacttgtgattcttttcaaactgtaaaaagaggtaattacgtttctccccaataataaataaatctctttgtttttcttcaatattgtaacaatttataaatactaccaatacgtttatttcacttaagcttattgtgtatacaatatgttattggatatttttatatttaattttaccttcaattctctaaacaatcaatatacaactatctaagtatgtttactagcaaataaataaagacggtggaaaagagcctaaactcaccaatgcgtataaaataattatgatgtgagcgggtattgatttttaaaaatagatttttagttttgaagataattttgattctaaagaatccaaaataatataataaaatatagatagattaagaaacctatgaattttcttcggtgatttaaataaagaagaagaacggcgcgtttcgacggacaaatgaaaaaagttgaacgaaatttgagaactacgaatatattaacatcttcttaaccacacacaacaaaagaatatgtaaattctgatcttttagatggcattcacttctaaataagaaaatcaaaattttctgaaagaaacctgaagatttgaaaccaaaacctaaacttttcttcggaactatataaaaaggttgagtattattaaagtatttttcataatgatcataaacaaaaattgtaatggaaagatatattgaaccttgcactaccaaacaataaagtgaggtgtacttacaagctaacatcatcataatttgactatcaataatttcatgctcttttatgcagaaatatgttaagatcgaaatcattattatctgaaaacaaactagagatcaagaaagcagtactactgatattatcaataatttttggttataaaactgctactattgtattctcaactctttgattctttagacantgatactatttngagtaacggacgacagaatataatatcattttc

SEQ ID NO: 28019 - DNA, 1732 bp, Arabidopsis thaliana landsberg
ccaccattggagtaaatggctatctcaagttttctgttttggttgatatttgttttccaccactcaactagtcctcatagatgatggaaacatataacaaccaagataagagatagagatagagaaggaaataatccttgagtacatatagagagagcctagcctagttagttaatatctgtgattcagagtggaagtgagattgtgatggtcttgcagtataagcctgtgctgacttgggaacacttatttcaaactaatcccaacaaaacaaacaataaaatttacatcataaagttgaatggtatgttgtttggtatataaaaaaagaggaagcaaatttaacatctttaccattcacttttgattggttcgtcttcagaatccagagactttggttggtttggccgtatcaactagaaaaattgaacctcttatatgcgagaagtcgcttgtgttcttggaaccaacatttatcttttgtctcgtcaggtttacaaagcgcttcttggaagctgactcaacagcttgctgttaaataattacaaaggacctgtgaggaggaagaggtcaaaaagaagaaacagagaagatcaacaaagtttgacattgaaaaacatagatagttggtggtcagaagggctggattcattctttgccaaagcgtatcaacttcaccttcaggcttgttttgtgaatgttattccctaaaacagactttttttggtcttctgaatcttgttagttatgatgaatgaatcatagtatcttcctctttctctctctctcgaaatgtcaacttgttagagtggtcaccaactaagagttgacttatttacgccaacgaacttgtagatcctttcccatgtctctgtagccaacaaaaacttttatggagagagagaaatatcagatcgtggtcaaaaaaagaaacactctttttatcttgtcgtgatctgaagcttctttacacgctaacgagaaaaaaagaataggtatattgctttggttcatcttcttctcttctctcaaaaaagtcaatactagattcatttgatgtctccattggatcggcaaatttatgttcgattcttgattttttttcttgatgccatatgtttagagggtttctgttgacattcaatggatttaaccttttttctgtttgtggtaggcatggacatagtgacttttgggagagatgatgatgcaatgtttagatggattaaagcacttagccttaattctgttgacttgttgtgatgctgatcctcccaaggttcgtcagaaccctaaggatgtggctagaggcactgtgtgtatgtgtctacccctacatttacttttactatttttatttgtcacaaccccaacaatggctttatgtaccaaatgcagttacagtgaatgagattgaagctctttacgaactgttcaagagcattagcaaagacgggcttatcgacaaggtatgcaagaatccatagtcggacacgagtactatatctctctgttcctctacattcactaggatcctttcaaatatattgcaggaacaatttcaattggtactattcaaaatgaacacaacgagaagcctttttgctgatagggtaaattagatagacttgtaactcacttatatgagtttccctgctgtccactcatacttcaagctttgcaggaaattgaaatgtttgataccaagaatactgggattctagatttggag

SEQ ID NO: 28020 - DNA, 1653 bp, Arabidopsis thaliana landsberg
  unsure (1)..(1653): unsure at all n locations
gaagttgcaggtgatcttgccaaagccattatgaagaaaaacggagctccattgtccatttttgaacacaatgatattctgtctcaaataagagctgaagctaaagaagctcatgatggaatgatggaggcaaagggcataacatctggaagtaagtctaaatccttaattgactaataaacgttgtcttatatttttgtttgtttaacctgatgaaatccatttgcagtgacgcgtatatgtgatgcgcgtagaactgaaccaatcatggtggaagataatggtcttgttctctggaaattgaactgctatgatgaagaaccaaagtttttgctccaaggtttaaaattcactaaactctttgtttatgtttcttatgcatgtgtttactgtttagtaacttaatctgaatcttattaatgcacagatctaggaacatttgatggtttatgttcacatgaaaaatggttagcttttaagcctgagcagaaaccagatatagagaactatatctcttacaagaggtaagtcattcacataaagagggacattaacagtgtgatattccgattatgtaatgttataattaaacaaagctttctgcttctgttttgtaggaggaaggtgatgcaaacattgaagaacacaaatgtggtagcataagaatcagaattcagcaccaagtcccaactcaaagctcatcattttctgaacaaccttgaagtttttttgaacaaactttaaaaagtagagtacgagaatagaccattatgcaacacccggaagtctgaaatgttttaacttattctcttttgaattgttgtcttctcttgtttaacccggttcaatcatattacatcgattgattgtaaactttggtctaatgaaaactaaatatgatattctagttctnnnnnnnnnnnnnnnnnnnnnttctgatgaatcagacatctgaaatctgcttgacttgtgcatgaacacgaactcaatgatacatagttaagaggaaaacataaccagagcaagatgctgaaacttctccactagttgtttcattagttaagaagaacaacaaaagacacaattattcatcatcatcccacattcaaaagcatatatggtaatgtcactttatgcaaactcaattttggtccataacagtaaagacaaaatgtgcaggagaagtgaattgatatgattaagacacccaaaagcatgactgcagaagaagatcaggcaagtggatcctcctctctagctttccgtagcagctctgctctaactcgccttacctccgcttccttctccattctttcttgctacacgtagttacagttatgtagtcagattaccactttaattttcatattctataaaactaaatgaaacaaaacaaacacaagttaggcttagcttagcttctaatcatcacttcttaacaagaagtcaaatcatgctaaagcttttcgaataactagtaatgatgataagaggctctatttgtgctttcatatatcaacattaaaccaagcaatcaaacaaaagttaagccttaagcctctaatcatcttatcttcataatatgactggcaaagtttgtatcagatagaccaaagaaatngttatctacataatcaaacatgcatatctata

SEQ ID NO: 28021 - DNA, 1631 bp, Arabidopsis thaliana landsberg
acacacacacacacacagtgctttgagtatagacattaagtggttttgttttcttattattaatactcattagagtattaagtttgtatagaattcagaaacaagtgatagtcattttaagatttttaattacaaaacttttgatcctctttgaaaagcagagaaattacattttttccaaccaaagttaaaaaattagagatgtgttcatagagatgggttttttgttagcctttccaaaaagatacaaaactagccgatgattaattttggtaaattaatgaacaagaatgtaatttgaaacattatagggagcaaatgagaaattactctttttaaaaggctaaaatcctaattacctttaaactaagaagacaagaagagaagagaaaacatgttttccattagaggactgtgagattgcgaattgcataatcttcgtcttctggcgggaaaagatgccctagataaagggtgaaaggggaaaactctacttcttcttcttcagagagtgagagagatgcattggattgctaccagaaacgccgtcgtttcattcccaaaatggcggttcttcttccgctcctcatatcgcacttactcttccctcaaaccctcctccccaattctactgtaatcctctcatctccttgtataatcttctctaatatgttagcaagttcagattttttgtattttatgaattcctgtacttttgaatattgaactcaatttctttgattttggtgtttggtctagttcttgataagaatcttgttatgaaactttttttgtattttgttatgtattgacagtaatagaaggtactctgaggggatatcttgtctcagagatggaaagtctttgaaaagaatcacaacggcttctaagaaagtgaagacgtcaagtgatgttctcactgacaaagatctctctcatttggtttggtggaaggaggtaaagcttgttttgttttttggttaagaaatttcaagtcttgatattgtttcgttatatactgattttttatattctgtgtctactcagagattgcagacatgtaagaaaccatctactcttcagcttattgaaaggcttatgtacaccaatttacttggtttggaccctagcttgaggaatggaaggtcagttctcttctgagactattagaagatttcatctcaccttctagatgtcagcctttaatcatttttagcttggttatcaaatgaaaagtagctagtgtatcttagtatgacttaagctactttagttgtgaaggctctaagtactttagttggaaacaatccattagttttattcctagtccactactttagtccagtttgttacggtaactttgtggcctttatgtatgcaatatttggaattttcttcatttcagtttaaaagatggaaacctcaactgggagatgttgcagtttaagtcaaggtttccacgcgaagttttgctctgcagagtatgtttgttgtttttctaattccattgagttttgtgatctctgttacttcagaacaaaaattagcagaataatgtcatttgaagtctttatcttatgaagactgttactgttctgaaatttgtttctccagggaggagaattttatga

SEQ ID NO: 28022 - DNA, 833 bp, Arabidopsis thaliana landsberg
  unsure (1)..(833): unsure at all n locations
cttttcggctgatccaagctccgcgccagtaactattgcttttatcaaatgcttcccactaacctgggcaacgatctgtccaccgcattccctcaaccaagtcagacaagacttagaaacgtcatttttatcaaggatgagcataacggattccagtttatctctgaaggatttccacaactcaacctcttcctctggattcggaattccaccaaacagttgagaagctggaggggtactcaagattgttttataaaatagaggcatgtcagtcaaggcttgcaagaagagttccccaacttgtcccactgtaacctgaatcacacttaacacatcacaaaacaccaaaacaacctcacccgcatcctcaccagtacaagcattcaacttttgcagaatccaagtcttcctcgagtctagaaacaactcaagcacttgctctggatcaagctcatcaaccaccgcgacagcagttaaggcatccacataagctcccagtcctaaacccggatctagaagccgctcatggctcctctgcgaaatctgagccttaaaactctcaactatctgccattggtgctccaatagtggaaaattcgccaacagcttactctgatccacctctgctacactaccaccacatccctccaacttgatcagnnnnnnnnnnnnnnnnnnngcacgcatgtacctccccgcagcctctagaaacatagactcgtcaaggcatccccatatattctcaggcgtatccccccgagtcttaacacgacaagcgatcccatagacattgactcgtactgggttaaggctatgcaagcttaggcgtttcc

SEQ ID NO: 28023 - DNA, 1940 bp, Arabidopsis thaliana landsberg
gaaaatcaagttgtttctcagtacaacaaatatacaatttaaacattattaagcctaaaattaaaacaataatatctaaaatacggaatacggtaaataaaggcatttgaattcataaaataaatggtggaaaaatcaggccaatcactgagaataaaattaaaaggttaagtcataagattcaaaagtttaaagtaatttgttactgagagttaaaatgataaaaattcaaaaattatacagtaacttctcgaaactaataatcccaacacccacaagtagttgaactcaagaaaaacactcaaactaaagtttttagaggagatagttttccatgagtttgatcagagtaacacattagttgtgcgatactcaaagaaaggaaggagtgaggatgagaagagccttccatagtctcttggtaaacagtaattttgtatttgaaacctttcagaatgatatattatcactcagcgaggctgaagaatacaaatataaatgtaactacttgctcatagttgaagataagtagaagttccaaaacacagaacccatggacatgaacgctactcgagcttgaagcgggactaccctgtaaatttcacctttcatcagacctcaatcctattatacataatcacacaatctataaagaccctctccaaatgacttaatgatagagaaagaaagccataccaaaagttaagtatgctaacgggaacccagaagcgaaatcctgcagtaatcccaagaacagtaaatatttgaacgatgctatgtaatagtaaaaaaattactctctgtaattggtagctcaccataaagaagcgtaggaagagcatctttctgatacttgtttccaagctcagagagctttcccagccacaagttgttccaagcaaatataacagcaatcacagatggaccaaggattacttggttaagcagaacctaacatgggatcagtataagcagtaaaaactatatcacaacgtgttccaagtacaaattaacaaaacacgcctagatttgtaccttaagcactagatttgtcgcagttggtttaggcaaagaatgatcaaggaattggtaccacgcataagaaccaggaccatacaagagaaacccgtaagaactcatccgcagcgcacgaatccagtcatgttctgagaaaatgttccacaattccccctaagtaaaacgatccaatcataaatccttagtctcaagccaagttccaccaatgtacgagaccattttgcaagagagtaaatatgagtcaccccaacaagaattcaaatcaaacataacctaaccaaagactgtcactactcactaaacaaccatactcaccaacatttttggttatgcaaagatccagtttcagtagaattctcactataccacactaggaacttgattcatgtaatatttcaaacaatcaaaacattcactaaaacctctaaaattcaaatctatgactcgaaaataaccaaaacttggtcagagacaaacctcgtcaagctcagaagatgattgtttaagagcggttctctttttccatctccctgatagctgagcaatcgtgtcaccggtgaaagtgagtgctccggccgtcacagcttgcttcaaaggaaaccgataaccgccggcgtctctgctcacatcgacggaatccgacgatccagaattacgtttcttacctctatcaccggaagacttcttctttctccgttgatcgaagccattccatccccagaaaccaccagcgccgccgcaaccacccaatgcgtccattaaaaatgcttccttttgcgtcgaaacagagaagagttttgcctaaatcttaaaaatcgcaaatgagtcctgtccatttgttttttccggtttggttcgattcccatttaatggattcttggggtttcggaaacaggtccaaa

SEQ ID NO: 28024 - DNA, 1318 bp, Arabidopsis thaliana landsberg
aagttcacaatatgtcaccatcattaataagcatgcacacttacaaattcaaataacataaatacattaaactaaatttttcctcgcgatgcactacgtgtttgcctctagttgataattaagaatagtgaatagaggattgataagaataattgttctaaacatgttatgtaccaacataaataaaggagaaaaattgttaatacgtaacaaactctctaaaccaaattgaccaataagttgaagcatgttcacattgttgttgggaacaaatgtttgggccgtattgattgtggttttagaaagactctgctctcattgatgatgagccgtgtgctctgatacataataagcaagctgtgtaaccttgaacaatgaaaaatgaaaaaacttggcttcattttctctcttgaacaatgaaaaacaaaatctttctttgcgaacccatcaatgagggagggattgatctctcaagaatcacttaagcggcaaatattaactctttgttaatgaaccaactatacgacattcgcggattgagtcaaccaatataaacttttacctatataaataaataattttgaaaaaccaaatgtatttaactattctccatactattcttgaatcattctttttaaatggcaatttcctctgtcacaaatgtgacatgatcttccatctttatcattcttgtgaataagtaatctttttattgaagagaacattgtgtgaatataaattgcatccaggttatttttactctagtatcacagtaattaagaacattgtataagccattgataagaactgtttctctgaacatgttatgtacgagcattaataaatgaaaactacttgctaatatgtactcaagttctctaaccaaattgaccaactatctggcacatgttcacattgttgctgacaacaaaagtttaggccatacggataatggttctgtaaagattttgtccaccataatgatacgctctgtgctctaatacataagaagcaagttgtgtaattatcaaaaattaacattggcttcctcttctatcttgagaatgcaaaaacaatattttttaagtttaggcccatcaataaagtagggaattgatctctcgagaatcgcttggacatcgaatattatctcattaatgaagctaccatacaacatccgcggattgaaccggccaatataaacttttggatgaataaacttagaaaaccaaataaaataaaaaaattattaatatatttaactattctcgatacaattttttgaaccattcattttaatggcaatgttcttctatcc

SEQ ID NO: 28025 - DNA, 1390 bp, Arabidopsis thaliana landsberg
atgtgattctcagattcttaatgagtttattacaagaagcaaaggagagtttacactcacatgtagtcctaaagttgctagttcgacttcaacaccggtttataatcggaatctctctcaagtgtttagtcctagagtgattgatttaagaggtgagatgagtccaaggctctccgggaaaggccaaaatagtccaaagccgagtcctttaaacccatcatcatcgccgaaatgagtttaccgatgatggaggcttgataaaaccggaggagattatgtttaaaattagttaattaattgatgttgtatcttatgcattcttgagtttttttttttctttttacctatgtttaaaattatgtttgcatttctgttcttgatttagaatcattgtaaaatctctctaaataccatgtcaaatgtcggtaaaacattatactatgtaataataaagccatgaaacatcagcttataatatagacgttcacgataaaagaaagttcgagagaaaaaatctaacggaaacatgaaaataaagaacaacaagaaaagttagtggcttttgccttttggttatgtggttgtcttaaactgtgtttgttgcgtctcgatttttattgtcggatcagagattagattaagacattctcattgaccatttttccacgcgtaggtacagtaacttaacctgattaaaaccattctagtttgactaatataatgttttaaagatccttcgcagaatttcaatacaaaaaagggctaaaagttgcacctttttcttattaatattatagtcgaaatcttaaggccaactattcccttaaaatccaacaaggaagaaaaccttactgaatccaatgggcttaatactttcagacagtttaaagatttatggctttcctcgaaattatgatccattaaatgcgtgtctcctcattgatgatcatcagcaaatcgtgtgtcatattatattaaccctaatcataatatattaatactataacaccagcaacattatgctgagtcatacatatatatgctaataagtactagtagttgttaatttttattggtaagataccataacactagttttatattagactttacacgaacaagtttcaaaattttagcaacgcattagatcttgagcatcttggtttcgtctaaagaaacattatttagttgaatgtcttacatagtaagacaaatatttgggggtaatatataaaaaatgtgataatttttaacttttaaattagcatttaggttaaattagatcatacattcttaatatgataacaaagtgtatgaccgcctcaatagacagtttttttataaagaatggttttgcacctagtctatacaaataacatggcttattata

SEQ ID NO: 28026 - DNA, 1129 bp, Arabidopsis thaliana landsberg
cccggatctagtcaagcaccttccgtttgttgcaggtgctatgattgattttcacgctacagctgaatactggaagaacagggctcgtgatcgcttatggtctgtttcctctctgtagagtcttgcgatatattagtttacgttattgtcataagcttaacagtgtttattcttttattgttgtaacacaggattaaaatgcctaaaacttatgtcgtgcacctaggaaatagcaaggagttgatggaagtagctgaagatagtttcgccaagaatgttctccgtgagcaagttcgagaatctcttggagtgaggaatgaagacatactatttggcattattaatagttagtcatttcttacattctttctcttccttagtttctttaagaatcataatctgcaaaagactcaaaattttggttaatttgctttctgactggtgcttctcttatgcaggtgtatctcgaggaaagggccaagatctattcctccgagcgttccatgaaagtcttaaagtaatcaaagagactaagaaacttgaggtaccaacaatgcatgcagtggtagtaggaagcgatatgagcgcacagacgaaatttgagacagagctacgcaactttgtccaagagatgaaacttcaaaaaattgtccactttgtcaacaaaacaatgaaggtagcaccatatttagcagctattgacgttcttgtccaaaactcccaagccagaggagaatgctttgggagaataacaattgaagccatggcctttaagcttcctgtacttgggactgcagcaggaggcacaatggagattgtagtgaacagaacaacaggtctattgcacaacactggtaaagatggcgtgttacctctcgccaaaaacattgtgaagctggcgactaacgtgaagatgaggaatacaatggggaagaaagggtatgagagggtaaaagagatgttcttggaacatcatatgtctcatcgaatagcttctgtgctcagagaagtgttgcaacatgcaaaaattcactcacgaacaaccaattcggatcattaaacaaaagtttagcatggaaatgccaatatgtactttattttacagcacacttctctatagaggttttcg

SEQ ID NO: 28027 - DNA, 1365 bp, Arabidopsis thaliana landsberg
  unsure (1)..(1365): unsure at all n locations
caataatccaaacataaaaaaacatcccataagcagaaacgtacttaccttgataaatcgttaggcaaacacaatgacctgtttcttgcggaacaattgaaatcaaaatcaaaacaacaaatcaatccaaaacttgggaagtttaacaccaactcgttgaaaaatttcaggatttgtgagaggaagttcaatgtaatgtcttaggtctctgatttgtttagataaatcaccaagatctgagtagctaacatctctaccatgccgatgcaccaatattatannnnnnnnnnnnnnnnnnnnnnnnnnnnnnnnnnnnnnnnnctttcgaccccaaacgttttggttttatcagtttaattcctggagattcacacattatatgacacaagaatacggcactttactttcagattttagcagtaaaactcatctcaactcgtatttcgaaatttcaacacatcatacacaaaaaaaaaagaaacaccaatcctttgggtagtatttgtaattttctatgaacagaataagtaagagagatcaagaaacattttacaacattctagtgatctcatcgtaaagcacgagcctttgcgtgttgcaagacttctttgagtaccgaagctattcgatgtgacatatgatgttccaaaaacatctcttttactctctcatacccattttttcccattctcagccgtaactcaacttgcgtcgccaacttcactatgttcttggcgagaggtatcactccttctttccctgcactatgtaacagaccagtcgttccattcactacaatctccattgttcctccggctgcagtaccaagtacaggtagcttaaaggccatggcttcgattgttattctcccaaagcattctcctctggcttgggagttttggacaagaacgtctatggctgctatatatggtgctacggttagagttttgttgacgaagtggacaaagttctcaagtttcttttctcggacaaagttgcgtagctctgtctcgaactttgtctgcttgctcatgtcgcttcctactactactgcatgcattgttggtacctgaagtttcttctctttgattctttcaagactttcgtggaaggctcggaggaacagatcctggccttttccacgcgatacacctggaaatagtaacaaacttaaagtaaattcattggtgacgcgtgaactcttactccttaaaagatgatgatgctcgtcagaaaacagagaaaaagaaagacttaaaaaaatgatggcatactattaataatgccaaagagtaagtcttcattccgcactcccagagattctcggacgtgctcacggagaactctcttggaaccattatttta

SEQ ID NO: 28028 - DNA, 1413 bp, Arabidopsis thaliana landsberg
gtaataccacacctttttttactattgaagccatgaagcacctattaaggcataaatattacctgtactcttgactttcttctactagttgtttgctatcttcccaaattgaagctacggtgatttccttaaccaaaacaaaaaattatctttaacgtcccagtgaatccagacaaaaagaaagcaccactggtaaggtagatataccttgaaagtgtgcaacagattggtaaattcttcagccagacgctgaagctttctggcctctttttcttctttttccttcactctcccaaccaagtcatcatatataagctgataaacaacggaaaaataaatgaatcagagccctatataacagaactttacaagaacttcttcacacctaatatatatcttccaatgtacacatagccgtttctgttgattaatttatgtactgacacatgttctatttacctttaaatttatgtctgatatctgttgagtactgagatcttctgaaatagcagatttaaaatcttcaaacagccacgaggagaccatggaaatctgtagagaaagggattagataaaaaaaattggtaaaattagtaagtagaaattgaagctatccttgacttgcctttcttgacttcatagcatccttcacatagctcttatcctcatgatactgtcaatcaaaacacaaaaaggttcgattatcataactagcagattcacgcataggtggaatactctaccaatagagaattacactatatatatagtccaaattacctgcttctctaattcttctgtgacatcttcaaacaagtctttcggagttgaaccagatgtattagatgcaacagcttggtattggggcaagtcttttaactgtacgtaaaataagtgaggaaaagaatccaacataaaattcaatttgtccagtaaagatctaaattggtcagacacctgaatgcaataatccaaccagtacgtcttggctgtaaggatgcctgcagcaacatgttcttccaatagtgtacgaaatgcatcacggttttttctctcggcccgccttacatgttcctagctccacaagaaaatgaaaccatgagcattggactacataagaacaaaaaatgaggttacaaccctgaacattgaccttactttctctcctctcttcagctcttcttcttccttctctaggtcaagaatgtattcctgcaataacaaacattataaacaaattctatgtggcagcctgaactacttgatgaagttacttacctcaaaaccaatcagacgatctatcttttcaagacatgagcatctgtcatcatcctccagtctatcttgaattttgcgccattgtgtaccagccttgaaacacatattataaaaggcattagtcaaggtcttaga

SEQ ID NO: 28029 - DNA, 1276 bp, Arabidopsis thaliana landsberg
gatatttgcgattctacacaagcaaaacaaaacttaatggactgagtaattctgcagtgttagaagtaaaacttagtgatgctttgaatgcattacctttccctcacacgacgaatctcttcaagaatttctgcagtctgctgaaccttaagattcttgggtttatcttcatgattaagcaccaaggatgcaacatttacaacagtaactagttcagcttcgattctgctaagtttctggtctaaattttccaagaaagattcataagaagacacttctttcaggatgctacctattgaaacatcttctagtacattattattggtatcaagaagttcttggtaatcctcaacattcctttcaataagttgaattccctcagaatccaagtgagtgtggtcattttcgaccccgtcttcagtagattcgggctttggcgatacaatgtggataccacctgaagtattctctccatcctcttcgagatccaaagatatattgcctatcagctgtgtttccttgacagatattgcctgaaaccaaaccaagctttcaagacatagttagatagatttctggggcaattgaaaacaaacaaacaaccaaaacaataacatttcttaacaagtaagagtattgtttgtttgtacctcgttaagtttggaagaaagcgtatcgagcaactcgatacgagctttagccttgtccaaagcttgcataacttttttcttctgaagaagtagatctctggcatcattctctttccctgttcgaacattgacagctgcttgtttccgtagattctctgcagcctcagataatctcaaaagtctcaacctattactgtttgctggaccaacaacaacaaagaccaaaaataaatcaaattgacatcatcaatcactggattcacaagcagtaaaaccatgctgaaaccagcacctcatctttccaaagtctacgactttgaaatcacacattaaaacgaagattagcgaataaagattccacctttggcacgagtggactctgcctccgcgtgaagccgatcaagctgggagcgaagaaggtcagaatttgcggtggcagagaagcatctcaggctcgttggaatcctccgagactgagcaatcaccaccggaactccgccgatggtcgtcgtcaccatgtttggtcttcttacaaagcgcacacgttctgtgacattgcagtctccgttattccgttagttctacaaaccgatttgaatacctggtcatctaaaccgtaataagac

SEQ ID NO: 28030 - DNA, 1229 bp, Arabidopsis thaliana landsberg
  unsure (1)..(1229): unsure at all n locations
ctccttcaaatcaatagattatttgttgttttcttttaactgggactttggtttttataagcgttgtaaatattcttttgccttagacacagctgctgcgaaggaaattccagatgtctttgttcaggagaaatatgtccaagagaatcatgctgttaagcaaaccgaggtgttgtccaannnnnnnnnnnnnnnnnnnnnnnnnnnnactccctctgaagatgaacaagtatcagctgcagaagaagttctggtgactgaaacagttaatgaagcaccaattgaagtgcaaaaggttggagaatctgattctaggactggcgaaattccaaagagatcttatgcatcaattgtaagtaacagacatttgggttgtgttatgtctcctcttggtcaagctgatgtgagatatttggcttctctgctcccatgatttgatgccattcgtgtttgtaattatgatatgtaggtgaaggttatgaaagaaaatgctgcaccaatgtctgcttcgagaactccaacaaaggtggaaccaaagaaacaagaagatcaagccattcatatccctctaccaacaccattgtctgagaaatcagattcaggagcaaatgttgctgtaagtgagaacaatcaagagaatgaaagaggtaaatgctttttttctggctcatatttttaatggtaagcatgctcagctgcaatctttctcatttcttgattccgtaacagctctaggtccatccatctatctaaagggcttaccccttgatgcaacaccagccttgcttgagaatgagttccagaaatttggacttattaggaccaatggaattcaagtgagaagccagaaggtaaaagagtccatctttaatattgctcaacagttctaatagtaagtaatttgccgagtatttactcttttaagtattgtggcctacagggattctgttttggttttgttgagtttgaatccgcaagttccatgcaaagcgctatcgaggtaagaaccaacggtattacgtctgaacttttcaaggccctgaacatcttaggctaactaactgttacggaaatttccaacaggcatcacctgtcatgctcaatgggcacacagttgttgtgcaggaaaacccatctaccgcaagaggcaagatttcttaaaactttgagaaacaaactctcaggatcttaattcttaagacagctattatatcattcattgttaaaca

SEQ ID NO: 28031 - DNA, 1813 bp, Arabidopsis thaliana landsberg
ttgacttaggtttgagtacgttaattcagaatctctgttgttttgttggctctttggccaaccttggcttatggaagctaaagttttgaactttttatgtgatttacttactgagagaataatgtgtcagctaaaattagatttttttttttgcttttgggtttacttcaatctctatgcatagagttatggtcttgcctctaaagttttttatatcttttgctcatgttttagatctatgagtaaatgctgttgtttttcatttttgttccaattttggcttctttttttatccctttaggacaatgttggtgaatttcagttataggttcttgatctacggtttttaatatgttttgcttcatcgttgctaaagctttacactcattgactcattacaatctaacttaaccaggttcttaaaatgttattttaatgcaaaaaagctttaacatgcttgaaagtagccaaaattcagataagcaatcatttaaatatggttcttgcaatatgatctgtttctgttttttttggtctcgctaacctcattctgtcgtcaaagtgcagctaaaacccttgaaagatctgaatgatcagatatgtcagatctgtggtgacgatgttggactcacaaaaactggcaatgtctttgtcgcttgtaatgaatgtggttttcctttgtgtcagtcttgttatgagtatgagaggaaagatggatctcagtgttgcccgcaatgcaaggctagattcagacggcacaatggtcagtagtattatgtgctattatccttatagtctgggctcatattaatctatcgagttctttattttcattttttgacacatttgattttgtatagggagtcctcgagttgaagtagatgaaaaagaggatgatgtcaatgatatcgagaatgagtttgattatacccagggaaacaacaaggcaagactcccacatcgcgctgaagagttctcttcgtcatctcgacatgaagaatctttacctgtttctcttcttactcatggccatccggtagggactagctaacatatgaattatcgtctaacgttagtataatgacattttccaagatgaaaatctttcacaacatcaatttttcttgatgatttctatacataggtttctggagagattcctacgccggataggaatgctactctgtctccttgtattgacccacaactacctggtatctatcaacttttgcttcgtgtgtttgcttcggtgaccacaacatattgtatatcttgtgattttcacatgttgagtacaaatatgcagtccctgtaagaatcttggacccgtcaaaagacttgaactcttatgggcttggtaatgttgactggaaagaaagagttgaaggctggaagctgaagcaggagaaaaatatgttacagatgactggtaaataccatgaagggaaaggaggagaaattgaagggactggttccaatggcgaagaactccaaatgtaagtggaaatactagaccaatatctctattgtccaactcaaacagctcttggccgtgatgctaataaccactcttggtttcttattatgtattgatagacataattaagtatctgctttgttacatttgtttccttccactcaattatggttctcgtacttacagggctgatgatacacgtcttcctatgagtcgtgtggtgcctatcccatcttctcgcctaaccccttatcgggttgtgattattctccggcttatcatcttgtgtttcttcttgcaatatcgtacaactcaccctgtaaaaatgcagatcct

SEQ ID NO: 28032 - DNA, 1561 bp, Arabidopsis thaliana landsberg
gcagttttcagagctcaacatcttgtcattctcctctccttcctctgatgacataatttcgttgattatttccattagtatcctctccatatcttctccatcggtccaatctctaacggtagccttaaccaacatgggattttgactaatcaaatcccaaaccgggaaattcttccttggcatcatgtaatcttcagctttgagtccaagactgggacagtaatcaccagcaccatctccaagatagatcatcttgctcgtcttctcttctttggttagagaagcttgaatcctatcgattattaaaccctgtataaataaaaaaatttagtgttaatttagcacacagataggtccatattgactcataacagaatcaaagataatatattttacaccaaaaagtttcccaaaatccctgaaaatagtaatgacaaatcttatcttttgaactaatcaatcaatatgagattagtgtaactgcagtaccttgcacatgttaggagggcaacgagagcaaccatgagaagatttggtgaagtcatggtaaggagagactattaatcttccttgttcatctacaagtcctggatttgtgttaatctcggagaaaaactcaccaatcccgagatgttcaatgattgtttcgatgaacaacgtgtttgcgtcgctcactattctcagctcgcacctaaatattatgtcgtatgattcagtaccttgttatcaaatgacaattgaggaatataatatagatttttaccctaaatcatgagcagatttgatggcagggatgacacgtggatgaattgggattctcctaaggacatgtttgatttcttcaatggttttaccatgatcatgaagctccttcatcatccgattctgttttgaaataaaaccaaataaggatttagtgttatgactgatgaacatatagaccaacgtaacaaagccctagagaaaccgaaacagagaagaattagagagattaatgaacaaaacaaaccatgagagagttccaaggcattgttgggagaagctggttgaacaaatcagtgaaaccaagttcatccacgacccaattatcgctgtctacatcgatgattgtcttgtcaaaatcgaagacgatcacgatgttgttattattcttagccattctatcagatacaatgttttataggtactgttttatcgatttctgtatgattatggaatttggagaagaagaatgtgatatatatacgagtgagagaaggtgaaaaggctagagacgaatagggatctttcgaggaagatgccattggaatattacttaccgtcagacgcaaggtaagagagataattaagaatcctaatctgatatgattcgtatcttttgaaccgttagatctgatgacgtttatgtgtcaaacattgactaggtatactgatccaacgggtgttgatgactcttggtttattttgtgggtattattttagtttggctcgttaaaagttttatttagtggatttaggcagctgacatttgagaagacaccggaatggaaataagataaaa

SEQ ID NO: 28033 - DNA, 1441 bp, Arabidopsis thaliana landsberg
ccacacaaatcaatcatctttcaggattccttgaacaaaataagcataaagaatagacaaaagacaaggaagtaccttcctatctcgagacagcgccgcctttcgatcaaatatcgatgctgcagtaaccaatcagcaaaggcaaatgtacctggccacagcaagtttgcattcagctggtggaaaccaaattcccgaatttgcagttcctattcaaacaacaagtaatcataaacttgtttgaaatactaacactaaccttaaactcaatctcagtaagaaaactatttcacaaaagacatcacagcgaattcatgaattcgtttcttcaaggcaacataatttagttaaacaccaaagcagagcaatctaagacctaatccactatatgaactcaaaatcactgaaatcagaagcttaggtttcactctcaacggagaacgtaaactaaatatggaattgatattactaaaagcagacgatagaagagaaattcgggagcgaagaaattacaattccaggaaactgatgatttctctcaacgaagttctggctcgtctccgtcgtctctccatctgagaataaaaattacagttacttcgctaattatggctctctcccttcgatcaaattagaaattgaaagaagagagatttcactgaccagaggagtcaccgtctgcggcaaagagcgacgccggtgagaagagggcgatgtccatgtcactcgttgagttgttgttagctaagcgagaggctgtgttcctccaacggtttatataatgtgttcccatctctgagaccctctgaccctcccagagtgtccggagattttactaaccataccaaattaccaaaaccaaagacataccaaaccgtgccaaatcgattcctatttaactgttttttaaaacaaaattcgtaagttttcctttcttttcgctctcatattgttaattaaactatattttgttttgtatttttatctaaaccggccgcattaagcgtgaaccgaatcaaacaattgccaatctaaccgcacaaacaaaagtactgtaggttttcaagtttgaagagacttctcgaaccaaacgaacgattttgccgaaccaaaaaaaaaaccgaacggctaaaatcaaaactctagtcaaagtaccattgagaatttgagattggtccataacaaggagaaattttggtttcccacataatagaaatgcaacaatggtatgaagtctcttgtcatcacactatacacacaaataactccaaaacctgaatttgttctgacagtctaaactctcaaccaagtaatggttacaagaaagtattcgaaatcattcaataggccatgagaagacggcgacaaagagatctttcttgtaattaatcaaacaaaaataaagcaatagatacaggagaaaagataagagaaaaagaag

SEQ ID NO: 28034 - DNA, 1612 bp, Arabidopsis thaliana landsberg
aacagcagcaatctgaataaaagttaacattacgtttggagtccaacttcagcattgcagctttagtaagtattgcgaaaagaaaacaaaaagtaaccaagtaagtagactcaccaccaaagacagttctaagaagcgttcaatagtcatgctcccacaatcaagcttactaaccaataactgcagaatctttatagcaacctccatggcatgtgaacctgaataacatgtctcacattagctcccagtgaaaaactattatcaaatccatctacctcaacatggcacgttttctttgacaccaaatataatcaatccgaaatagcattcaatggaatctaatgtgcatcatatacacaacaaaagaatgtaaacccaatgaaagagtatgtattaccatcaggtaactcagacatctggggagctatcactctcaagcctccagagttaatcaaagtcatgagaccagcttcacaagccgtggacaccaaatacagaagctcatagcaatcttcgagcatgtttgtagttattctgaaattccaaaagccaatttcctaactttaggcaatcacaatatgcaaaaagttgaagacacagaagcaaagcttgattaaaaaaaaaacttcatggaaagtcgcaaatgcaagaatcaggtgatctaacataccctttggacattacttcgagaataaggggaattctggagaccatctcttctgaagaagctatctccggaacacggcagaatgcagcaagaacagtgatagatatctgcagatacacatcacgattatcaaccccatcgccactgccactacctgcaaaacaaaaaatcgaaaccagtcagagcaacaaactttagtatctcaactaaaaaattcacactttgtagaaaccccaaaattgatattagtatttactgagacaaagatcaataattcggggttttgattaccagtacggaaaagacggtcgagaaagtgagtaccaacggcttcgtagaccttgttgagagaaacgatgtcatcgttcttacagaatttggtgacgagaagtagaccggcgagcctctgctcgtctctctcccctttcaatagcttaaggcaatcgtcaagcgacggagatcgttcctcctgtggtgctgctgccataatcacccaactcaaagagtaacaaaagtagaccaagtcgagagaaaggtgagcaaaaaaaactaaaccaaaagctgtttgttgtagacgctcaagcaagaagtaacttgtcattcagtaggcatgcagattttgggccaaatgccaatgggctttgttaataatacaagtgaaatcatttacaatcatgtatatattgtggattgtcctatatcacatccaactgcaaagtaaccatgcatcaagcggtgatagaaatcacctgaacgcatcgtaatcgtaatgatactttgcatgctagttgctttatgatatatgttgcatgatacattcatgtcctagttaagtattgactcttaccaaggagaaatccacacttgcttgagcgttcgttacaagacgccaaccaaagaaacaaatcagttccggaaactactaagtcgttaccaacaacaatt

SEQ ID NO: 28035 - DNA, 2708 bp, Arabidopsis thaliana landsberg
ttgatcatctaattaataaacctgtataaatttcatttagctatatataatattagagtaggacatcttgatcttaccacttttcttggtgatccagttgcacctctttggttcatcactactattgaaatcctgacatagttgttgtgggatactttttggaacaaatatttctcttctgtggggagatgagattaaaccgagtgccagagagatcttttgttccaacgtcgaatttgaatccgtggaaacagaatcggtcgagttctgagagagtgatagagatatagaagagagtgaaaatgaagaagaagtgcttcgttgaagcgtgattgggtaaatcctctttaagtgtttggcaaagaaatttgagttttgtttaatctccttctctcttacactcttgcttttctctacaatctcttttcttttaggacttgccttatacatctttgattttggagtaagtcaaaacaaagaatagccacacacaagtacttataggagagcaatgcagcatacaatggagtttttaagttaatgcctaattacacctaagttggtgaaatgtggattttcaagtctgtgaaattttaccatatttgaatattttcttcattggtatgtatagacgaaagaaacggcaaaatttcatatagattttattttaaatatatagctgaaaaagacatactacaatttttgcatttacttaagttggttttagatctaatgcatgcatcaagaaaggtgacaaataaccaaattggtgaagtgatccatcttagtaccttttctaaatctaatttactttaaaaactttatctgttggagttcttctttgtgtacttgatttgaaatactaatcggtatatgtataattaaatttgagtattattgcatcattgaacattcatattccaataagttttctgaattttgtcacgttaaagtaagtggaaaaaacaaattgatatctgccattggattaaaaaaaccacactagtatagttcgcactcaacgcatctttcttcagtggaaaatatgattattgatatggttacggtgaattaaataattataaaccggattattcttagcttctactctttgctgctgcatgctctcatgtttaagagaaatgaacgttttgcctattttcgacaaagaactctcatcctttttttatgtataatatatactttttcttactacgtatttgttactttgttaaaatgcatgtaaactttttatagcatcatcatatatcaattaaatagttttagtctatttacactaattcaattaaaataaaatttgttttatttttaaattatttattttaatttatttcatttattttgtttcaccaatactcttttttttttaaaattatcttcattttttctcattatttcaccaatactcttcacaaagagaaccatgaatagatgtaaattattttaacatcatcatattgacatactacctaatttgactctcactttctaatttttgtaaaccgtcataaaagttgaatcggaatataaaattgattcggttagtgattaaccgaaattagggtttaaatcataaacccaattatcttaaaacccttttttatctcctccggctgttcttcaaacttgccgggaaaagaaaaccttaattctctccggcgaacctcaaattcgcttaattttctctgaaaaacgacaagggcatctccagaatcccccaattgaaaaaccctaatcccaaaattccatgatctgtagatggattgcattcaattcaagcaaagtgtctcgttctctctctcctttctcttctctcttattcactaaatcctccttctccgtcgcgaaaatggacgatgagtcattacccacaaccaattccacttccgatcacagaggcttctataaagagattctctttgggatgaagaagattgggttccgcgagtttcttcacgggtatcactttcgaggtttggtttcggaattgaggcatgttcatgtcgaagaaatcatggatgaattgatgtctgaaagctcagatctttctgtttggtttttcaaagagctgagagatatctatgcgtttcgtcattcgagtttttccacattgttggtttcacatgtttaagctggtcaaagacgtttcaaagagcttcaagtgattctggaacaattgctcaaagaaaaaggcacgtcttctcttatcttttgtctgcaattttattgaaagcttacagttttagagtctgttaggtttggttaagatatttgttggggtggaatatgatttgttgtatcaattttcaatgtttaggctctggttcagcttctaggctttgtgaacttctctataatagcttcagaaagtgggagtctacgggattagtttgggatatgttgttgtttctttcatcaagattgagaatggttgatgattctctttatatcttgaaaaagatgaaggatcagaacttgaatgtgtcgacacagtcgtacaactccgttttgtatcattttagagagacggataagatgtggcatgtgtacaaggaaatcaaggataagaacgagcacaagtactcaacagttgtagatggtttgcgtaggcacgaaaagctagaggatgcagttttgaaccttcgaacttcagagtggaaggatattggtccctctgtagtttcgtt

SEQ ID NO: 28036 - DNA, 3134 bp, Arabidopsis thaliana landsberg
aaacccctttcaacaattcagagcacaggacccacagagaatgagccagacttcatcgacgctaagacgtcgtttgcggatttggaaaactctcgcatctccagtatgatgcaagtactatcatcaaatctacctgcctggtatacctttctatacacaaatcttgatttttaagaaaaaaatatgagataactaacatacttaccaaattgggatttaacccaaaatataaagggagataatatataagtttaactaaaaatgttatgtggagagacgcacttgggtcatatttaagagaaatcacttacaacctaaaatgtgacgtggtgaatcgttattagatgataattgtctcttttaatatatgtcataaaatgataataaattgaataatcaggcactaattcttggaggaagtgagacttcaccatcaacccttacatgggccatttctcttcttctaaacaataaggacatgttaaagaaagtacaagatgagatagacatccacgtcggcagagacaggaacgttgaggattcagacataaaaaatctggtatatcttcaagcgattatcaaagaaacattgagattgtatccagctgctcctctcttaggccatcgagaggcgatggaagattgcacggtcgcaggttacaacgttccgtgcggcacaagactcatagtgaacgtatggaaaatccaaagagatccgaaagtttatatggaaccaaacgagttcagaccagagaggtttatcacaggagaagcaaaagattttgatgttagaggacaaaactttgagctgatgccatttggttcgggaagaagatcatgcccaggcccttcattggccatgcaaatgcttcatttaggtcttgctcgtttccttcattcatttgaagtgaaaactgtattggataggcctgttgacatgagtgagagccctggcttaaccattactaaagctacgcctcttgaggttctgatcaatccacgtcttaagagagagctttttgtgtgattatctattacagaaacatttgacttcaatacggctattgaagtgcattttttatgtgtttgtgtgtgtgttttttttttttttttaaaaccttcgtttgttgtttcctctttaaaattaactagattcggacttcacatttatgctaagttatgtctgtagacgtattggtattcatatttcaaactcacaccagtctttggtttcaattcggtttagacgaaacaatgatcagacatgtttttgttatcacttgaccatcttagcatttgttttaatatagaatttgaaaaaaaaataaaaaaaattaaagttagagtttttagttttgtaactgtccaatggtagactctaaagtggggctcttagcgtttttttttatttttgaatcaaaatgaaatttgtgatacaaataatacaaattaggatcaaagttgtatataatggtaatcgtcatcacttcataaacccaccaaattggaatggagaagttaacaaatatcagaacaaagccagtcaaagcaaaatcatactaatgcaaaagcaatcaacggagaaaaagacatcaataacgcttgtgttgcaaacttctccattccaatcaaccagctttcaagttatggcgacaaactacaatcattgcgtaatcaagaacaaataagattatgaaaataataccaaatgttgaagcatcagactctgcttattcatcctctgcatcctcttcatcttcctcaatattatccccatttcattttcattatcctcaccacgaccagcaaccattaactctaaatttcctatgcaaagctcatataccagattcagaacaatatgagaaaagacaacctcaagcccaagaatcaaaatatacataatacaaacgactgaacatcaacaatctctctgacatataatccattaccaatcactcatacataacagacaatgagaaagatgtaaaacccggattaacattagcagccaaaacaaaagaagcactcaaatttctatacaaacgaatcagaacaagctcaaggcactcaaatttggattaatacaacacaaacttacaaccgttaactgaaaactcaattaccgaccaacagaggattctaacgtcactcacaaaatctctagcaacaaaacaacacacaacagaaaactcactaatcacgcgaattcaaagatacctagattgaatcagcagtaaagttagaatttctattgtacttaagatctttctcgtcaaaagagacggtggcttttgttcttgatatatctcttcccaatgttcctagaactggtcgacggagccagtgaacccgccttctcattatccaaaccttccttcctcgcgatatctcttcccaatgtgcctagaatcggaaacgaagcggttccgatcaaaaattagggtttgtgaggtttactcaaaataagtctaggaagaataagaagaatcaggaagcagaaggacggccggaggtcataaacatcaaacgctcctccgatttgcctccgtaacagaagaaaaccgcgtaacagagagagaggagaaacaaatcaattttttttgctttaatattttacccttcaaaatgccacgtcaccgcttcttagaagggtttgggcctctcacaaaagaagcaactcttaatattaagcccaattttacatttatattttacacaaataagggccacctaagagcccaccgatagactgctcttatcagtaaagacaactacataaaaatgagagaaagtagacatgtcccgaaatggacatgaaacccgtcgagtcctatactcgtcaaaaagatttcgtctcaaaaccatttgcgtttaaataatatacccgttttgaattgtatattttagtctaatacatcttaaagaaagattattcagttagtctatcgaaaatattaaatttaagcaaacaaaaagattagtgcgaatatgatctctcaactgaaagcaagagataaacggctactaaggtaagaactgagtgaacatttcttaggttttatttcacttgaagttttgatatatcataggttcccttttatagctaaacaatgctagggttaacacatgtc

SEQ ID NO: 28037 - DNA, 1565 bp, Arabidopsis thaliana landsberg
  unsure (1)..(1565): unsure at all n locations
ccaatttcttgctgaaaattggtatagaaattgtgggttttggatagttatgtcatagttattagattgtcttctccttctctagatttgtgggtcgaatcatggatcttagtgttccaaagacgaagtgttatggcttatcagtgttttgtaggatgctgagagaatctgaactaacccaaagacttatatcagttaaaacactcaaattttaagttctttggattgaactgtattgtttttttgttacttcaggggagagtgaagaaactcgatctttacgggaagttaaatggtcacgagggatgtgtgaatgccgtggagttcaattcgtctggcgatgttcttgtttcggggtccgatgatcgacaannnnnnnnnnnnnnnnnnnnnnntggaagcaggaagttgtcgtatccctctggccattgtgaaaatgtgtttcagactaagttcataccttttacggatgacaggacaatcataacatctggtgctgatggacaagtatgcttgtaatctcaagatctttaagactctccagcattgttgctttttgtaattagtttaatcattcggtttccgttctgtttttgcaggtaagacttggtcagatcctagaaaatggtaaagtggagacgaaaaggctagggaggcatcacggtcgcgtgtacaagcttgctgttttgcctggagatcctaacgtattctacagctgtggtgaagatggttttgttcaacatgttggtctctatatctctctcatgctcctccattgtgtttctcattgtggtctctgaacttgtctttattatttttgggcagtttgatatacgaagcaacaatgctactatggttttgtattcctctccgttcacacaaggatgcaggagacatcactctagcagtaggatcagattgaattctattgcgatagatccgaggaatccatattatcttgcggttgggggttctgatgaatatgcacgagtctacgatactagaagagtacaattagctccagtatgtcgccacgtcttaccagacgctcctgtgaacactttctgtcctcgtcatctccgggaaaccaacagtgttcacatcacgggattagcatattccaaagctggagaactactggtctcttacaacgacgagcttatttatctgtttgagaagaacatgggttatggttcgtcgcctgtttctgtctctcccgagaaactgcaagaaatggaagaaccgcaggtgtatacaggtcaccgcaatgcacaaacagtgaaaggagtgaacttcttcggtccaaatgacgaatatgtcacaagtggttcagactgcggtcatatctttatatggaagaagaaaggaggtaagcttgtccgagctatggtgggtgatagacgagtggtgaatcagttagagtctcacccacacataccgttacttgcatcttgcgggattgaaaagagcgttaagctttggacaccaatgtcaaatgatgttctttccctgcctgaaaagatcgaaaaggtaaatcaagtattctctcaaccaatgtttaatgt

SEQ ID NO: 28038 - DNA, 1507 bp, Arabidopsis thaliana landsberg
  unsure (1)..(1507): unsure at all n locations
ccgactgtttagaattctttccacctcccttaacctgcgcacttttcacggagtctgatttctccggcgacggaccgaagcaagtggtacaggcgacgatgtcaagcagccgtctaacgtgcgccactgctgttccttcattgtaatcctctggcaacaaaaagaaatcacaacggtctcacgaattaaagaaaaggcacaaaagtaaagtgacgtcgtttggcagataaatagaaacggcagcgtttaggttttctaannnnnnnnnnnnnnnnnnnnnnnnnnnnntcatatttgatgcgcgagagaagtttaccttccgttaacgtgagaacacagggtttaagggccgacacatccactgtgtcttttaaccgcgatcctcttatctgcaaccaatcttgagtcagaacgtgaatttgatttaactattttaccacagtcaatttttttatactctttatgggatgattttgaataaggcaattctggtaaaatatctgttatctaaaaacagaaaaggaaactcaattgtcagactagcaaaattcaatgacactatattcttttctttatttctcagatgaaaaagtcattttcctttacttttttagctcactttatttttaggatcctaagaaattccacaataaacatgaatatttctggaccatcaaacattaacaagtaaccaacaatcgtgaaccagagaaacaagtaactaacatggaacaatttagaaacttccactcactcagattatttttacctcatttttcttttgttaaaatctcaggttatttacctcatgggagagcgaataattggtgacgtggcaggtgtcgaagttaaccgataacagccgccgaacatctatgatcctgtccgttgatatgccctgtttcagacattttctctataaaatccacttttgataattttatttttggaataataaacatatgaaacctatacctaacatacggcaaaaaaaaatcattaatattattaatttcaaacaagaaaacatttgtaacaaatattcgagtaacaaaatacgaatatagataaacatgttttctgacgacaaaagatgatacacatgttttccatataaacatttcactgtctatgtaacgtctacgtaatattattgaccagaattatgagaaactaatgaattatttaacaatcgaaaatttgtgtgttacacacagttttgtatttttctacacgttcaaataatgataaaatttaagaagataattctaagtcaaggaaatgattttttattttttttcaaaaaattaatacaacaagtataagtgtaaacctatcattttgtaggtaacgtgtcttgccttatcctggaaaaacgacattataaaaataaatcgagtgcacattgggagtttatttatatatatcagaaatgaacttagaacactagttttggtttaactaaaataagttttggaatttttaaaaattaagataacttttatga

SEQ ID NO: 28039 - DNA, 1242 bp, Arabidopsis thaliana landsberg
ctttctttttaattcagataaagcctcaatctttgaggcagggctacccatctctttttcctcccttccctcacaatcaaaatcttaattctcagcttatgggtgtggggaaaatggaaggcggttccgctagtggatcggcttcggctttgtcaaacgatgaaaatctcgtcgtttcttgtgaggattcttcttctcctatagggaatgagcttgagcttggtcttacgttgagccttggtcgcaaagggtatcgagattgtagggtttacgctgatgattcttcttcttcttcatcatcttcttctctgagcagagctagcgtaattgctgggatcaagaggacagctgattccatggctgcaactagtgggtgagtgaaattctcttccctttcctcttttacattttgatcaattatggtttatttggggattcttaatatcatgattatcaatagaactataaataaagatttgatttttgctttttatggttatgggattgattagacagaatgttctttgatcacagttatctgaaaagattcgacctttgttacgtatagatgactttgaatgtatcttcctgatcattagatagtttgctttggtcattatatcttcaaattgaatcttactatcgttttctagagatgacagtttttttcttcttggattctaaagtatttattagctttggagagaaagtgattaatcctgtatagtgattctcttggtatctgattttacaaggccctgaagtgtttataaccctttttatgtgtttactcttatttgagcaatttgaaacctttgaaaatggcaggcaagttgtgggatggccaccaataaggacttacagaatgaacagtatggttaaccaagctaaggcttcagccactgaagatccgaacttggagataagtcaagccgtaaacaagaatagaagtgattcaacaaagatgagaaattccatgtttgttaaggtgactatggatggcattcctattggaaggaaaatcgatctgaatgctcataaatgctatgaatcattgtcaaacactctagaggaaatgtttctgaaacctaaattaggtgtgcttttcgaatctcatggccttttttttggttcctttgaagttggttcttggtatgggaaatgaagttatgattctttctttaatcaggttcacgcacactagaaaccgatggtcacatggaaacaccggtcaagatacta

SEQ ID NO: 28040 - DNA, 799 bp, Arabidopsis thaliana landsberg
taaaccgacaaaaaccagatatatgtgttaatagatctcgttgtttttatttggggagatttagctatagaacttacgtttcggggagaaataggtttaaaactttgttttcatggacatgtagaccggggttgaagtttgggctctatctggcatgatgcggtatttctcgtggggaaatagaccgtttttcttattttgtacttatattttaaacgttagaatataatagtttgactttaaaatattaagattaagaaaaatttatgtccatgagatttttaaaaagacacgaaaataaacttttaatttaatgaatcattttcttgttattatatttttttttatttcacttatagttgcaaccacaaggattataagaattgacagattttttatctaaatgcgcacatatgatttgacaacttggtaactttgatcgagttccccatggacaaatgcattctgcatatgaacaaacacgaagcactggacaccattccccctggtttatgcaatcgtcgtctttgaaacacatactctctgtcaacctaacaccttcaaaataagtatccaaacaaaataatttaaaaggtaaacaaattttagtatatattaacatatgtataatgaacaaatcatatatttgtatacgagcgaagaacttacaaaaggcagatacaaggaacaagcccaagaaaaatgttactttgttgatttcatctctctctctctccttgatttttggggctgtgagtatgaaattaatttgtatcacatgggattttaaaatgaaaaa

SEQ ID NO: 28041 - DNA, 1082 bp, Arabidopsis thaliana landsberg
tgcgaggaaagagcgaggctactgttgcagctaatatgctaccgagtacgtccctcgcaaattgcgtgtgcttcgcgagtctggtcgttcgtcgcaactagcgagaaacttgcgagacccgaaatttgctgtgaatttgctacggattgcttccctcgcaaattgcgtgtattttgcgaggcaacttgttcctcgcaacatttgcgaggaacttgctacgaatttgattttgcgacgcgcgttttgcgaggaactggagttcgtcgcaattccctcgttaagtgctctttgcgagggactagcgacggtttcttccctcgcaactggcgtgttttcttgtagtgtgttgaaattgcccaaaatccttacgagattcttatgaactatgaactggaataatgaagtgttaagctgccgaaggaagtaatgctccaaatctgcaataatgacgatttagcaatataagaaattgtatttcacagatatcaatcgaaaaagagaaatcataatatcggtggtgatgagttaatattttacctacacagaacccgattgtcaaaggaaaccaaggacaaagaagatgatgttggagaagaaaaaccgtgaccagtgaataaattgcctaatcgaactaatatccaccgtggatatgaaatcacaaacacggatagccaccgcgactatgaaatcgagaaaggtggactgctcagtgctgtttgtgtagccggaacctacggcggctacaaaagcttgtaccaaagaagaattctcacgccgttttgtgtgagaagaagcaacgaccaccggagaagagatatctcctagtcgagcagcgaccaccggagagaggagccaccaccggagaagagaagtcggcggatcgataagccaccatcggagatttgttagggttcaatttgaaacaaagaagaaacagagacatgcaaaaggggaaatagagagcgggaaaacccaaacgatttgagtttatcgtttgggttcttatatttttattctttatttaatcctgctttttattaatcatttattcctctttttaatcaagtatggttttagtacgg

SEQ ID NO: 28042 - DNA, 841 bp, Arabidopsis thaliana landsberg
gaatcctacaatcaatatcaagatgtgccaagttacaaaatcatctgtgttataccaatttctactaagttgtacacagaaacataccattgaaatttgcttagtttcttcattatcatctccaagcaacacttgttcttccgaaggattgtactcttcactctggctcgggttctctgtacgcgccgtcttacaaatctataaacaaaaccaacaaaaacgaagaaattcatactcggacctaagtaataaccttgtattttaaagacacataaacttgtaattatatatgttaactatcacaagtattattattgagaaacttaaaatcagatccgcaaaagctgtctcaaagctataagtttgtgtagtaacagagcaagtagcacaatgaaaaaacaaaaaaaacaacgactcacatcaagacggagtacattgcacaaatcaggcttaaacttgtcaaatcgaacgatttctttaatcttttcgccgttaaactcgagataatatttgacagccaaattccaatcaacccgcttcctcttcttaccggacaatacacatttgttcaggcttttctcatattcctctttcaccaagttaacaaaattattcattgacattctaggttcagggttggtaagtgcgagtgtcacacttgtgctgtttggtaaaagaaccttgagcctgtaaaacttatcttctgcttcatcatcatctagactcaatactctcccgaccgatctcttattactcatctgaaattcaaagcacatgattcagaagataagctaccaaacaaaaaactcataatacaaaggtacatagaaattaactaaca

SEQ ID NO: 28043 - DNA, 1933 bp, Arabidopsis thaliana landsberg
ttttgttttacttttcttacatttacctcatcgtgtagggttttacatttctgaatcccgcattgcttgatttcttttgtttatggccttctttcgctttccgtgttgctaaattagtttccgatttcagcgaaatagcgtttttgttccgttgatcatccatttcgaggtttatgccaagtcgtcaaccttacaccgttttcaaaaatcaacttattttgtggtgctgattgttgatttttgttgttgcttaggatgctttgttttcgaatgttagttcaaatggtggctttgtagtgggtttcatttggagaataacacaaatcttttgcttcgcaggctgattcggtttcttaaaagacgtattactgattcttctgaggagactgacgttgaaggagattttgtaatggattctgctattgaaattagttcaggtagtgatagtgatgacgaagtaccaccgcagcctgtttggccacaaactcgaaccaggatggatcccacatggctaagtatagtttttggcatatctttgtcaatttcggtctttctggtgaggttagttttggtagctttatggactgatcgactttgatgctgtgtttttttctttgcaggcaggagacctttgcctacagtggatagccatgctagagctgaacatacaaatcaggctcctcccaatggtgcctcgagtgatacttctcggcctggagtctctaagcctttcacagggaatgggaacactgtaaactcgagaatttccagtggatctggtgctgattatgtgagactgtcttctgagcaagctctgaaaagaactcttccaccctcttttaattcccctccccttcctgccagaagtggcactaacaatataagtaatgctagtggaagtcgtgttggtgtggattatgagagaccattgtctcagcaagctctgaaaagaactcttccaccctcttttaatccccctccccttccttccagaagtggcacaaacaatatacgtaatgctggtgggagtcgctttggtgccgattatagtcatccagctgtgtcagctgtaggcaacaagagtacctttggtgatcattatagtggagcccatgctgagataggaattcaacgtggcgtgaatggggttaggatcctgcctccatctctgacgcatggaacatctgcttctgttttgcatcatgctggttcgagtgatccaatgcacaggtttggtggtggtgaagataggaatcctgataacgatgaaaggctggtttatcaggctgcactacaggtattcatcctcagcacaaccctttgttatttgtggacttcaacacttaagctcttcttttgtgcttgcatatctagttatcgctgccccttgtaccagctttacattttgccggctcttttgaatctcttaatatgattgtcatagagtataatggagcaataattgactctaaatctggctcatttttttttgttaaatatctttctgaggtgcatggtgcatgaaacgttttataagcgtttgcatgtcttattgatgcttcggtcatactaccattgctggatcaactcaattttatactgactatcttaaaataataatgtagctgcattcgtttttctttatgtctgagaaataatgataattaataataatttggatcattgacaatagatgtagcatttattttccgattttactctggtacattataagggtgttgagagctcggttgtgatccataatctacctcatattaaatggcgtggtaagtgcatttttgattatcaagcaccataatactgcaggattttgaatcaccccatgactgtaaagtgatctaccttcctggtactctttcaatgtcctctatgaggcatcaggtatgtagcaagtttaatgtttccatttatt

SEQ ID NO: 28044 - DNA, 1327 bp, Arabidopsis thaliana landsberg
cgcgactccaccaaaaggactatttgacccttttcttcttcctcctccctcatttctaccacctcgatttcttctttatttattagccgccgaagggaattcctccggcgccattttttatagtttttttgtttttatctttagagatgggaaccgaaattatcaggcctcaaaattgtttggttgaccggatgagagattctccggcgactttttttaactcccggaggaatcattttcaccggaaaccgcctctcaaacctgatcaaaggagaagattcggttccgatgagttcagaacgacgacaaagaacattgttaggagaagaggagagtcttttgactcattctcaaacatcaaagttcgtaaatattcaccggaggtttctgccgatgatatttatgccggatcttcgatattcgctgtttccccagcgccgagctcgttacctttgccgtctttctcgaagaagaaagcgaaaagccaggatgttgtcgtttccattgatgactcggcctctcaagatctccggagacttctccggctaaagttttgagactatcaattaaacgaaaaagttatcgaaatcgtcagttatttaacggttaatatataaaatctaggaatccgtctccgttactgttttttaatcttatctttcctttaaatatcttgtttagaaagggatgggtatgaaaaagattgaataaaaagtatggggtcagatttagaaattaatgttaaatattaactgacttttttgaattctttgtgtaatgtggaaatttaaaactgaaatcctttgagatccaaatgtgaattaattaaaacgatatgggctgaaagaagtattcgtttgaggcccaataaatatatttaagtttaaagccttttaggtgtccacaaactgcgtagaagaatgggaggattttgatcaggtttatagctagattttgtgcacagaagcagtttgtgatgtggtttcgattggtgttccgcataatggcgtcacgacgttcttaatgcagatatataactatggatataatgctaaataaaacttaaaaatgcaagatttggcctaaaaacacaagtcaaaaatttatcatgcaaataactatggatgtagtagcttactcattatgaaacttttgacctctagaattatttcataccgtactttaactttactttatgtcattccatgattatgatatgtttccaatcaggtactattgtctattttaatgtctatgtttgaacaatttaggaatcttacaaaggttatataaacgatcactatagcaaaattttgtaattaataac

SEQ ID NO: 28045 - DNA, 1120 bp, Arabidopsis thaliana landsberg
tgacttactatgaagaattcgtgaggcacagaaaaaagatgtggtattaaagaaatcagtggagagtgaagttgaaggttatcacattaccaagaatgggacatttgtttttaaggccgagtatgcgtcccagatgataaagatctgaaggaagagatcttgacacaggcgcatcagtcacgttttgctattcatccagggtctaccaaaatgtacagagacttgaagaggtactatcattgggttaagatgaaacgagaggttgctgactgggtagcaaagtgaacaacttgtcagttggtaaaagcagaacacaagtctccaagtggacttttacaaggtctaccattgccagaatggaaatgggatatggtgactatggattttgttactggactcccgagaacagcaagtaagcaggatgcaatttgggtaattgtagatcgacttactaactcaacttattttctagcagtcaataaaaaggacacagctgaccgcttagctcaaaagtatatggatgagatagtgagacgccatggagtactggtaagcattgtttctgacagagattcgaagttcacattgttgttttggaaagcatttcagaaagcagctttgggaaccaaggtgcacttgagtacaacatatcaccctcagacagatggtcaatctgagcggacgattcagactttggaggacatgcttagagcttgtatgctggattggggaggacgttgggaaaaatatctacctttggtagaatttgcttataacaacagttatcattcaagcataggcatgccgccatttgaggctctttatggaagaccttgtcgcacaccactttgttggacaaaagtgggggagcgccaagacattaagcctgaaataattcaagagtcaactgagcaagtagagctgcttaaaaacaggctaagagaagctcatgcccgccaaaagagttatgcagataaaagaaggaaagggcttgagtttaaagttggtgacttggtgtatcttaaaatgagattgttcaaaggactgaaccgttgggctaagagaggaaaacttaagtcgagatacatgggtacttaccctatcatagagagagttggag

SEQ ID NO: 28046 - DNA, 1554 bp, Arabidopsis thaliana landsberg
gaaataagtttcattatatagattatatcacattaaaaatgattacttttttttttccgtgacaggttaaaaaggtacggaatacaaacctactctttccaatgcctaaaaatggtccgacataacttgcaaaggcatcgcaacacaataaaaacatgtcaacatcacacacaatgtaggtagatgttttaatctttattttaaacataaaataacaataagcaagagacacaaccgcgggaaaacaacaactcaataacgaaccacttcctattccacaaccacaaattattcttctcgtattgatttttctcaatccagaggaagtttattgagcttgcggtaactgtaatccttgaaagcaaacggtttaaactttggaggattatcatctccggttagttccggtaaaggtccaacaatcttttcacggggaggctccaagaaaaccggccacgacatcctcgtcttctctttatccaccgtcgtcctatgcaacacatttttatacctcccattactcaacctctgcaaaattcacaaaaccaatccattaaaaacattttataaattaatctacatttttataaaagaatcataataaagttcagaccagaatctgatcgccgatgtgaacaatgacggcggagggaatatactctgcatcgaaccagtgatcatctttgaaaacttgaagtccaggaacttcgttaggaacaagaagagtgattccactgagatctgtatgagccggtacacctaaagctaaatccggccgaggacacggcggataatagttaatcttcatcatatactccgccatctctccgccgagaccttctttcaacgcatcacgctttaaccctaatccatccgagagaatccctaataacgtctccgatagcttcttcacatgcactgcatactcttcattcacctccctaatacattaaaccaacggttaacttcggtttacaaaatttgaatttttgatgattctgttttggtttacctgtattcaggtggattcttaggccagaatctgtaattgacgcatgacggtggccagattcgatggaagagatgatcgacccaagcttttttaccttctggatctttctgaagctttgttccgtatccttcaatgtctttcgaatcttccggtttagcgacggattctttctccgacgaaggaagctcgaagaattttcttccgacgtcttgtaaacgtcgtatcagctccgtcggaatcccgtggttaaccacttggaatagcccccattcttcactcgctttcaccaccgcacgcctcacgctttcttcgtcgggatcgcttagatcgacgacgggaatcgccggcgttggacctcggaatgttgtgatcgctggttgttctttctctgatctgatgaactccaacgggattgcttctgttagtagagaagaagatgaaatgtcttggactctttcgactccattattttttttggtagttttcgttgccggaaacaatggcggatatgtaatttgggggatggtgtacgagtggtttta

SEQ ID NO: 28047 - DNA, 1820 bp, Arabidopsis thaliana landsberg
tgactggtgtcgatgaaaccgatcttcaccggacttggctcaaagttgtagccactcgcaattctcgtgaacgtaactctcggttggagaatatgtgttggagaatctggcatctcactcgcaagaagaagcaggtccttcatatttactaatttttggtcgatcaatttgctacagtgaaatgtattcgaattttgattttgtttatggaatctacagttggaatgggaggattctcagcgaatagcgaataggagattggaaagagaacagggaagaagagatgcgacagaggatttgtctgaagatttatcagaaggagagaaaggtgatggtcttggagaaattgttcaaccggagacacctcgaagacaattgcaacgcaatttatccaatctcgaaatctggtctgatgataagaaggagaatcgtctttacgttgtcctcatcaggtattttctctcttgcttccattgattcttctgtatgttaggtcaacataaagagtgagtgtatttttttcagtttgcatgggttggttcgtggagaaaacatggagcttggtagcgattccgatactggtggacaggtacattgtgttccaagtatttaataagcttgaatccggtatctagggttgttttaacttgttttatttgtgaatttttaggtgaaatatgttgtggagctagctcgagctttagcgagaatgcctggtgtgtaccgagttgatctgtttactcgccagatatgctcatcagaagttgattggagctatgcagagccaacggagatgctaaccactgctgaagattgtgatggcgatgaaaccggggaaagcagcggagcatatatcattaggataccgtttggtccacgggataagtacttaaacaaagagattctctggccgtttgtccaagagtttgttgatggagctttagctcacattctaaacatgtcaaaagttttgggagagcagattgggaaggggaagcctgtgtggccatatgtgattcatggacattacgcggatgcaggggatagtgccgctctgctttctggtgcgttgaacgttcctatggtcctgacgggtcattctctaggaagaaacaagcttgagcagcttttgaaacaagggaggcaatcaaaggaggatataaattccacatataagatcaagaggaggatcgaggccgaggagctatctctggatgctgcagagcttgttataacaagcacgaggcaggagattgatgaacagtggggactttatgatgggttcgatgtaaaactcgagaaagtcttgagagctcgtgctagacgcggtgttaattgccacggaaggttcatgccaagaatggcggtaagtacacagataactagccaggttggaaaagttataattatgaagtaagattgagtgagttagtgagtctgttgtccaggttattcctccggggatggatttcacaaacgttgaggttcaagaagatacacctgagggtgatggagatttagcttccttagtaggaggaaccgagggatcttctcctaaagcggttccaactatctggtctgaagtgagttttcctaggcagcttcattaacttctttcgaggtttgtattttagattgtgtttgatgtttcgttgcgtatatttggcaggttatgaggttttttacaaatcctcacaaacctatgatcttggcattatctagaccagacccacagaagaacataaccactcttctgaaagccattggcgaatgtcggcctctacgggagctagctaatctcgtacctgtgaaatagctgt

SEQ ID NO: 28048 - DNA, 1353 bp, Arabidopsis thaliana landsberg
tatcagtaagttccatcacaagtttctttatttaacgagtctttgtttctaatgtgagctctctgaatctgggtgcggcttcagaagaaattatgggggctgctgttgacaacaaccaagcgcgggtcgaaatagctcaacattataaccaggtaagctatgcttttttcctttggtggtaggctaatgtctagaactagtatatcacactaatatctctccggttattcagatgtgcaaacttcttgatgagaacgctcgtgaatcagtccaagcatatgtaaacaaccaaccaccgagtaccaaggtgaatgagagcttccgtgcactcaaatctatcaatggtaacattaacacaatcctttcgattacatctgatcaatccaagtcacatgaagacgataccaagccagacctaaacaatgttgagatgaaggacacggccgaagaaacaaaaccgttaagaggtggcgtcgtcgatctgaatgtggtgaaggaagaggagaaccattgctgaagctagtgaaaagtgttaatgtaaaaatggaaggaagccaaggaagaagagaagccaaagaacatggtcgttgattgactcaactggtaaatcaagattcaagacccaaggggtcatgaagtaggaactgttgtattatctttggttacatgtatgagacttattcttccttttgtaagacctattttctgcttatgcaaacattggtaacattttaggctaactttgatattcttcatgttttcctatttttggaaaatcatgaaattatagtttctcaatcaaagctgtttggttatgcacctcaagctttttaacagtgtgtgaataggttcgatgaagtccggttatgtttccggttagacgtcgtctgtttcaatctaactactattctcaatcaaactcaaaaactgaactaaataatgtaagatacaaacacaagaatgttataatacaaatttgggttgactttaacataatggtttcgagtgtacgaaggaatctttgttgctttaaaattcgtcatcatcactttttcttcatagactttttctatagggttgtttcttcataggcccgtgaattttggtttcatacacaaaagggacaactatacattaaaataaaaaagtaagaaagtttatttatgaatccttttttctttgttgttttctttaatggagtcctaaattgctagaaccagtgggaaaacaaatagtttacaattttaatacacaaaagattagcgagaaaaagagacaaacaagatgatgatatttgatttatgtctaaatgtttgttctctcatatgcatgttctgagtgaactaaaccctc

SEQ ID NO: 28049 - DNA, 1719 bp, Arabidopsis thaliana landsberg
  unsure (1)..(1719): unsure at all n locations
aaccaataatggtttgttagataaataacctatatgggacttgtatacaccactaataaccattttacctggtcgtgatttattgaagcattttctttatcatccgaagtttatggggcagcagtgacatttcttagtgccaaagaatcaatgttcatttcttcatcaacatttggagcataatttaccaatagccggacaacacatcccatcataaagtctagaaaaggtcggacacgaagttcatcaaagacttcaaggatatgttggatgacatgaagaaacccaaatttctgatttctggataacgttgaaatagtatcaacagtgaaatatttcagaaaattggagttttggaaatagtcgagagaacttttgcctgaactccaaaatgagtccattgtttcctctgatatgatgttcaaaggttttatcaacaatgcaaagaacaacgcaagttcattaacatccagctgagatataaagcaaagaactgccttccggtgacggatacttgtatgctgacaagaaaaacaaatagaacttgttaggacccaaatgaaaactgtattggcatagtgaagtaaactaaaagtaagtaatatgtaccttccttgaagccgaattttttaatgtcctaacttttggcataaggatgcgaattacaagagaaaaaatataagatctgtgaggttctccgatgttttcggacaagttccaggttgtgagttcttctctcaattcttttggtttgatcaaattcaacaaatgctggcggtgtgggagtaagaagtcattcgccaacagaaggcactctagaacattcgtttggatttcagcatcattatcatccaggaacctggaaaaaacatttttaaaaaaaaaaaaaaacatgcaaaggtcaatgaaattatttaactctgtatcaggaatggaagttcttactccaaaagattcaaaagaacagttaaatatcgaattgagtagtctcgccaacctattctgcagaatgtcgtttaaaaattgactaaaacgaaacgacctaggattcttcatcaattttagcaacgtcaaccattgtacaagaaccgtctttcagtcctcttctttacaaactcggccattatatgatccgacactacaagggagagaaaaaaaatgttgataacagttgaataatattacgcttagaacaggaaacatagagaccagattacctcccaggattttcgctgttgtatcccagaaattttaacaacaaagggagaatttcagaagcccgagactgagcaacacttgaagctttttgtaaggtctgtagcnnnnnnnnnnnnnnnnnnnnnnnnnnnnnnnnnnnnnnnnnagcagatggtggaaagagaaacaaattaaaacggccattcagatctgtagattgaaagaataacataatagccatcagactatacgtacaataagatagagatgaggttacagacatatatttcgtctagcatattaaaacaggagcaaaacaatgaaaattgatatttgaaatttccagaacgaaccaactagttcattatatgagtggatgaaataggtacttacttaaattacatgcatgcctctctgacatactttggttcgcattctcactatgatcatggagggtttcaaattttagttggcactgccccaaataacaaacaagatcactccacactgcaccagtatatt

SEQ ID NO: 28050 - DNA, 1823 bp, Arabidopsis thaliana landsberg
agatggtcaatcttttctataataatttgtccttgaacacaccaaactttagaaacgatgatatataccgtattgtcacgctcacaatgaaacaaacgcgatgaatcatcatcaccagctaaaagcctaaaacaccatcttagttttcactcagataaaaagattatttgtttccaacttttctattgaattgattagcagtgatgacgtaattagttgtgatggcagtgatgacgtaattagtgatagtttatagtaaaacaaatggaaatggtaataaatttacacaacaaaatatggtaaaaatctataaaataagaggttaagagatctcatgttatattaaatgattgaaagaaaaaaaactattggttgatttccatatgtaatagtaagttgtgatgaaagtgatgacgtaattagttgtatttatagtaaaacaaattaaaatggtaaggtaaatttccacaacaaaacttggtaaaaatctttaaaaaagaaaaaagaggtttagagatcgcatgcgtgtcatcaaaggttctttttcactttaggtctgagtagtgttagactttgattggtgcacgtaagtgtttcgtatcgcgatttaggagaagtacgttttacacgtggacacaatcaacggtccagatttcgtcgtccagatagaggagcgatacgtcacgccattcaacaatctcctcttcttcattccttcattttgattttgagtttttgatctgcccgttcgaaagtctcggtcatctgcccgtaaatataaagatgattatatttatttatatcttctggtgaaagaagctaatataaagcttccatggctaatcttgtttaagcttctcttcttcttctctctcctgtgtctcgttcactagttttttttcgggggagagtgatggagtgtgtttgttgaatagttttgacgatcacatggctgagatttgttacgagaacgagactatgatgattgaaacgacggcgacggtggtgaagaaggcaacgacgacaacgaggagacgagaacggagctcgtctcaagcagcgagaagaaggagaatggagatccggaggtttaagtttgtttccggcgaacaagaacctgtcttcgtcgacggtgacttacagaggcggaggagaagagaatccaccgtcgcagcctccacctccaccgtgttttacgaaacggcgaaggaagttgtcgtcctatgcgagtctcttagttcaacggttgtggcattgcctgatcctgaagcttatcctaaatacggcgtcgcttcagtctgtggaagaagacgtgaaatggaagacgccgtcgctgtgcatccgtttttttcccgtcatcagacggaatattcatccaccggatttcactattgcggcgtttacgatggccatggctgttcccatgtacgacgtcgttttattataaaaattatccttcaattgaccgttacgacgtcggtttttaattttaataatatgatgtttaggtagcgatgaaatgtagagaaagactacacgagctagtacgtgaagagtttgaagctgatgctgactgggaaaagtcaatggcgcgtagcttcacgcgcatggacatggaggttgttgcgttgaacgccgatggtgcggcaaaatgccggtgcgagcttcagaggccggactgcgacgcggtgggatctaccgcagttgtgtctgtcctcacgccggagaaaatcatcgtggcgaattgcgcccactcacgtgccgttctctgtcgtaacgacaaagcaattgctttatcctccgatcataaggttttgttcgtt

SEQ ID NO: 28051 - DNA, 1881 bp, Arabidopsis thaliana landsberg
aacggcgaaattgatttaagattttaattgtttcgtctttacaattaaaccttatctgtttgaaaaaatatatctcatcagatatttttatttcataattcctgtggctagaaatttgtttagaatagaaataaaaatatatacgagccattcggttcgtgtgtaagtgtgtagtacatgcatttgagacaccggtccaggggtaattgtgtcaatatctcttggtcatatataggttacaaagatgaacggaagaaagaaaaaaaggtgatcggagattttggcttattctcagatttgggagaaatggcggcagaagagggtcaagtgattggttgtcacacgaacgatgtatggactgtgcaacttgataaagccaaagaatccaacaagctggtctcgattctcacccctttgttatgcaattctctttgcttgtgttggatttgggaattaggtttttgtttgattagggttactgtttctagtgtcaaagaaagcattatggtttcacatgttatggtataggttttgattccggctaacgtagagttggaataaacggattgttaaggagatcacaacattagatgtgagggcaagtgaatcatcagtgaaacttacgttttgatgtgtaaacttttagagtattttctttaattgattcatctttgtgacttttgttgtgttcctcttttccttattgtagctcagagtcacccctctggtaaaaaaaatcattttggattgggttatttaggattctgatggtgtgataatttcattgttttcagattgtgattgatttcactgcttcatggtgtccaccatgccgcatgattgctccaattttcaacgatttggccaagaagttcatgtcaagtgccatcttcttcaaggtggatgttgatgaacttcaggtgaacaaatacactttctttacaaacaaattaatctcctcactcttagactttagaattacactgatatattctatatacttgtgatgatgtttaacagagtgttgctaaagagtttggtgtggaggcaatgccaacctttgtgttcattaaagccggcgaagttgtggataagctcgttggtgcgaataaagaagatcttcaggcgaaaatagtgaagcatactggtgttacaactgcgtaaatcagtttgaggcataaataataaggtctaatttgtttatcttaaactagctagacataacgggaatagtgcagattggagatgaagtagaagttattgatctctgactgtcataaaaccatgctttttttatatggtctttggcttttgcctaattcatatgtttaggtgttctttctatacctccatagaccaccactcagtcgaattttcagatcagtgaaatagactcttgtgaatgaattgttccatgcatatcataatttgaatatctgaaatctgaggccttgcaaaggtgtaaaataattttgtgcgagcagctgtttccacgtgttataatttgattggaagttgaaattcttatccaccaaacgtttcatattttgttgccaacgaacccattaccgaggttcttcgtgctttcttatcttctttcttcttcgctgagcttactctgtaatcttgtgaactctcgttgataattcaaagaggaaacggagataaaggagaaaactttagagcgtgttcaagttaataacagttctgtcgataatggaaaagctcttcgtaccatcatttcccaaaacttttttgaattatcagactccagctaaagtagagaattcgcctgaacctcatccaaaatccagaaagaaaaaccaataattcaccaagaagaaagaacccaatatcattcccgacgagcaagtcgtttcc

SEQ ID NO: 28052 - DNA, 1950 bp, Arabidopsis thaliana landsberg
tattctagataaacaactcaccaaatgtgcctttggattatacattctctttatctattttatacatttttcgaaattggaattattatggagacattagacatatatgaatattttgagttatacttattttatattttttataagtagagttacacttatttaacaggttagcattacgagttcaaaaagaagaatttagttttgctgaaataaaagcttgtgtttatgtctttaatagctcgcacaccacctaaatgggatttaaacttagccatacaacgatgataacacttacaaaagatcatttatatatacgagacggatcccgccagtagtatcgggaggaacgcgagaactgtttatgacattgcgacctacacttgtttaaacatcagataacatatgattaatagtctaaactcaacggtttattgaaacagttagtgaaatatgccgaatttaaacgtgaaaatacgtaacagaacgttgattaatagttatatatatggggcccacgcaaagcataacgttttctgcacgagctgtcacgcaaggtgacgacgtttttaatcaaagtgtttagggactataaacgtataaattaatctgttcgatgttaatagttctgatgccaagatgcggttcggttttttaaaccggatcgaaagtgataatttttaaaaacttaaaccctaactggctaactctttcactgacgacatacataacacatttcactgactaaacttattttgattagtgtaataaaagagtaaagaattccagtattggcgtattgcttacactgattctgtcatctccacagtatttatgtcaagcggatatgttgggttcctattatttcccttttatctagtttataaaactgttatgttattattgttatgatgtactatataacatcctcgtttgcggtctcaaaaaaaaaaaagacaacatcctcgattgtggtggaatctgttccgatatattattggttaatttttgattgaggcgaactaattatgtaataagtactcttcttttctaaactttgaatcatatatagtcaaatattgaaaataataaaaaagaagatacagaaaatttattcgcacatgattttaaaattgacgataaaatctagagatggggtcaaaatacagtgcattttagtgcccaaaacagcaaaacaattttgcgtggatctcatgtcggaagataacaataaagataaatatcattggctatgtaatatatagatagaactgtgatataaaaatctatcgcaatatttctattgtacaaatatgtttcctctaactctttcgtatacgtggatagataaggattttgatagtgttgccttatatcttctcttttcactctctttttaagtaccaaccgttgcgtttactttgttcttccttttggaactagaccctaggtcaaacgggcctgtgtaaatttttggattatacagtttttagccggtaaacgaaaaagaatgtattttactacctaagaagaacatatcagaaagcaaacattataaaagaaaatatcgtataagtatacttcatcatttaagattattgattagtaaaatatatatcagaaagcaaacattatatcagaaagcaaacattagaaagatttaatattttgagagaaaagataaattataaggtatgatcttatgagaattgaatctcgaacacgttgctttataacacactacaaaatgtatatttttattgataatatattaccgaatcttcattactaaaaccgcaaaaagaaatcttaagtaaagctataccttatgatttctcgaagtcaaagtttctgtaattagaaagaaaaatcaaatttgctttcatgccgaactgtagataaagatttctaaatcatgccgaccatactgtccattttttcaatattatt

SEQ ID NO: 28053 - DNA, 1774 bp, Arabidopsis thaliana landsberg
gaagaagaaacagaacaagacgattttgtctcttttgagcctgaagtttttggtcttatgaaacaaatgaacctatacacccgtgctctgcgtattctcagagaaaagcaaggctaagggcgtctggtaccaacaaccctaatcctcaggttgataccacagaacaagaagatgccggtaacatggagcttgaatttgagcaagggttaatagacacatactcagatctttttgcggagatgaacccaggtgactatttcaactttgaatgtgaatttgcaaaggggttggattcggatgataattgcaatctccaaaatttagatactgatttcatcgctgatggactagatttagaagaaggggaaatcgtcgaatgatggtcatagtcttgttctggcaaaaaggaattactctctgtgaaacatttttgaggattatgttcatgcctgaagctctcttgttcgagcacattagctatacttggtaatagccaaagcttttactggaatgcaataagccacagcactgatggtcataagttttcggtctgggctttgatcaacaggtatttcttttgtagtaaaccagattactaggctgttctgtggtttgtagcaaacttgattgtttacatacaagatagttaacttaagaatgtctccgaaacttttgttcagtcttatcctcctatagatcctcataaattaatcttgttgtctttcagatcttctttatagtcaatgtaatacagaccaaaccttgtagtttgcccaaaagttttctagcaacggaccagaaggatcaacaatagatataatctatgaacggatattatatgtaaagagtaaataagcaagagagcatacatgtaaacaacaatatcaaaaattgcaatctagatcatacagatttgaagagaaattatttcatggattacatttgagagtaaacaaataagtccactacggaatcattaaaattctcttaatatatacattgcaaccggttcaattcaactcaacccactctgcaggctcctaaggactttgaaatccctcaagcttaaaaagaagaactaaagagttgacctgagaacaatggcacggatctaaatgagtttatgtatgccaaccagacggcgctttaatctctccaagcctccttctctgcttgaaaatcatcaaacatctatttcattagcattaatgtattgagtatcattattcttttgatttcacatatttattgcattcacgactggaaccatgagttttatatcgatgaggtaaatatcacgaagttggggaatagaatagctcacctcttattggttagaggaatactgacatctctgtagaagggataaagggaagaatcctatcaccatagagttcgtgcagtttcaccaatagccgtccggaatcaagatcatctttccatatctgatcaaggattgctttcatggtaatagcccgactcctgccgctttctttcacctttccatttctgctttcagattcgttagcatcagaggcttgttctgatgaggatggctgaacagagttttgtggcggattgtcattttccactggattatctacttgcattggagctgagccagattgatcttgtgaatgtacaccatctggcccatccatggatatcaatcttttctgcggtgattggttttctgaagaatctacactcagcttccgcttgtggggatcagtactgattatctttccctttccctttcccttatggagaaaac

SEQ ID NO: 28054 - DNA, 1442 bp, Arabidopsis thaliana landsberg
  unsure (1)..(1442): unsure at all n locations
cgagtccgtagcttcatgtgtccccatttgttcaagttaaaaccagtgtggtatccagggactgaagcatttagttgtaccttaaaatttgttgcatattattagtacacaaataagtatataaatcaaccaaaagagtttagagaaatagaaagtaccgtagcatcagaataatcaaactttttgaagaaggctgcattgatcttgacattaccacggccaggtaagtttgcagtaaactcaggccacttaagaacattgaggtaatcaatgagatcaccttcgaatccacaacctttaggtggatctttgtcatcatctttccaaggaaaatcttgcatccacaaaccttggcttttgttattccaatcaacatggatcagattcgcggtgtgtactacaactctcacccctcgaggatagacaagaaatatagccttcgaatggtgtgtcccgaatgaaataggtaaccgaggcttatgaagaatccaattagctggcttcttcctctgttaaacaaaacaaatattggagatttttagtctaccataaacatcaatcaaaagaaatgagcaaaaactgtcataacaaacctgaatatactcttgcctaccatcaccttctccatgaataaccataacctggggaatgttggccagttttgggcaagctacaaaaggatatatgcaaattaccaacttcagctaacagactcgagaaaatcgaaaaacaacacccccatgaatgtaaacaaaagaactaatcatttggacaaactcaacacagaagattatgagaaaactcacctgacatcaaccagtctatatcaaccatataattcgataagatcgcagcaacaacgtctccctgtcatttacaaatacaatctttagcaatgatatctgaacaaaacaaatgaaataatatgcttagcatgagactaacctcaatgacatcattaatggaaacacaagaagtattagcccaatcaggcaatgcatcaacactcaaaagccgaaatgttgaaggtagtttctcattaggtggacaaaaacgacgaatggcctctacatcgtcttcagcctaaaacagttccatcacatcaaacaaagcctcaaagaaacaacaaaaaaagcaacattctttggttaagccaaataagttacctttcgagctttcttagcagctcttccattgagcaaaactagcttgaagaaatggtgaccagggatcaattcaataagatcatcattacatactgaaacctcttcactaggtttcactttctttctctctccgtcaccggaagacctaataacaaccggatttgttccgtcctacccaaaagacacaaacttgacatgattcaattcgataagaagccaaagttatcattnttaatgttgntatagttattaccactgacaacgaagctgagccag

SEQ ID NO: 28055 - DNA, 1488 bp, Arabidopsis thaliana landsberg
tgaccaatgaaaaggtgaggacccttatggagttagcccaactacgacaggaatatcagtcgctaagagagtatgataccatcctttcctcataacttcttttaatcagatttgtcctagttttattttgcatgaagttccgtttctggtgcttacattacatgcttacccacatggtatattctgaatacgtgtgctgctctctctatcattctgttacgtctacttgaaatacatagtaatatgtgcaattgattgcatagtcgctaacaatgtagacaacctgaaatgttgttgatattaaaagttaggcatggcacgttctgtaaatggtgtaagccgtcttttaaaaccaatttcgctctatcttctgttttgaagtcagggatttgctttgtaatgttgtttccttgtacctgcgatgctagtgacatttctcagggatgatactgtgttgtaaatatttttgattcttatgtagaggtaactgttacattcctctaaaaatactatatcatttgccagcaaaatgagtggtacaagagaggaagaatcaacgggaaacagtggcaggatagttatctccaatgagaaagatggaagactaaagaatatgtggaagaaatcttacataaaccgttggattgacccaagttcaagaggcggaagtcacttgaacactgaagcagattatgccagtaacatcgaatattccaggtttggcatcctacatctacattgtcttatcgtacttggaagcttctgcgataaatcactattgttttggcagaatgaaagtagaatatgcagctataaaagagaacctggaaagcatggggcacttgacgacttcaatccgcaggctccgtctagcgctcttgaaggataatttaagaacactagcgtgatatggatcactttttggttccttcctgttaggccaaatttcagttgtttctttttttttcaggtaaaggaattaaatgatactgaaacaactgcaagaagttgcgaagtagcgattgccaacatccttgtggaggcaacccatttgaagactgcccttgggatctccataccaattagctggtcggcggaatcagacattgaatcagttactgatggcgagtcgagctgtgaaaggaccgattctgtttctgctgcaggatttgagatggtggagcttgttattctagcagccgagataatgaaagaacaacaccattgaaattcattcttcagtttgttaccggcattttaagttggtctgtggctctgtgaatataatttattgagaatttgatttcaaaatctcttgtataacctctcatgggatgattcacaatatgtgatacataatatagtgcagttttcaagcatcaattacaagttgaacttcttgaagatgacctgactccttagttacctccacgctgaagcgggtggacaagttcttcatcgatggattagttacagtcactcggtaat

SEQ ID NO: 28056 - DNA, 2053 bp, Arabidopsis thaliana landsberg
  unsure (1)..(2053): unsure at all n locations
atggggaactcgttcagccagctgccagattttttcggtggtacttgcacttgtgcttatcagggaggttgtatgagatctgataaaggggcctggaaagactctgagatactaaaggtcgagtgcttgtgtcttcatactccacatcttattgttcgttatgtttctgttatactgatgttaaacctaactatacaggattcagctaatgatttctcagtgttcatgcagatgggccgcagtggtgggacnnnnnnnnnnnnnnnnnnnnnnnnnnnaagcagtgattcccaaatatcttcatcggataagccaacttattcggtaaggttttttggtatttggaacatacgttttctttttctttattttttgtttggtgaatcagacactaatagatatcctctcttggctcagttgaaagttagtgacacctcaacagcagagtcagggtctgaattggaagagatggcttcaccgaaaacaaatacgaacaatcatgtacccaagttaactcctgtttctgaatatgtaagtgttctcatgtagaaaagtgacataaacaacagagaagtttttagttcttatataggacctgatatatgctactatgtttattttagatcaaggccaatggtaacataagtcctactgttttatctgagtatgaagaatgtgtaccaatggtggacaaagttgtggatgttgcttggcagctccaagaaatgccaaatgcttccgaaggtaagacaagacctgcaaaaatcggacaattactcaattgaaatgcatctctaaaggttgcaggcctaaaatagcatgtaataatataatggaatgtgtttgcaggtccgcaatatacatcaagtttgggaaaaataggatcggttcgtcatatctggagtgaaataaatagagttcttcataagctttttcacactccttgcgtctctggctctgccacagactaaagaacactcacagttgcattcttcaagcgttagagctgagctgtgtgatgaacgaattgcaagggaatctcgtcctccttcgcctcctcgttcaactatcactgaaagagttatcatttcctctgttttaagcagactaggcgatcttgagaaacagatagaaaatcttcactcaaggaaatccgagatgcctcacgagaaagaggagttgctgaatgctgctgtatatcgtgtggatgcactagaagcagagctcatcaccacgaagaaggtttaaaaatctatgatatgattttaaaccctgaatgatattgataatgagtcattgtgaaccttgtaataaccgaatatcggtgttgatgagcaggcattacatgaggctttaataaggcaagaagaacttttgggttacatagaccggcaaaaggaagctaagtgccgggttagtctcctttcgtagctagttttgctgtccttataagtcggtaagtatgtactaatgttgggaagatgatgcagagaaagaagttctgctggtgaagaactcaagcttgggaggtaattagcaaatattgcttgttcagggatctgattaaaaaccatgaacattgacacaagtaggtctgaaagcaaatatctctgttgaaacctaatgtatataaatataagaaaaaaacttgcaatgagatttcaatttcatctctttttagttgaatttgtatgatactattggatagtgtgattaattggtgtttgggacattggattctgtattggaggttcaaaagtaaaaaaagaaaaaagaatgatcaaaaatatcaaatctgagtggtgacatgaattgtataatgtatagtttgatgtcagaaatagatatataaaagatggtcttgcatgttagaggaaaggggactcatcgaccatccacatgtttatacgaccaaacaaaggactcgtcacaagttccaagtacagtttgttaaacattttacctgtccaatgatacaatcttctctaaaaatgaggattcatgtactacaatgccacaaaatatcgttttcttttttactatatgagttgca

SEQ ID NO: 28057 - DNA, 4001 bp, Arabidopsis thaliana landsberg
tcatccatgaagaaccacacatttcaccatagggtattgcattggtaatatattttttcttgatatttagaagatttcaactctatttagaatagatggtaattaagtattggcaatattgtgacaattaagataggattattttcttgttttattaattattaatagaaaagtaatttttttttgtgtccactggattggagattagaatttaagaatttaagtttaggatttagtttggtttcccataattgttaaaaataaagataaaatccaaatgtatatatatatatattggataaacatataatgaccaaattttcttttcatatttaatatgaagtatagataatcatatacactattttgattagaaagagccatattttaaaaaaaaaatcacttttgaattttaatttacctttttatagtttaatttaagaagagtactttaataaaatttaattttggaatggctaattaattaatttatattggattttgatgtggagatgcgtatgtcatactctaaaggatcaaaaatgaaaagaaagacacatagaaacagaacatttggccacttttgggagaatggcgtaggttgtcccattggtaccgttcctatacctcgagtcactaaagacgctcttttgagaatgaaatccttcgatagcgataattctaatccgcaaagttcgtggagcaaaatctataaacctgcatcttctattgacgatcatcatgtaagtgctttctttaaattgttatcttacgagtaagaaatgttaaacatatattactgaacttcgcaataacaagattggtggaatagctgaaattatagatgactatgttagcacataattattaatttaaacaatgattaaaatattctttttaatttgatgaatacaaaaatatttaagtagtttttttttatgttaataatacatagctttattacaaacacgtgaaatttttgattaatatttcatggcgagtatatatatggtggatgatatattaggaaacataagtaattgtatattgtattcataatttaatattatctattaactcatacagttatatttcgatacatgaaaaatattggtttctattaactcaaattactcataccaatttataagatattgattctaatttttcagcattacaatttagccatatcagaatgttagttttctcaaccattgcattcactattcagtttgctgtggtgcgaactactaaaggaactaggagttacaatggtgcatctatgaatattaatacattcactccttcagttggacctatgcaattcagcgcttctcggatgcattttcaaattggaaatgaattcatccaagttggttggatcgtaagtcaatattaatttagatccactatttttttatacttgatgtattatagtaaatcttttttctattattaatgtatatgaatcatattttctattcattttaggtacacccacaattataccatgacttcaactctcggatattcgtatttacaaaagtaagtgggctagttcttgtttttatataatttaattataccatatatatacacgatgtatgcataattgataaaccaatgacttatggtcgcatattatatggttgaattcagtcgggaggaaatgcgtgttataatctcttctgtcctgacggatccggaatgatactagttcgtcaagacttaactcctggtctacttgccgagcaaaaaagtattgacttcgccataatgaaggtcagttcttttccaactagtatacccataactttgtatatttcgggtattcaagaacgtttgagtatatgatatgtctagtaatatcaatatgtagatgcatgcaaatatgaatatggatatgggtaaagaaaatttagtgttaggatatttgtatcccatccaacatatataactaactttcatttattcatattagatttttaaaagaatacataaattaaatccagtgaagattttgtcaattatagtttaacaaaaaaaataagaacttaagaaaaaaaagcttcgttctctcccagacacggtaatcaagatatcttctgtaatcatgcttaccggcgccggtgagactcatgttcgccggcgtcgggacctgcaaaatcttcttagtctgtttcagtctttcttaagcttctggtcttggtttttctctccgttaagttcttctctctcgcaaaatccaaaactttcctttcctttggtcttcttctctgagggtcttctttgcgacggaagagtgaatgtttactctacaagccctgccccgaatcataactcagacgcagatccgcctttgaacccgacaagagaagaatcgcacttctccatcatcgccctttccaaatttctagagcagtttttcatcgacacatcctttggctccagatctgccgtattagcagtaacgcctttagttccttctcaccggatttcgttgatggcaagagattctcttggaccatcagttgtgccttttccggtgagaacgtcgacgacacacgacgagcttcattgctggcaggtgtttttcccaggtgcttcaccgtcgaccatcacttccgatctttacgacggcggcgctctcccttcccttctctcaaccgtaacaactctagggtttggtgggatgggcctcaattttcttgacggcccagttgcaacaatccatgcttttggtggtttgggcctctctcaattcggcggcccaaaaactctaaacctaatttggcccatatccaggtttgctttactcagagttttgtcgactctctctctgaaccattgcttcacgataacggatggtcgtggactccattcaatcgttggaaccttagtcttagaggatccttgcaatcacaatactagaaacctgttacatagagtagattggttgccaacagatgtaagtttagtcttgaagcttagtggattagttttgatctcgaaccataggctatgtgatgcggctcacgcctttgtttttatatgtgatcatataatgagtctgaaccttcccactatcatgcttactcatcccgtcccatgtcgtttgttggacgatgcatcacaaccctcttggaattgttggctaaaactgcttcggcctgctctatcaaccctcttctcaagccccatgaatccggtttatctctgtcatttgattagaagattatctgtgctttggacttgtaatctttgttgccgattgcattatgtttactcctctaaggagataccttccctgaaaccttactcctctaaggagatatcctctttgaaacttgaacccggagaaaagtctcacaccgcagcctcctctttggagcatttcaacaaaagcttttatgcgtcgatcgcacgagcttactatgatcacaagttgatccgagatttctcgaagctagtcttcaagcttgaatctctgcaggtcccaatagatctaccatcccttgcaaccttctcgaagttatgcattttggaagactcatggaatctttatctctatctttcatgtaatgctttaattttactttgtataaacccacctctcttgaggagttagattaatgaaagcttcctttgcccaaaaaaaaaaaatagtttaacaaaaatgagatcatgtatgggttctcgtggttctcctagtttttatttttgttgatatttaaagtttgagtacaggacaaaatcaacgggaattggtggttgttgatgggtacatcttgggaagaagttgggttttggccatcaagcagattcaaagaaagttctggtacaatggtcgaatggggtggtgaagtctatagcccttcgcctccaaatcctccaatggggaatagtcattatccgaaagggagccccaaagtaaacccatatggccagcaaaccacgacagaggaccaaaaacataacacagacccaacaagaaaaaacac

SEQ ID NO: 28058 - DNA, 1217 bp, Arabidopsis thaliana landsberg
gatgcttgagagatgttccagtggtgagttttccttatttacgattgtccaaaggtcagagtttttgatttaggatcactcatgttctccataaaggaaggcttatgtataaggggctaatttgtaactaatgttgctgttggtcaatatatcattcgaaatctttttacatgctaacatcacacccatgccttcttccatgtacatgctaacttctagtgtatcaacattacagaggtttcagggtcagaagaagagacagacatagatgaattacacgagtctctgaaacaaagcacagactttacaagtgtcttaccggtctgcaattcatcggtaaataacgttttcagatacataatttcctcacaagttctacattttgttaatgaaaatatcttcaatgctcttaacattttcagctagtgactagactgacagggaatgttacagggagattggttatagtaacagctgagaaaataccttcatcggaactcatagacacaaccggtgctggagatgcgtttaccggagctttgctttatggtattacgcttcactaaatcgtagtaaaccaaatgtatctgaacagaatctgaccgactccaattgtttacaggtttgtgcacaggcatggctttagaggaaatgttgacatttgcatctcgagtcgtaagtttgcttcttcttcttttgtttattccagcgctattttcaaaacgctaggcgttacgcgtttgatcagaatagtgattgaaggaattgcgtttgaaatttgtgtaggctgcttgctgctgcagaggtttaggagctcgaacaagtcttccatatcgtactgatccaaaccttgcaacgttcttagggacatgaccgtaattttctttgttttcttgacgtataaaatctcaaagtcttcttgacgtataaaatctcaaagtcttcttgacgtataaatacgtctgtatttatttcgtatgaaagtgaaataaaataatgttcctagatgcagccaagtcagattctcgtttcagcgtttgtgtgtgtgacaccgtcttactttacgtgtaccatgtgaacaaagttctaatgaaaaagtatcacaatatgataaattaatagatgtctttttgttgaattcggtgtattagttatattaatatcttaataatacaccatgaagaattagacaatgaattaaagagatagataaggtg

SEQ ID NO: 28059 - DNA, 776 bp, Arabidopsis thaliana landsberg
atcattgcttaaacaagaaagaaaaaaactcatcgcttattataatctttatttaaacaacacaagaggatatatgtttctcaggtagtaattgttcttataaacattctggaaacaaaatcttcaaatcaacactagtacagaagcaaatgacacaatccctaaattctcaaacaaaaaataacaattcctgatgagaatgacctatatttcgatagatcgaacgagaaaaatcagcgatttgctaagagataaacttcgatcatcaaccaaacagattttaggataatgaaggcaggaaaagatgggagaatggtacctcgttcttgttatgctcatcgacagcgaaacgagcgagactctcgacttgaagatcattagcatttgcatcaatatcgcgaactcctccgacgattgttcctgcttgttgatccgccattttcgtctctttacttttctgatttttatctcaaatgtttttgattcgtatctaaagtctaaaacccaaagtgttattgttatatatagagattaaagcgcgtttttttctttcccttcaagaataattcttccggaataataaaaggttatgactcattgtagcactaactagagaatcttttttacttcttcttttcaataaacttgatttatatgtcggccaaccatttaaaatgtggaaacaaaaacagaggaaatacacacaaactttttacaaacctcactcacataaatcacactaacaacgaagcaagagcaaacaaattcttataaat

SEQ ID NO: 28060 - DNA, 1617 bp, Arabidopsis thaliana landsberg
ctaacgagagaactctaactagaagtaacttcagatgcaaacgacaccgtttggagaacttttgtcctctcttttaggtttatttatcttacgtcgctacttaggccacgaggcaactgtttagttctatattcagacatctgatctcaaaggtgtcaaatttggtaataaatgaacgtgagttggatcaaagtactgtaccttccaaagtctcattatttttgttttaacatttaaacccatttccaaattttcataatttatagttaacaatcaaaatctacaaaaactgtgtgaagttgttgttggagaatggttttttaactgtaccaatccaagaacaagacggagaaagtaaggacgaagaaaaacagtaagagaaaggttctgctgctgctgtttcgttggattgcttgagaaagctctttgtttccaagctccacgttctttgttgcctcaactgcctgcatttagtgtcaaactgagtgagaaaaagggcttcaagacacacacacacacacataaagagagccaccaagtcagtcataagctgtacgtttacagagtaggaaaactgcaaagccccataaactaaagtattgggaatggcattgagtcattgacacattcaaatggagttttagagactttacatagctaaaaacattaaccgttccatttcctaccactaaattgaagagcaattaaaattggaccaatacaaagtttctttcccgtctctatacctaatttaggtgaatgtgacaaggaaaagttctgaatacaataagcatccgaatttaactttgagatagcaaaggagtgtaaagaacagtgaaagcctaacaaaacagtgtgttgacatgagagcgttagagaagttaataagtcctaacctggtcataaagaaactctatctgttgggcttgctgcagaacatgagttgccatcaagtggtttaatgcagacatctccaccatcttagtttctgtctgcctagcaccatctaaaagattacttagctctacctgcaaaaattatcaatttcaaaatttagcataactacaaaacttatgcaagttttcgaagatcatgtatatttgccttgttacctgaagggcttgtgtttcatcgtctagaagttgttgttgttgtaatctacgaggttgggcctggatttcatccggttctatggactccgaatttcccagagttgtattaattggggtagcttcctttatgaccctcttaggttttcttctcggcatagctctgtttataatatcttggaaacgagtaactctaagctgatcaaactgggcagtgactgaatgaagtttctcactcagaatcaaaacctgcatacaaaaaaaattaccattacttctacacatctagatactttgaaagaaaacatagtaaaaaaaaaccaaagttggcttactacattggtgcatatcataccactccatgtttgtgtgctatagaatcagcattgaagttatctgcggggaggccaagccatcctttggaggtttgcttcttcatttctaatactgtttatgagaatatcgatctgttctttgcaagctttaataaaagcagcaaccactgcaa

SEQ ID NO: 28061 - DNA, 883 bp, Arabidopsis thaliana landsberg
atggtgcctggaattttccaacaggctctattactacagatatggatcacatattttggcgaataccctcggatataaattcatcttcttcttttccatggataagttggtatatttaaaaagcgcaaaatgaaaagattcatgagaaaattgataaatctcaatatgagctcctacgtttagtggacacggaagcaaaagcatgacaaacagcgcaagctgagctatgttcagaaaaccatggatttttaaacatggaaaatattacccgagataaagttgttgtttcaacttgtttgaatggagttaaatgctaccttgatggttcttggaaaaatagtgataagtgttcagggttagggtggtattgtcagtcatctaatggacagccatccataatgggagccgtttacacccggcgaggcctatccccacttcataccgaaaaacaatcctctctatgggctgatgagatgatcgcaggagctgaccaccaagactactcgttctttcagaatgttcagatttagtgaagatggtgtgttccccaaacgaatggccagcgttctcagtatatctaaacgagattcaaatcgacaaggaagaattatctaatttatctttatctttactttcttgtagtgcgaatgtaaaagcatattctttgacacgaaaaatttgttccgaaccgcatcatatcccttatgtaaacaatgtttctcagggatggctcatttgaacataattaattaagcagatggcaaaaaaaaaaaaaaaatcacatccaaaaaatatattttaaaatcctctataaatcttttaaaaaaactattaaatacccttgtaaacccttaaataatttttgaaccattttagaatgtct

SEQ ID NO: 28062 - DNA, 1555 bp, Arabidopsis thaliana landsberg
atgtaaaaatgtggtctgttataaccatcatctgtctaacggtcttttgcaaagattatctttatttgctttgaggggcttaatggtttggacgacttaataagaggtgtttgttcttctgaggatctggctttgattgttcaatggtctatttgtctgaatagggatgagctgagtcggtttgttgctaataaacgaagactaacaagccttaagatggaaggatgttccaatttgggaggattttccctctcttcatcaagcctctccactctttggctctcggatcttcattctctctcaaagatggtaattgaagttccctttttctcccatttttatagctcaggaagagaatttgcaaatctaaactgcaatatattttgttttgtcagatcttcaactgtccaaatcttacggaaatatcacttgaattttctcgccaagaagatgattcaactgatcttgtaacaatggttgatggtttgggaaggacttgcactagattgcagaacatccatatagcctctttgaagctttcacatactgttgtactttctcttactgctgtgaatttcaggtttgtcaaatacctctatttatagcttggttttgtttgtttcttatgcacatttagtccactattttcatttgagagcagttgttcttagtgattgatgtcagtttcctttttatccaggaatttgagaatgctctcgctagttcttggaataaatatcactgatgcatctgtagctgccatttcctcaagttacaaaaaccttgaactgcttgatctgagtgggtatgttttgttctcgttcagtatatcctgtctatatttctagaggtttcagaatagtacacatgaagagcgtttttctgagacatgattttttgttggttttagttccagcattactgatactggcctcgggatgatctgcgatgtcttacctgatacactctcaaaattacttgttgctctttgtcccaacattacatcaagtaaattcttgatctttggtttgcatatgtattatattttatgagattatcccctggtttctcatttctattataatgaatattctcgtaggtggcattcaatttgctactgctcaattgccccttcttgagctgatggattgtggcatgactgtctctgatcccaactcagataatccgacctttgtagagaatccaagtccacataaaacaccaggctacaatcaaaagatgtttatcaaacataaacggctgaagaaacttagtttgtggggatgctccagtttggacgtgagattcctctcatcaatgctctctaaacaagttcaaaccttaataccatcttctcatagtttcgatcttttgatgcaggctttgttcctaaactgcccagagctcatggacttgaacttgaacttatgcagtaatttgcatccggagagtctggtgctacaatgtccaaagttacaacttgtgtacgcatcaggatgtcaagaactattgaccggagctatccgaaaacaggtaatcccttgagcagctgtat

SEQ ID NO: 28063 - DNA, 1445 bp, Arabidopsis thaliana landsberg
  unsure (1)..(1445): unsure at all n locations
ttcatggattatgcagctgccaaatagacaagcaagaggcactggacatggttgcccgtctttgcaatcgtcgtttgtgtaacacctactctctatcaacattataccttaaaaaaaaggtatccaaacaaaataattaaaaaggaaaacaatttcagtatattgacatatgtataatgaacaaatcatatatttgtatacgagcgaagaacttacaaaaagcatatacaagcaacaagcccaagaagaaggttgctttgtttgatttcatctctctttctctctctctctcttttttgtatttagtgtgtgagtatatgaagataatttgtatgattacatgggttttaatgaaaaatccaaatgacttatatagtaggatatattctctttcttctctaagaatactaatgagatcactaggcatacacatgttcttcttataaaattgtttggatttcatatcctctattattcattatcatagattgcatttttagtgtattgccaattaaaaaaacatatgaaggtactttgtattacatgggttttaaatgaaaaatccatatgacttatatactaggatatagtctcattcttttctaagaatactaattagatcactaggcatacaaaaggtttttgttattaaactgttttgatttcatatcctcttttatcacagattgcatttttagtgtgttgccaataaaaaaatgtcttatataagtaatttgagtaatataagtaattaccaattaatatacatgcattcaagaattagattttaacttttaagggttgattggctgggatatacgtaaatattttctacataccaaaaaactttcaaaagaccaaattataattttacaaccaaatatttatagcaataagatctacgggtacatgtacatccaacacatctacatccaaaattaaccgaaccaatcacccacttacttatatttgattggtttatgattgtgatataatcatagaaagtttacatgaaattatatatgaactaagtacatattaatagattttgtattatttaaattttctcttttgaatttttttactataaattatatatatgtatactaaattagttaggctatctccaggtacggtttcccaaatttttaannnnnnnnnnnnnnnnnnnnnnnnnnnnatgtggtcaaagaggtaaagctgaacagttctgcgtctagagagaattgttcattgacctacaccaccagactagaaccactaactcaccgcatcgtggttaaaattttggcatctacgttggttcttggatagtagttcacaaaatgatattgtttcatgacatgcagaagttatcatgtcttcaaacatattctccaaaccaaagtagtcatatgttcacaactagaatactactactaatcaataggggatcccgttactag

SEQ ID NO: 28064 - DNA, 3244 bp, Arabidopsis thaliana landsberg
  unsure (1)..(3244): unsure at all n locations
attcattgtttgcctatataatctttgtgttgacgtgaaagacaaccatatcttggggtgagacttggataaatgtcaagacattaaccttaagataatctacaatgttcatataaaagttccaattttgacgataaagagaaaaaaaaaatagtttccattgtaaccaaacggtccaaacccatcaaattgatctcttggtttcagtttacaaaacaaaagtccaacccaaacgaaaaaatgttgacaataatctcatttgtcacgaagtttaacataacttgcatgatgatgatcaggtccactgaatcttttgcagcaaatcagttcagtatcaaaatcgacctttctttatccgtgcccacgccatggcagcaaccacaactcctcccaactgacccgaactcgatgcgatatggttcggtcccccctgcattcccaaaaaagttatggttaagagatagtcatatatagtgtttcaaagcaaatgcggattaggttttcagattatacacacctctggaatatttaaaatctcgactcctaagtttatgattcgctgaagattaaagagtgcgagttttttagttggttcacatgactttcactcaataagaagagtatgtagagagttcttacaaacattacatgcactcggagcatcaacgcaaagtatgttgtaacttttgggtagatgaacatatcgagaagcgcgatggcaaacatagatccatcagcaccctgtacacaaataggaaagagtttacctcatcggcatttggtatccaaaaacaagtacatgtgcattttcgtctcactctctatatctatcaaccaagtctgttcatgctcagacaaatcatttagttaggtgagtacgaacataccagcagctgcgaaatgggggctgttgattgatgatccttaatgacaactccttcaccctgtatgattgaccagccaatatcaaaggtaaagcatttcgtttaatctccagaggtaaaatcatttagtctaaacctcaaaacttcgttttgcacatataacatgtactgcaaatgaaatgcaacatgatcaatgaaagaaactatcaatctgtggaccttgttgggtaagcttcaagtcttgaagcccaagacaacttaaacaagtcggtttaagttatgtcaaaaagagtaattatctagttcaagaagaaaaggaaaaaaggagtttcctaattcatgtaggactaggaataggaaattgcagtgtgtgctaaccctatatatatgtttgttgagttgtggcaaacataagagaaaacattaaaagagctttgctgtttagtttttgagagagttttctaatcatcaataaaagagagttattcttttaaaagcttttttatagcatgatttaaggaaacttgctatataccttgagtgtagccaagagggcgtgataactcaggaagcaaagagagccaccaagtgctccagcaaagtacagcttcaaaaggtagagcggtcccaaggttcttgcaatctaatagcaacaatggattttagagatgaagataaatagttaattcaatggatagatcagcaggtagcaaatttcccaaaaagaaccgacttaatagtatctagctaaggacttttctttcttaagtatattagctattagtgaatgtgtctccaataaagtgaaagtagccacttcataggaaacaaatgaaagcatttctcatctcatttacaaaaatcgaatattgagaagcatttttctatggagaaacgacaaggaaagataattcttactctggagccgaagtaggagattccaatcatgttcaagatgatttgactggtaccaatatgactaaaacccgaagttattagcgtgtgtatatatccactcgtaaaactgtacgttgatagctgctcaaaaatcaaggttcaaacatatcaaagatcaaccaaatccaagacaagagcttagcagtaatatgttagaccacaaaatttttcaccatccagctcctgtctgaaactcgccacattgtaaatacagcagcattagctattaccagtccaaaaactacaccattagctccattgatccaagacttcctgccagaggaaaacacaaaccaaaatcaactagagctggtgaagaattttaagattctgatgttatttctatatctggagaacaaagttttaatgagaagggtgtgtacagtgtcgagctgctagtctatctataaagagaaaatcatcaaatgaacgttgagctactcaaatcaacaactacacagaaatggcaaaatagcaagtaaagcctactaatttctcatcttcttctctgaaattctcatacatgtcgtatgtcttggacgagccaaacgtgtacttaaccagaaaagctttaaaaggtcgataatttaccacagaaactctgtttaaaccctaaatcaaaaccagaaatttcatcctgaagacaagtttatctcagaaaaatgtagacttttacttagctaacgagaaacagaggatcatagagaaaaggaactcagaaatttcagaacttttcttaggaaagcttcgaactttactttgaaacccagcaaaatcacaaaaagagagacgaaaagaaacgattccataccatccccgcttttgaaacccagtaaaaccaccagactcgaatccatgactaggaagctcagaactgaagaacccagctctagattccataacatttccaaatttcagctttaggttggtgtttcccaacttgctagcgaagaacccatgaactttcgccgatcgcgatacagcagaaggaacaaagtggggtactgaagaaggagatgagaggcgagaaggaagaagatggcgactctggtttggcttcttcttcaccattttggttagctgcgattgcgaagaagcaccaacnnnnnnnnnnnnnnnnnnnnnnnngctcgagaaaatcgcatgcattttttctcctttttcttcggaataaattttcaattttttataccaaatgcatgaacttctgattgttttattgtcatgagacaccatgaggtatgtgtgttaaaaacgtcaccttttttttagtgcaatcaaaagtgacgtcacactaaacactagtaaaataaaataaaatcacatgctcattcccgtttaggaaagttgaaaatttaaaccataacttttccatctccaaaatcacaatttacatacatcac

SEQ ID NO: 28065 - DNA, 7863 bp, Arabidopsis thaliana landsberg
ctagagctctgaaagatgtggaggcttacttttcgaagaagtaagcgaaggcacctatgaggagaagggcaaggagattcctataaacagggtacacaactttgctgacaccaatgttaagagcaactcttaagacaatgtggaagcttgcgaaacaaaactgaagtgtgatcaatgccaccacaagcttcaccttctctgatactactcctttccccattttctctttttcttcttgagctcttcttttcgctacttcttctttttttttttgaagtttgatagcacatcaggattgcttttatactaaagtgtgtggtggtgacttgtgatttaatatacaaaacaataattatcaattacacaataaagaaaatggatgattaaggaagaaataaatgttacataatttcttcaagtgggccactatagttgtttataattaatgattatgaataataatgctgataaaagatggttatttgactgtaataatacgattcggaggttgaatgtttacgtgacttagataatgtgggggatatgtttgtatttttatttttattcaaatgatttagggatatatatgtattgttagaagtttcactcatgttcaatgagaggacaccactttgggtcctttatgtcatctaaaattcatacacctacatttacaaatttgtatttgggttgtgcaacggcgacaatagtaatacaaaccactattttatcaatgttcacgttgaatgttgacatatacatatatgtttaacttgattttaagtttgtgtttctagtgaattcttcatttggggattcatttgatttctattatgtttatagattcgtttcttatgtaataatgagtttatggaatcgaatagcatgtggtctagctcataattaggcatcttgtcttgaatgtggaaaaccattaataatttgattgataagtttactaatatctcttcgaaggagcactaaccaccgtttattcagttaacttgtaattgtttcatgtcattagattccaaaaaacggctacaatcaaatgtaccaattaggttggattttaaaactatgacatcttccaaaaagttatgttaaacatataacttgacctaatgtattaagaaactattctgttttaaataatgtttagcaatcatttaagtaatttgtactatgtactctcttttctttttcttctagtggccctaaagagggacacatgcaagattctccattttttcagcccatgatatgaaaattctcagtttgaattatatataatcaaaatattccagcttcagaatccaaaagaaaattaaggatcaaaactgaaacacaaaactaacaacacaatcatcagatcaccaaaatatcaaaaacaaactggcaaaaaaaaaaaacctagacatcaaatctttttaaaaaaatcagtcaagaatccctattgagctcagattttaacattaagaatatctgcagaatgaagttaacttagttgtgttttcaacgacttagcacacacctagacatcaaaatcttttaagatttaaaacagacccaaatgatccttattgatcttatactactgtatcatgaagatgaaggattgtgttttcatctacattgctaattagtgtgatcatatatataaacatcgtatcaacatagattgtcaaaaagataccaagaaaccccaaaaataaaatgaatttggtgagaagaatgaatggaagggtatataaaagagacataaataacagatccataaaaggattcaatgataagccttaaagtcaactaattgggttggtagtaccgtttcacacccaatttcgatttgtcttgccatgaaataacaagacagcaacaaaacaccatctacactttcttctctcttccattatttagaataacgtgcacaatggccctaatgctcatttatattcaaaagagcctaccgaagcaatcgatttgggtttctataagagcaaaatccattatttgtggctctagccattggtgaagagcacaagtgcacaactcagtagagcaacgatttgaggcgaatatggagatttaagagagcagcatcaccaaatccaattagataacaccaattcttccttgtactcatatgaaagaacaaaaaatatcggacaacaatatgacttcttgtagtacacaagtgaagatgagactagattctttcatgtacatattttatcaaagagttttaaaaacgataaacagagacccatataactcaaatgatttctacataggctcagttttaagtcagcttaaaacaggagcaattcttcagggcttgatctcaagttttaatgtcatccaatatatgttattgcttatcttactaatgtttcatcaattgctcatcttgctagtgttccatcaagcttgggtttgacgtggtttaaacaatttctgcaatagcaataaagagcatagaatcatcgaccattctagtaaacagagaactatataagctcgatcaatcacaggcttacctttcttagagcatcaatcgaccgcactttctcatctctcttttcacaaaagcactctccacaccagctggagaaatccttgtgatgagttttgagctctctaaatacagaactgcaaggaacaacacgaaagacaagcttaataagaaaccaaataaaaatggaaagtcaattgcaatgtaaaaaaagatgcatgccagtctagaggcaagttttagatgctatttaccttctgcaccatagaagcatattgacccgatgcccgcatgttgtggctctggcaccatggcggtggcggccacggtgaagcacagcttgtccaggtatatgacaataatcatatgtttcctgctttcgcagaaaaaaaagagttgtttatattagctatcagccatatacagaatgttagaagacaagaaagcaacagaaaagagtggcatacatctgcctttgttgctgtgttcacatgtttttcacaccgtgtgcctctgaaaaatagctcccctcccacaaattgattacccaaacaaacattcagcgttacttctgaatcatccacatgaaagcctgaaaatttatataacatctgataattttcagccagaataacgtgagtattggaatatatctgcatttaggacaactagtcaggtcatgggtaattatcaggatatgtgcaagggtctcgcctaatcacatcccctatcattcccatattcaacaacaaaaccatggtgagagtccagagttgctccacccacatcactgaagaatattgcaaaacaaaagattcgaagtagctttttagttttaccactgtgaacatattaaacagactttccaataatagactatgtaatggatttaaaaatattgcctttagagatgggacgtataaacccctccatgagtttgtcaagcatggtgtctagaccaaagtcgtcaagcacagcaccgtatttattcatggtgtttggtctcattatccggaatttggtctcacccacccacctttcaaaattgtctatctgcatggtcaaacaagagcaaatgaacaaaatacgaaggataagagaaaaacaaaaaatggatgcacattacctcggctagcatcatctcacaaaagctaggctggagcatgtcaaagacgaaaacaccaggagacggttcagatattatatttctgaagctttcctctgtgttttcatttatcgccttaaggaaagcaggaacgaaacatacggtgggaactagagtatacaactccttgtgaagtggctgcagtagaaaaacacttcaaactactaacaaatgactggagcagagcaatacagaacacaagaaagctcaagaaaggattcacacctgataatttgttgtaatcttcagcctatagtcactgtgcctttgagcctgtagcatcagccaaacaaaactacttttgagctcatattgacattttcaaaccattcatgcaatatcttctaccaaccatcatctaaccagattgaaatttccataaccacttaactaaaagtgaaaccagttcatagtagcaattagcaaaagctcaaattttcataatgaagtgtagcttctaaagcaattcacagtcatcaatacaagtaaacacaaaattcaagagagaaaggtccaaatctagtacttactctggaacgctctccatgaggaagatgcctaagcataatatcagtcatgaatttgattttctcatcacgattcgagacgagcatattcggaggcaagtacttctccagactagaatataccgagtttgggaaatcaagctgcagatcttcataactatcgggtctatgctcgttgttagggtttagccttagtctctggcaagaaaccatcgtagaggtagctctcaatgtcgtgggagccgccgaatgagaattctgacctgcaattgttccgttaccttccaccgtcgtcgtcgtcgtctcttgcgaaccttctcgctgctcacttgacattactaaagaaggcagagaattcaagtgagaaaaaactatgggttcttcttcacactacattccaaaagcaaaaaatcttaaaggggaattgaaatcgactttttaagctctcgatctggagattctgatttttgagttcccgttgaagttagggtttctgaatgttccctcgaagatttttttatcttttatttattagttaatattacgcacgaaaccaccagtcatacgccttataagaagagttaaatgattttctagcccatctattaggcggcccattaaataattcgaaccggttatttggtttaaactgaaattaccggtataatcgtggaattgaaatcattcgactttgagttgtctgttagtgcgttattggttaacacgtgagagatatcgatagtctcctctggagtttgttaagttcacacgtgtgaatgaaagctttcgctctcaaagcttggtgctttttcgtctcttgcctctgccaaaatcttttggccgccatcgatctttccgatcacggaacaaccgtacgaattgaaagtatctctgcggcgaagtagaaatgtggacggaggaatctttggatttagtgcttgtgccgacgggtctggtcgtgatggttgcttaccatgtctggctcgtctacgctattcttcaccgccccaagctcactgttatcgctctcaacgctgagtctcgacgacaatgggtcttctctatgatgactgtatgtttttttctcttctcatttctattgttcctcttttggtgacattctgggattttcttggtatttctgattctggagattttggggtctacattagggtttatggcaataaagctgctttgttcgtgattttaggaattgggtattgagagtcttacggctctcctatcctcaattttcatgattctgaagttttcgaagtcaactaaaaactagtaaaccataaatatttggatcttcaaacatcaggtagcaaaattgagcagggtttatgatgagtaaagatgatgagattaggagaagcaaagtcttggagctgtcaagtgatgttagatgtgaatcttcattagtagaatcaatgttataatagacggttggctatcttccttggaagcttgacatttttcaagaactcttcttgttcatggaggatatgcatcacagatccctatagttcacaactctacgcatatttcagctagaatcttggagctagttaatgaggttcattggataggaacagagtcatagacatgagaaacaagaacacagtcgtgtgtctgtccgttaagatccgaattatcggtggtcttggctctcagtattggttcttttgcagtagatgatataagtttatctattgttatttccaggaaccactgaaaaatggtaccttggctgttcagacaatccggaacaacataatggcatcaacccttttagccacaacagcaatcactttatgttccatcattggcgtctttgtaagcaactcgtcatcttcaaaatccacggcaacaaatctcatatacgggagcaaaagccctcgcttagcgtcattcaagaactttgcaatcctgatctgtttcctcatggcctttctctgcaacatccagtcaatcaggtattacgctcacgtaagtttcctagtcacagtgcctgtctcaagagggaaaagagagcactgcgagtacgtgtctagaaacctgaaccgagctagctacttctggtctctcggattacgggctttctacttctccttccctctcttcttatggaccttcgggccaatcccgatgtttgtgtgctgttgtatgatgtcctcgattctatatttcttggacacgaccactagttttaccaggcatcttcatagccaatcgttcagagaaacggctgattcaatggacggcgaaatcgaatcagctgttcatactctgtagattcttctctgacttttgttgtgtattaagagttatatgttaacggtgtcttttgtaatgtgatggaacaactttgtctgcaattatgtatgcgtttgtgttttcatgttacaatgattagaaaacattacaagatgaaaacgcaaacgcctacctaaacgcaaacaaacaatcttaagtatgttcatcactgaagaaagtaatggttttagctttttctgttcttggttttaggtttggataactaagaagaattgttattattcacacaggccttaaaacaaatttgttcttgctttgtttccacaggattgagtaaaatccataaacgaaatgttcaagcctcaaactgtttaaacatgactagatacgcacaaaaaggctcacgctcgataagtacattaatgaaaccttttattaagatttaaggacaaaagttcgattcttcttctaatgccaagagacgttacaaagctggagtggcagtgacggcggaaaataagacaatggggatgtctttaggtgatccgatatcgcctaccaacgcgaagagatcatacaagatctcattgcattagtatccactatggatcatctaaactcattcatggaatctggtacctctaattggctcatttcccccaccaccatggcagcttggaacgtctcttagaatcggagaagacagagagaaaaacctaaagcacctgacggactccggacagattgagcatgcaggaataaataagcgcgacactcaagcaagcaccaaagatttggggttgatccgaagatttcccagctagactgggctgggcctaattaaaagattattagcctaccaaaaaaagttcgagacccatcttctctcttcttactttgttgtctctctctacaatctacatgttggctggccagctgagacaaattacttttgcatttggacgatgatttgtctatttttcttgttaatatggttggtctgttgttgtgtctggctgttcgttgaatttcaagagttttatgttattaacgagtgtttttgatgatatctcatggaacaatttcctttgagttttcatgttataaatgctcgcgtaaatgcaaacaaataattgaaataatagtggtctactatgtaataatgtgatctcaaaaaataaaataaaatatatatatatatatatatatatatatatataatgtgatctcttgggtttaattcttaatgtattcttcttcttcttcactcaaagtaaaagggtttggttttgaccatggttcaggtgccccctccatatagtataaaaattaattttttatatatgtatataataaaaaaaagagacaaatatagt

SEQ ID NO: 28066 - DNA, 3587 bp, Arabidopsis thaliana landsberg
cgggaattgtaaagaggtgtctgagggtattttcgacttttcacgttttagagatgacggttatgattgccggcgggattgggccggtggaggaggagttggtaacttcgccggagacgcaaaagtgaaactttataggattataaagaaaggaagcttttttaatctctctcatacaacaaagtcagatttttgggtaagtttttatcaaaagtttcatactttttcctaaatttctaacacttttttttaatttttggtttaacttgatgattaagtaatgatcacattttattggatgtttccggattatgaagattaaccttttcattggaatgttaatttttttgcaacaacaaaaagaaaaattattgtcaacatttttataataagcgataaaattttgtgtataatatacttttttttgggtacgtgaaggaagtaatagtgtaacacaattattccatagttaaaaatgcaggcaagggtttacgaagggtttaagcaagtgatcccatggaagcgtaagcaagagaatcttccacggatgagttcttccaatatttaaatcaaatctcttcgatttcttttataaatcattaaatctttagttaattttatagactaatattaatatccatctgtatacatattaccacatggtttacagacatgaggaaaagtttattcttaactttttaccaaattaaaccctgaaactacactgttcctctagataaataggattattgtaaatatacttgaaaaaggtaaaagaatagggaacatcttaattcttaaatgaaggaggacaagagcattatgcaaaaccaaaaatttattatacaaaacataactacatgacctttctatttgcagttgctagcgacagcaataatactttcctgaaaaggaaagctataaaagttgattgatcacgatttgggcctaagcccaaaacttataaagtggaccgttaagttagttaagaagcccgcgttgatttctcttatcctcagatatttttttacgaaaatccacggccactaaccgtaaaagacactcttttgatttttctcttcttctacttaactcgctttgcctgactcactgagtcatggcgcttctgaggccgcatcttcatcgctttcactccaacactctccgccactcagcctatccttccgccgacgctggcggtggccttgtcgtctatcccacgtatggtcgtcaccgttgctccgcgattgcgatcgacgctccgtcgtctctgactggcgtgacgccgattcgttggggttacacgagtgttcaaggattccgagatgagatggaagacgacatcgtaatccgttctgatgctgtcgatagcttctcctacgcagcggtcttcgacggccacgctgggtcgtcctctgtcaaattcctcaggtaacttgtgttgcttctcatgcaagctctgtcttctagggtttaagtgttgacgatggtgatgatgattgatagggaagagctgtataaagagtgtgttggtgcattgcaagctggatcgttgttgaatggaggcgatttcgcagcaatcaaggaagctttgattaaggcctttgaaagcgttgaccgcaatttgctcaaatggtgaaaatgagcttaaatttctcagagcttgaatgaattttgatgattttgagtgaaatgaagtgattcatcatgcgtttggatccaggctagaagctaacggtgacgaagaagatgaatcaggttcaacagccactgtaatgttcatcagaaatgatgtttccttcattgctcatattggtgattcgtgtgcagtaagtcttcttatttataaatggatcattgtaacttggtcatgtctaaagtcttgttaatgcattgaaataggtcttatctcgatctgggcaaatcgaggaattgactgattatcaccgtccatatggaagcagtagagcagctattcaggaagtgaaaagggtcaaagaagcaggtggatgggtgtgtcttcttattttccatgtttcaaattcctcaagtatcattggatttgcttatctatctctccgagaatttggcttaaaaccgattcattgctttttgtataatcagattgtcaatggaaggatttgtggagacatagctgtatctcgtgcttttggtgacatccggtttaagacaaagaagaatgagttgggttctttctcttctcacaacggctcttctatttttataattgttatctcattgctcataagggtttcatacacagtatgttaaagaagggtgttgatgaaggaagatggtccgagaagtttgtttccaggtaacgaactacttggaagctgtttctacttttgctcgtctctcctgttattccatttcaaggatatctgtttctcatgagataaattctcagaatcgagtttaaaggggacatggttgtggcgactccagatatcttccaagtacctctgacatctgatgtggaattcattattttagcttctgatggattatgggactacatgaagaggtttccttttctttttcctctttcccccattcagtcatatgctttttaattgggaaaagtatagagcttacagtgatcaatgttttgccaatacagctcagatgtggttagttatgttagggatcagctccggaaacatgggaatgtgcaggcaagtttttatttcatcttcttatcaaattagtttcaataatcatgtatgactttaaggcttaactagtttcctaactgtccatatgtaacagcttgcttgtgaatctcttgcgcaagtagctttggtaaaatagctaataccctcctcagcctttcttttgattaggaatcaaaacttacaaatgtacgattttgttccaacgttacaggaccgacgatctcaggacaacattagcatcattattgctgatctagggtaggggttcatctaaacaaaagttccactgctatatgaaacctctgtatacattatctattagctattcaatctatatactcttaacgtgttttggtttcgatttttgcataaacagaagaacagagtggaagaatctccccgcgcagcgacaaaacgtagtggttgaactggttcaggctgcaacgactatcggtttagttactgttggcatatggatgtcttcacatctatcttaagtgaattgaacattctatctctttcgttagtgtatataaaacctgtaactatgtctaacactctagtcttcccatagaaatggagatatgaagatacctcacaaacaaaaccagctttatattattatatatcccactttcacaagcgttgaaactacatttacaaataaatgcatcttccaacgactaagagaaattttttgaaaagaaacgcatggctcatgccacagttggtggttccaatttttagctacttgatattttctttaggcatctataattctttttgttttgtgacattctctggtttatcatatcacaaaaaaaaaaaaaaaatcttgacattgtattatatacagtgtggactcttcaagagccaactatcaacgca

SEQ ID NO: 28067 - DNA, 1271 bp, Arabidopsis thaliana landsberg
caatcgagctgtttgactccgggaatctcgttgttgtttccgttgacggaacttcgatctgggagagttttgatcatttttacagatactctgatcacgaatcaagctttcaaagaaggcatgaagctcactagcagtgcttcttcgagcaacatgacttatgcccttgagatcaaatcaggagatatggttttatctgttaacagcttaacccctcaagtgtattggtcaatggcaaatgccagagagaggatcatcaacaaagatggcggcgtagtgacttcatcgtctctccttgggaattcatggcggttctttgatcagaaacaggttttgttgtggcagtttgtattctcagacaataaagatgataacacaacttggatcgctgttttgggaaacaacggtgtgatctctttttctaatcttggaagcggagcatctgctgccgattcttcgactaaaatacctagcgatctgtgcggaacacctgagccttgcgggccttactatgtctgctcgggttctaaagtgtgtggatgtgtgtccgggttgtctcgggctcggtctgattgcaaaaccgggattacttctccctgtaagaaaaccaaggataatgcaacattgcctttgcagctagtaagtgctggagacggtgtagactatttcgctcttgggtatgctcctccgttctccaagaaaactgatcttgatagctgtaaagagttctgccacaacaattgctcgtgccttggtcttttcttccagaacagttctggtaattgcttcttgtttgattatattggaagctttaaaacctctggcaatggaggctctgggtttgtgtcttacatcaagatcgcaagtactggttctggaggtggagataacggagaagatgatgggaaacattttccttatgtagtgattattgtcgtggtaacagtttttatcatcgctgttttgatctttgtggccttccggattcataagagaaagaaaatgattttggaggctcctcaagagagttcagaagaagataacttcttggaaaacttatccgggatgcctattcggttcgcttacaaagatcttcagtcagcgacgaataacttctcggtgaagttaggtcaaggagggtttggatcggtctatgaaggtactttaccagatggttctcgtctagctgtgaagaaacttgaaggaatcggtcaagggaagaaagaattcagagccgacgttagtataatcggaagtattcatcatctgca

SEQ ID NO: 28068 - DNA, 1595 bp, Arabidopsis thaliana landsberg
taaaacttttttcccatgtgttggtccattgtgtttccttgtaacacaaacattgtgctcatttggctgtacactgtggcgaagactattcctgtggcccaaactggaagaagtgtgattattgacttaagttcttcaacttgagtaacagaacatagtctccatggattgacttccccgtctttgatgctatcagattgactctcaaccgctgccttgtcaaaaaacctgagatgttttcaaaactttagatttgaaaacagagtatttttgaagttaggataaagattcaaactttagtttcttactttaagttatctgtgtgcacaagtttccggctacctttgatgttactctcatcatctgcagtttcaaagagcagagacttgtcctctggaaccttaacacttatcttccgaaaagccgctactataacctgaaagatcctagtaagtggactccctccaggtctctgaagtctgtaaaaacggcttccgaagaagaaaaagcaaaccgtgataaccatcgcgactgttggaacaccgaaaccccatccccaaccaacattcatttgtatccagacgagaacagttgcagcaatgagagctccaacattaatggagaagtaaaaccagttgaagaaagaacttttcttgatcttctcattctcatcattctcatcaaactgatcagctccaaaggacgaaacacacggctttataccgccagttccaagagcaatcatataaagcgcgacaaagaaaacagcagtctgactagaatttggatgacaagtatcagcattgcagttacctggtttaagtccaggaactgaagctgataatgtcaaaagagtcatacccttcaagagaaaaaacaaacttaattagttttaaccaaaagattcacatttttaaccaaaagataagaaacaagtaaaactcacggagacatagatgaaaacaaaagttgcaatagtccaatatcgtccaaggtaagcatcagctataaaggctccaatcaaaggagttatataacatgttccagaccaattcgtgacgttatttgcagccatagcaatgccttgattcagacggctctcaagataattcacaaggttagtgcccatgccatagtaggccaatctttcacagcactcatttcctacacaaaacacataaaactggttaatcttatatggatagatccaatcagggcccaagctatataataaaaaaaatataatggccctttctttatttagacaatttttttgaagaaaacagagcagattttaggtttataactcttttttcatagtgatcaccctacaaaactaaacatttccaataatattttaaattttatttgttctctatcattcaatttgcttttaatcgtatataatctctttttaatcattacatttattatttacatgtaaatgtttttagtggaccttaaaaaacaggggacacgagaggccattacttaagctggtccaggtcctatacgacaataatgaagaaaaagattggtgaaacgattagaacgttaccgagaatgaagcggcaagctttccaatttggggtttt

SEQ ID NO: 28069 - DNA, 1028 bp, Arabidopsis thaliana landsberg
  unsure (1)..(1028): unsure at all n locations
agtcatatcctgttacaacaacaagagttttatcaaaagaaaaaaaaattgattttaactttttaacttgaatgatttcaaaatttggcttatatcaatacatttcaaaaggagagtttagaaatggactcaaactaaaattgtgtatacttttgggcaaacagaataatgacatttaagaaagaaacttaaacaattatttttaatttcacaagacatataaatacataattatacctatattattcccagttgaataagcatattttgctagttgctatatatccaaaacctcgtaaaaacgtaagagttttacttttaaattctaaaaactaatactattattacaatcccacgacttttacaactttaagtgagctccaccatcttctccgataacttagccaatgacctaagattacacccaacgatagtatcagcaaacaacgtagtttcttcctcagtatttccttccgccccacccaccacataactctccacaaccactgtcttctcctcttccgccttcacaaacaccgtagttttcgactggtaatggaccaaacgatgatcaccaccaataatgctgatcaccatcacatgagactcatcgtcaagttcatctaatctttctaggctaaaactcgccggaagatcggaaaccaccgtgacttcacggacagagccttctcctccatcgccggagcgtagtttgcaagtttttacgaaatgtttaaatgtttttgggttatcaaatcgacgtaggatcgaccatactagaggtaacggagcattgatagtttgtactactgtcgaaccgcatacatgctgttcttgagatgttttcatacgtgtttgtttggtgtttcacaattttgttttcctaccgacagttgtggttgttgtcttcaaatattttacgtagtggcaagttttttttagtatttatatatgagaaaaatctataggtcgacaaaaagatgagaaatatctttagaacanggccgactgaaagaaatactaaaaat

SEQ ID NO: 28070 - DNA, 1255 bp, Arabidopsis thaliana landsberg
aatattcttatactttttgccttggctgttgtgaacagatatgcacatctgctacttaaggacgaggaagtttttgaggattataatgtttcatctgcaaagcggtttgaagaggtacagttcaatatatgacctcgtccttatgcttagagatgttttaagatagttttgttctggcctaccgtaagttgtctatatgtttcttatgtgttaaaacctttttttcccttgagacaaacgaacaaacatggtttctctgctcttgtggtaatctgctaatcttgccttcataaatttaataaatacttagatactaagcacttctccatcttcctggaagccagccaattattttttgttttttgttttttactttcatagatttattcatgagttattatttttacaagtccttccttttatacaggccaataaaattggaaagattaatctcgctgctactgggaaggatcttatggaagatgagaagcaaggagatgtcacagtagatctctttgctgctttagacatggaaagtgaagctgttactgagcgattaccagagcttgaaaataatcagactctgggcctacttaatggtttcctctctgtggacgattggtatgaacaccgaatcatatctttttacttaacaaatccactgtcgtcaaaccagtccatttggttaacaggtttcttgaaccagtgcatgttaaattttaagttttattattcttcatgagcatgagatttcttcgtggagtactctatatatgattgttatttttttgataattgcatcaccttctgtaacttgaaaattgaacttgagggcatattggatgactgttactggtgtcttctgccgaattcacatctcaggatccatactatcctagaaaatttgtttacatacaaagctattttgtatatttaacttatattaaaagcttgctaattaatcttcccctttctgctcaactgaggtgaaagctctttttcttattatttttatattaactcacttcttttcaggtatcatgcaaatatcttgttcgagcgtcttgcacctcttaatccagtggcacacgatcagatctgtagtgggttgtttaggttagtgagtaatcctttagcgcaaactattctgcaccagatttatagcggcttcatttctttgcatcttcagctctatgtatccaaagagatactgcagctctggccactaatctatgatgacaacaatgattttttt

SEQ ID NO: 28071 - DNA, 2296 bp, Arabidopsis thaliana landsberg
gtaaacaagccatcatcattagtagctgtagatcattttgaaatcataagatcggtttcttgataacaaaagatcaaaactttgatgatgtttcattgatttgttacttttgacagataagtaactacgcgggtatactcttcctgctaatgtttatgtccattgcggtaacgggtatactagaaatgcaatggggcaaagtaggaatcgatgattggtggagaaacgagcagttttgggtcataggaggagtctcttcgcatctatttgctctgtttcaaggtttactcaaagttcttgcaggagtcagcacgaacttcacagtcacatctaaagcagcagatgatggagaattctcagagctttacattttcaaatggacatctttgttgattcctccgactactctgctgatcattaacatcgttggagtcattgtcggagtttcggatgcgataaataacgggtacgactcttggggaccgctttttgggagattgttctttgcgctttgggtgattgttcatttgtatccgttcctcaaagggttacttgggaaacaagatagagtaccaaccattatattggtttggtcgattcttcttgcttccatcttgactctcttgtgggttagagtcaatccatttgtgtccaaagatggaccggtcttggagatttgtggtcttgactgtttaaagtgagaactgggtttctttctttataataataagaagaaaaaaagattggcgaatcatgaagaatacaaaacggagttttaacgatggtacaatctgatgatgataatgatggtgatgatggtgatgatggtgatgtgtgttctattagtggtggctaatgtgtagacataaagagctctgtgcagtttttacgtgttacgttttctttcaagtcttttcttcattaattcttttatttgattgtaataaataattagtttttttcttaaaaaaatctttgttagtgtaaccagttatggcctttccttagatgataatcatataaataactaaataagctcatcctaaaagtagattaagttttatttttaagttatttctattccttggtttggtgttttaactttcattctattggatcaaaagttatatactcaaagtctcaaacattataatacttctggttgcgcagttttaaactagaaagaatcaaagatccgtctgttgttatttttgttcattacgcgcaaaagcgtactacgtactgtatagtatggtggtggttatatcatcatcatttgtaacaagatacggtcaaatatttgcaaaagatttaaactttctttattaacagattccagaatccttcaacgaatgaggttgtaacacgtgtacgtgagacaacttaggtgaaaattccatatttgtagtcggaatttggcttacgtggaacccaccgaaatcgtgtagtagaagtcaaacgcatctatatctatgtttaagctaaaagtaaacctcattgaagaagtaacataggaaagctttcgtagccgtcagatcaaccagacaaaacgtcatatcgagacaaaaactttcgacggagcagattctacagatacaatacacacggtttcactggatcgcccctctctctttaaacaaaattaaataatatcagaagacacgttcttcttcttacgaaaccgactttgtagtttcttctttttttccattacacaaaaacgaaaaaacgacaacacaaaaacaaataacaaaatcttttaaataaaaaataaatcgactctcgtgtttgtttaacttcttgtttatttttcttagagattaattaaatttcttctctacatgaacgatccaatgggagaaacaggattttctagagaatcggcgccggagatcgtgttctcggagacggatatggctgcggctgagcagcttatgcagctaagcgaagaagaaacggtgagctgtagcagcagcaccggcggagattgcggtggcggaggcggagacaagataaagcatgaatatgttagctcgagaatcggaaacgagctaaacgacggcgtacgaggaaactctattcttggcgtggagcagaagaggaagaggacggtgatgaaggaaaagaagtttcgatctctcgagagtatttacaaagcgacgaaggcgattagggattaatggaggaaagggatcgtagagatggttaattatatttcgtttgttaattacttttgttaatcgttgttagtaacctcttcaatggttttttggtgtgtgtgtagtatttctagtcc

SEQ ID NO: 28072 - DNA, 1049 bp, Arabidopsis thaliana landsberg
gactcaggcttgtatccgagttgactcgttttcaccttcttggttacaaacgaatcgagtttccgagttcgcttggatcgtttccgagtcaggttaataacattcctcgacgactcgctctcgctttcaccgtcttcaagaagaacagagctcgtaaaagcaaacttcggatcagacgaagaaacatcggactcagtctcataactgagttgactcggcctttgttcttcctcatgtgaattactcatgtgagatctcatgtgaccacctaaagcttttccgttaacgaagctcttaaagcaaaccctgcacttgtaactctccatcttcaataacaagaacagagaagaagaaaaagaagagagaaataaaagtaaagagaagtggaatctacaagcattcctctccaccaatgaacttaatatttgtactcaaagaagattaagaaagcaactaaattaaattttatttatctctctctctctctttctctttctcttactgtttaacaaaagaaaaaaaaaacttaaatttaatttttgatctggaaaacggaaagaagagaaaaaaatctaataaaagcgtatgcatgaagttgaagaagcgacaatgtaacatgcgagccttgcccgtttctgcaaacttcttattacaaactcccttctcttttcttcaatttcccgatttacccttctatttaagcttaaaactttcctgtttttacacccgaaatagcagagacgcaacgcagctgtctttttttgtctatttctaggacgggtcttttaaacttcttaattttaacccaaaaaaaacaaaacagttttttttagtgaaaagggtattttcggaattttaaaactttgctgttgtacgagaaaagtcttgaggaggaggtttgttttgttgtgttgtaacgacgaaccagctaaacaaaaccgttgtccaaaaaaatgttaacatctctttgctatgagttttacagtacgtgacagccacgtactagtccaatgacggttgtttttaataactctcaccgagcagtaact

SEQ ID NO: 28073 - DNA, 1479 bp, Arabidopsis thaliana landsberg
attgcagtgagcgtgtaatagtgatatcactactagattctgttcaacacaaaattgtagagtataaataattgaggatattgcacaagctcgatctgtttcattccacgtcatagctacacacacccaatgtataaagaaaatgatggataaacacagaaaaactgaccttgatatgactttctccttctataaaaaacaaatccaaacgcaagaagcagcaagatgataataataacaatggaactaacaattcccttgaagattgccattgagattgttatggtatctgcaggagaagattatagttttcttttaagccttctttaggtaagtaattaaactgttgctattggaagacttacctttctttgtcgatgtattgggcactgccggaggtgccaatgtgatacgactaaaagcctcagcgaatggaaacaagtcccaccggaaaagacagctggctcggtacacagtgccaccttgctttccattgcagcatgactgaaagtcactaacactctgttttaaacaggtacggcaatcctccaaagataagtccggagtgcattgcattaatgcatatataatcctggaagccggcaaggtggcttcgtcagctgcgtagtatttgcttttagatgatggcgaagtagtattagctatcataccacttgttaacaattgccacgcttgatcaaactctgctacctcggatctaatatcatcctgaaatggggtaagaaaatgcggttctatcgtcagtgatccaaaaaacacctattggagttcgaccatacacacaacccgtttttcggaccaggctaggcctttgtctggttgggacagctggacaataacagagttgaggcaaagtcaatacagttgtagcaaagctctggttcagcaccttaatgcacatcccagagttacactcgatccgggccttggccaagcgaagtattgaagtagccaccttgagctgaaacattagaagcaagagaagagaggacaaggccacggtttttgtcatacctaccacttggtacaaaaaacccagttttgccgcattctggtgcaaatacaacaacaaagcctataaagagaaaccagaagattggcaagagatgcttcagttccattatcaagatcatacagatgatatttagattaggaaagcaagcaagtatgaataatatacatactttgttttgtccataaacatgtcctcgtcaattaaacgtctgctagaagttatgtggacttatcacctttataaaaaaacaagaaaaagaagtttctgtggagtgtggaacatcaatagacaatcaatcctctccgttgactcatttaaaatttcggttgagtcaagcatatgtcatagacaaattcaaaacatgaatctgtccctttcttaccggttcccaaagctaaccgatgttttttctctgaaatatctaggtgttgaattcgtcaaac

SEQ ID NO: 28074 - DNA, 1098 bp, Arabidopsis thaliana landsberg
  unsure (1)..(1098): unsure at all n locations
tgcggacgacactactactaactattgatttccattttggttaatatactttaatattaaaaaaatatatactttagtctgttaaattatgtactttatttctctttaagaaaaagttttnnnnnnnnnnnnnnnnnnnnnaaaaaaaggtgtgtattacaaacttcataagtattggaattcataaggcccatattaggcctaataaaggcccaatcagagttctgactttaaaactagtgactagaagctgactcactaaaaaactattatcgtccattcactcgctcttatcacaaaccccaaaccctcccaaccatcccactcgccaacacaaaccacgctcctcactctacgaaagactataacatcaaacgccgtcgtataatcgaaagtgaacacacttgcgcgtgggtttaatatacatctatttttaatagcccacctgactctttgccctttattcttcttctctctttctctttcccattttcttcaaattttccccattaaacaaaaaaaaatcaaatctctctctttctctctctaatggcggcgacattaggcagagaccagtatgtgtacatggcgaagctcgccgagcaggcggagcgttacgaagagatggttcaattcatggaacagctcgttacaggcgctactccagcggaagagctcaccgttgaagagaggaatctcctctctgttgcttacaaaaacgtgatcggatctctacgcgccgcctggaggatcgtgtcttcgattgagcagaaggaagagagtaggaagaacgacgagcacgtgtcgcttgtcaaggattacagatctaaagttgagtctgagctttcttctgtttgctctggaatccttaagctccttgactcgcatctgatcccatctgctggagcgagtgagtctaaggtcttttacttgaagatgaaaggtgattatcatcggtacatggctgagtttaagtctggtgatgagaggaaaactgctgctgaagataccatgctcgcttacaaagcagctcaggttattttcattctccaaatctgatttggctgataagttttgtttgtgaactctgtttacgag

SEQ ID NO: 28075 - DNA, 897 bp, Arabidopsis thaliana landsberg
  unsure (1)..(897): unsure at all n locations
ctcagcttcacacacaaaggcggccggatcacggtttcgcagatttagcgcgaaggcgggactccgcaccacctctccaccacggaaaggcatctggcgagggcatacttcgcccaacgcccaaccatgcgccaagggccataccccgtacgccacaaactcttcaaccaagtccggcccactgctcgggccggcggacaacgaagggccccttcgtccacatcatcctccgccacttcaaatggcgggtacgcgcagtaaaaatgagagcacatctcggacacgggaagtccctcgtggccttcgacggtaccctcagcaacgtaaaaccaaaattcattccagttgccccacttgttgcgggcgcaagggaccaactcgactacttgcattgtggtcttgccggtcttcggcgtgaatgtgcaggacccaaactgagcaacttcgtccctgatcatccttttctgccaatgcaaacaataattctttgcaaaaacttcaactgacggctgtccgtcgtacgaagtcgtcgcccagacatacttcgccagcgccactatggcgttcggtgtcaactgatgtatttgaacgctaaatctacgcaggaccttgccaacaaaccagtgcgcaggcaggcggagtccggcgacgaagaatgcctcgaaaacaaccaactcgccctccggctcggggacttcctccgtccccggagcacgagcgactccgccgccaaaatagcnnnnnnnnnnnnnnnnnnnnnnnnnnnnnnnnntcatccgtgacactccaaattcaacagagtcgccggcgcgcaactcctccagcatcacgctactcaacgtcccctcagacgaggcggctgcggcagggttggcgtcggcggaagaagaagaagat

SEQ ID NO: 28076 - DNA, 1625 bp, Arabidopsis thaliana landsberg
  unsure (1)..(1625): unsure at all n locations
tatcactgaattaataactgtttctgaaggatccatcctgatgttctcaaaatctgtagccagttgatccaatctggttcgttttacactaacatctccttcattcagtttctgcaaggtatcccacatctacttagctgattcacaccttgagacaagattaaactcgttgtcatctagacagtagtaaatagcattttatagctctagcattaaatttagacagattcttctcttcttcagtccaatttgcctttgctgaaaggaggttcccagccatcttctacagcagtccaagcatcttctccttgtcctctgattagctgtatcatccgtgttttccagtnnnnnnnnnnnnnnnnnnnnnnnnnnnnnnnnnnnnnnnnnnnnnncttcgacatccttaatcagcaggatctcaacatgtattgagtgtttactcaggtcggtttcctgctctgataccaaatgagaataatagagatatcgataggttgaaaagaacttcttctctttattaaaaatcacttaaataatcttacagatctgtttaatcagttttacacaagttaacacaacctgttactgaccaattcctaatctatccaactcacaacacatcaacagttatgtatccctctttgttcactcaccaagaaccctaatagcttctagcttagatcttgagattcacaaatcttgtgagataagacggctacctaaacctaaagtctagcttccgattatataggtaacgacacaagcgtcattaacctatttcctaattctaagatatcttcaaatcttctttccatgatttgcttatatcttgaatgacttgttcatcacgttctagtaactccagcaaccaaacgcagctcgccacatcatcatcatttgagtctcgctgcttcccgcgcacagctctttccttatgcttcatagagtcgccttgtgcttagacatctatatatcttcagaagattctcctatatccatatttcttgatgacccaccagtttcaaatctccttgcaggttttctattttcaaatctccttgcatcccttgatagaattatagaaattcatgttcccttggtagactaacattagatccnnnnnnnnnnnnnnnnnnnnnnnnnnnnnnnnnnngtattggaccatgatagatgtacattttaaatgaatttcagtacatgttgacaaaaataaaataaaaaattcagtagaagtaaaaaaaatttcataaatttatatagtaagtaaaaaaggaaaatacattagggtatcaaatcctataaaagtggttcctcgcttctactactcttttttcactctctctctctctatctcttaacgattccattctctcttattttctctgtagaaaaaaaaaatcctaagaatgctgtcgtctaacgtatcggagacatgcacgaggaggaagagaggaacaaagagaaagattgaaattgagaagcggttcacaaaagaacaacgatccatagcttgcagcaaacgccgtctaactctcttctccaaagcggctgatctatgtcttctctccggagccaacatggtcgttttcgtaacttctccggacgagaactcctacgttgtttac

SEQ ID NO: 28077 - DNA, 1705 bp, Arabidopsis thaliana landsberg
  unsure (1)..(1705): unsure at all n locations
agttagccaaaacagttcttgaaatgcaggtcaggatcgagtacgaggaagattaacggaagcgaggataaaaaagaagatacatggatgttcttccaaggtcttgatgtagatgctaaagagaagatcgctagagaattggccaaactcgtgtttggatcgcaagacagctttgtctctatctgtttgagtagtttctcgtcgacaagatcggattctgcagaagatttgaggaacaagaggttgagagatgaacaaagcctgagttacatagagagattctcggaagctgtttcgttggatccaaatagagtgatcttagttgaagatattgagcaagctgattatttgtctcaagtgggtttcaagagagctgttgagagaggaagagtttgtaattcgagtggtgaagaagcttcgcttaaagacgcgattgtgatcttgagctgtgaaagatttcgttcaagatcaagagcttgttctcctcctagtaaccagaaatcggacggttcagatcaacctgaggacaagaatgttgctacttgtgttgcacttgatctaaacctatctattgatagtgcgtacgtttgtgaagaagaatcatgtgatgagattggcttactcgaagcggtagatgcacggtttcatttcaagtgttcatcaacataacactaacagcatgcacgtatgcatgtaacatggcccagtttatgaacatgatcattcgcattacatggtttatggtcaaccgttatttaatttgtttcccttacggacttatctttcattgggttggggcaatactttgggttaaacgtgtagttgtagatttgctttttcaatttggcttaggaactttttagaaggatatggggttaaactagagattttccttttttatcttttgtttttttttgtcttaatgtaaaattatcatattatggtcgtaaatggtaatttatgttcatggataagagacgaaaaaataatcatgacacacattggattgaaccaacggtacttacaaaagaatgtgttgatacatcaagtaacttaattagtagcttatttttaattttgaaaatagtttcatcaggtgacttacatatttggtataaaaatacattatctgatacagcatannnnnnnnnnnnnnnnnnnnnnntttgactatctacaggtttaaagttctttctctataccaaaaattaattacaaacaaagaatatcccaaaataaaattcttaaaataatatatgcttaagaataacccaaattaaaggtcgaatttggaaaagtcaagtttatttaacaagaaaagaagaatataaactatacttaagctagaagaaagaacacttaagctagaagacagaacacttacaatctgttgttgttgtgactaattatatagtatagaatttcgattattttctatcataactacgcatttaatctttagcaaaaaaacacatttaagtaatttaaccaaaacatgatctaatatgaaaccgacggaacatagactagacaaaccatagttaactcttaatctgtctaaagacttttttttttttttggtaaggcttaatctgtctaaagataaagcatacaaaactggtcattgtttcctttagaatccaagacagcttgattgatattaaagatctacacaaactttattgcctctctgtttcatttcatc

SEQ ID NO: 28078 - DNA, 3224 bp, Arabidopsis thaliana landsberg
ctaacgcaaatttatgtttccattgtcggatcaatttcctttggatgatcaatgggaatccgacgagtatgtgtattatatggttggattgattttttgtacttttgttgtgtgtttacgaatataaacaagtttcaacaccctgtaatttaaaataggttaacgcgacaagtagaaatagtttaatgccgtttcacgtggaaattaataattgtaatttatcgtgttttttattttccaaaattttcttttatgaactgtcgtccatgcgattgagtaactaactattgaaacatgtaataacataaacaattctatagtctttaaccaaaaagatccaattctattggcgtgggacagcacatatataacactacagaatgcaaatagaatattacctcttaaacactcaactaattaacatctcatatcaataatgacaatgatttgaataaatttttatactatccaatttatatatagggcctgttcgtttccttgtcgctggcgacagaaaccggcgacagcgactaaaagctgttcgtttgattgttgctagtcgagcgaccgatcgcagcgactgtcgccagcgaccagcgatcataatttttagtcgctgtttatttcagcgatcggaattgaaaacgcggcgactaaacgatataagtacaataatacccttgtctttttaaagaaataacacaaaaccctagctcattctttcttcttcttcgttaccctaatctctctcacgcttcagtcttcttctccattacctctcgatttccatctccattaatgtgagctttcgatcttctttgatctggttctaggtacacatgaatctctctatttttaattctttattgtaatagattttctgggtttagttcaaaattaaatctcttgttctcaattttattgtaatagattttctgggtcaagcttatattcagcaatctctttagttttctgggtaagttgtagctttgtgtagatctagatctgttgctaataaatatttgatggtttcttattttgtgctgttagatgctatatgaaacggtgatttgaattgtgtgttcttatggttttgcttttccattagtatacgtgagtgtgagtgtgatgaattaattgtttgaagcgtgagtgtgagttgacgaagtatgatgaagtatgttattgaatcttcttcacgttagcaatgtcttgtagcacaaaaatgtctcacattggataagaacttaggaagggtagtaagaccaataatttatacagacctaagagcatctcatgttatcaaattcaatataacagcacaacatcgaacatacatgtattattcaagtatcaaattgtactgttattgccactagcattttccacagttaacataaaactaaaattgatatcccatccaaacatatgatttttgagccaatttgcaagtgcctctcccacataatcattgattgacttaaagatgatctttctttgcaaacatgagcaatatttaaccatatatttgatgccagtagtactttctgttcatacacaaattttggcacaaacattacttatttgtgaaataagctcttataagtcttctctttctcatacttcaataatttcgttctttgaaagaattttaaacaacaaaacaactttactaaaagaatatatgaacccttgaccctctacaaatgcaaaaagataattcttccaaaactatcactgttaaatccgaatgcaacaagttgaccatatatcaccaccacttttagcctttcactttctgagaatcagactaacaagttttttattaaattaccaaaacaccaaacttaataaaatatttggaataggtagcaaagtttcaccacacatagctccttaaactcagacacttagcagttacatatcatcaccacttaaactccttaaaacaacaacacactaaacagttcataaacacgaaagacacaaagcaactagtcattaattgacattaagatgagagaaaccccaaaacaccaaatcatcaagccgctcattggtcggagaattcccaccatgaaccaacaaaccttcctcaccatccttaaccgctttcgtaaacgcgcaccacccgcgttggctcggcttctcctcttcattcccacacacaatcctctcccacactaacgtctctgtatcaagctgataaacctctccagacatcttcccagctcccatgtgcataagctcatgcggctcttcctccccaccataaataacaatgtacttcccgtaagaaaccgccggaaacacgcttctcgccgccggtacatccccagtagtctccacagccttccactgttcactagccaagtcaaaacaatgaatatcacccaattcattaccatcaaacccaaacaaaacccaaattctcccttccacaaccacaagccctggtgctcctctgcctttacaagcttccccagccgccggatactcaacccatttctgatcaacaacatcgtacgcatgaagcgtattcacacgtcctttagcagtcacaccaccaaacacataaactttccgatcatcaccagccattgaatgatagctacgaccaggaagcccttcctcaaccggagataacaatttccactcattggtctcagtatcatacgaatgaagaccgttgtatctccgtttatcgtcacggccaccgtagacatagatcgttgcaccgatcgttaccatcgagacaccaaaacaggggaaaggagcctctccggtcgcaggagctatcgaccattcttgagtcccaagatcgaaaacgtaaagatcgttatcaatatggatcgttggcttaagctcaccaccaaaacagtaaactttgttcccaacgacggtcatggcatgtgagcttctagccccaggaccagctcctttttgacccacctgattaacataatcaaactcacatttctaagatcaaagaaaccaaatcaaagaaccttaataatattatagagattgaaagattgaatctttacctttaaccatttgttctccaccggacacatttttttcgttactcactagaaagatttttttttagaggatgaaagaaaaaagttttgtggctattgttgttgatgctgttgcgtgtacttacttataggaaaaatgtggtatcaagggaccacaattaaagtacaaaagtaaattac

SEQ ID NO: 28079 - DNA, 1120 bp, Arabidopsis thaliana landsberg
ctgaggaaattgaaggcctttcctggggtctgccccatcttcttgttgtttttgcccattccgataagtggtcctgatttggaggtgatcttcccaagctgaccagagtaaaacttgaaacgtttgtgtttttctgcaacaagaggacctgacttaggtgattcggcgctgagagaacccgaaaggaaatcactcatcttcgtggaccttgtagcagctgaacccgatgctggaccggtaaatcttccaagggggccagaagcaaatctaggaagaccactagactcagatttatgagatacaggagttaaaatagtagaaacggagtggctgcggccaataaaatcagaatctgcagagctaacatcacttgcttccactctgtaactaatgccaaaaacatgtttagtcctgctaaggattgtgaaaactgatctaaccaagagaatgacggtatagtcataagtacggttccaaagagacacatcccgcagattcttcacttcgtgtcttttccatgtaacttttttctgatactccaaaagattgtcagtagcagattcattgctcttcattctcttgaaagtctgttcaagatcttcaagaatctcagtctcctggtagagactagcattagatgatatgaaacgttccattttcttagctttcttatccattttcttccacccaaactgccaaccataagggtcagctccagtcttcatcatatcactaaaacaattctcaaagcacttcaacttgggatcgttgcatttcctcgccagcctagccacagctttcgctacattctcaacgttctccatcatttcatcacgtattaacctcacaataaaatcatcatcttctgaaattaacttctttataccagtggaatgtgtaatctcgtccctaagccttgcaacattcttatcacttaatgactgccacaaatgaacaagcttcgacaacaaactcgcaacctcaaacgctaatactcctagaaccgccttatctttatgaccatcatgtttctttggaaacctccacagattacgaaaccaagtctctgaaaccatcttctctcaacctgctataaaccaattctatcaacaccaaaaag

SEQ ID NO: 28080 - DNA, 1852 bp, Arabidopsis thaliana landsberg
tgacacattactttttaacttccacattttctattatttttcttgtttttttggatcagcttattgggatgtcactgatccatctggtacatatttcaaacttgggtccaacaaatctgtcccaatctagttggcaatacaacattgaaaagtccgaatgttttattaaattttggtacacctactcagaggcagtgtgttttcatgcaagttaatggtacgaacaggatctttcgtgtattaaattttgatgtgactgtacatgcattaaatggtttaatatgttctttgtctttcttgattagggcatatggttcgaaagacaagtgaaacccaatatagatttctaacctagtttagctaataatttgcctttttttccgactctataaatcagaccccatcaacatggtgtgtccttttttctgtcaaatatatattaaagattgaataattctctttttggtacagggttcaagattgaataatgcataccgataccatatcatgtatatataaccatttttagcacttttgtatagtcaaatttgtctcagtaccattattaaatttgtgtatgatatttagatagaacaatattatgcatgtgtgaacgtaactaaataaggaatataacaaactaaattaagatgataaacttggtgtagtcagattatacctgaacgtagatcagaggagagaacgtcaactccggtccaataggatgatgataaaccagaaactcatcaactgaccggtccggtttactaagccactcctccacagtgagattgcattgaccttccacgaaacgtgtgccgcagtcgttgcacttgatgtacggacggcccgagtctctccttgagaacctgcctgtggtccaagcgatctggtcgaacaacatgaacatggcctccttcaggtgtctcacggttaagtcacgtgctgtctcggctgagtagatgtaagccgccttgaggtagtggagcttcatggctaggtctaaaccggttggttcgtgggttgtacccgtctctgtcggccgggtcgcacctacggtagataaccggatgctgtgaaccggaccctgtccctgtccttgttcttgagatcgacccatgatggctcagtggagttaaactgattctttgacctaacaagtcgatcgatgtatgtaacactttaacaaaaaaaaagcaaatttaataacataaaattatatgaaactttgcctttgcttggacatttatctctctctctctctctctctctgctttgtaggtgatgaatgaaatgtgatgaggctcttgtgttaaatagagaagattgatggtgttaacttgttaattatacgagtaggtgaaagagtttaaattaatttcctttctttttccccgataaggtccatgaccaaaggatccaattcatcgttcagatacttttaatatttgacccctactatttttttatgactatttctgcatttaaaatataattgcaatacaaaaagaatagactctatcaatctattattgacgtaaattgtgcattaattaccttactgaatggttgatatactgtatagtaatcttgtgattaacttatacttatattatggatttgacatattttgggatcaataaataactcgtattgttacgtttgattaaaatatttttcgatcgattgtttttgttgaatgtagatgaccattatctagatgattcgtgaggcggtgataagattgtctttcaatgatccggctactggtaactctttaagaatattagattcttatcatggtattgaaaacggagatgataccattgtccctacaataaattttaacaaa

SEQ ID NO: 28081 - DNA, 1518 bp, Arabidopsis thaliana landsberg
agaaaaaaatcctatgaattcttgataaaataaattgttttttttcttttaagtttgataattatcagttttttaaaaaacttatctttattttttttgttatatatttatgttgataatttcaattttatatttatttaatgaattaaaatctctacagccaagaattttgtatttatctaatgaattattttttctacagctaagaaaatagagttttgagaatttactctactacagccttaaaaacaaaataaaaaatatttggtctgtaagtttaaaaataaagctatagcacgattggtttgtaatcaaggctttaagaaaaattaaggctataagtcagacttaaacccaaccaatcatgcaccaaatcatgatcaaactcaaatatctcatatccaaaacaaaacaaacaaaaaccctaacatgaatacatgataggatttaatcagaacggtgaggactgggaagatagtgaacttcatgttatggttacgacaataatcaccatcatgctcccccgaggcaaagaagtaaggctgtattttcttaagtgttaggcagaaactttcttctgatccttttctcgatgaaccaatcttcctcgcatttttaatgtcgcagttcatgtaactccatcggtctttgaacaaatatacattattccttctcttagcagatttgtcgtacttgaaaactgcacccatgttaaaacaagttattcaccaattaggttaattaacattagaaaataaggtagtacacataaactaacttaccaagaacatcattgacgtagaaaggagcattcttagaagcccaatctttgtaatctaacccttttttccatccgtctgatcctcccactatgatcttttttggtgtttcatagtccaaacccgaacccgaatccgaaccggaacgtcgttatcgtttgagccccaactccaactccagcctgacttaagactccagttccaactccttcttgaaccatcacggttggtacctgaacccgagccagaatcgcggttggatcccgtgccccaaccccaaccagagccattattagagtttgaagccaaacccaagccggagttatcatcggatccccaaccagggaacgagccccaactccaacttgggccgtcagagtctgaaccaggacctgagctagagctacttgacccgtcagatccccaacccgacctgtaactccaactccagctccacgcctctgcgccagatgaggagagacatgcaatggccacgacgagtatgagcagctttttttgtgaaccagatagagccatcgttttttttcttcttttacgtgctttgtttagtatctgttgtgtgactcttgctttgctttgtcaactgcgataatctgtgttcgttatgagaaacgtatttatagagaaagataacctaattaagacgtatattcccaattgatttgggagtagaacatataatttacaacagtttctttttttatagttcgtgtaaaaa

SEQ ID NO: 28082 - DNA, 798 bp, Arabidopsis thaliana landsberg
cgagatactggttggaaatcgtaattgcatttgagaaagcactcgacaagataacatattctcgacctaagaagcatgtagttaagagttttctgtaagaacctaagatagaggctatagtacaaccccaaattcacgtttattagctgtgtaacacattgctagagggaataattgagatggaaggtctgcgtggaaaatttcagtcaagaagcatgagttattttgagaatcattttgctgaaattctcacacatgaagtgttccattccacttgctaaggccaccggagctaccctcctatgaagtagttttcttgttgtgcaagggccaaggggttgtagttcgaaagagaagataaagaacctctacttaggattcataaccatcttaggaatcgccactgtgcttgtttctctcctcccggttttccaaagcccggagtttcgggtggtgggggcgtctctgttctttggaatgggattctctggcttagctccgattcttcacaagctgataatcttttgggaccaacctgaagcccttcacacgacaggttatgagattttgatgggtttgctttatgggttaggagctctggtttatgcaactaggatcccagagagatggatgccgggtaaattcgatatagcaggacatagccatcagttgtttcatgttctggttgttgctggtgcggtcacgcactatagagctgggctagtgtatcttaagtggagagatagtgaaggatgttgaagatgaagactgaagattagatggattctgtgatgttta

SEQ ID NO: 28083 - DNA, 1635 bp, Arabidopsis thaliana landsberg
ttttttttttttttttggaatgaaaattttttaaataaaatttaaagattttagagggtataagtagtggcttaccaccaatcaagtatctttttaattaaaaaaaaaactcgacttaaatataaaccaacccaccaaaattaatttttttaatagtttttactatataggctgagtataagatataaatataaaatcgattaatcatgcactctttatatgtcctttcgcgaccatggcatagcgtttggctgacgttacactttttcgaaatcttcaaatgtctgacagcattgcggaaaagattaaccacatcttgactcttctccaacataaaactataacagatttccaaaaacttttaccgtattggcttttatggcggatttggaaagtaagaaacaatgtagtgttcaacaacttcagagaaagcccgacgaataccgccctgagatcacaagctgaaacaagagattggttaaatgctacccaaagccaaaggcgagagaacgttcggattgggacatctacaacatcaaacacggcgtggcaacctccaccgatcacacatctgaaatgtaactttgatgcaggattcaatgtacaaagtttaaacgctacggcaggctggatcatcaggaatcatgaaggaaagccacaacattggggatctttaaagctagaccatacaagtacaccattagaagcagagacaaaagcgctcctcgcagccttgcaacaaacatgggtaaggggctacaaacaagtcgtcatggaaggtgattgccaaacactgataaatctagccaacggatcaacatctcacagttccattgccaaccttttagaggatatacatttttgggcttcaaaattttcaagtattcattttagctttgttcgtagacggggaaataagttagcacatgacttggccaagtttggttgtatttctacatgcttttattctgatattggtactctacctttttgacttgagtaacaactttgtaatgactctgtttaagtaaagaataacgtttgtcggaaaaaaaaacaaaattccagtgttatattattatacattttaattctccacacattaattgatgatatttgaattctaaatactaacgtacacaatgtttctaattaaattagcatttagaaagaaaaaaaaattcgatcttccacattcaattttacaatacaatttaactatctatttcatcataataaactcgagtttaattatacacacttcatcttaaatgataacagttttatatcaaaataatatttatatttatatgagatgaaatctatatcttagttaatattaaaataattaacaattaccaaacataactaactagaaaaacaaaatacgcaaaaatatttggaaaacaaacattgtataaaatacaaatttcaaatagcatttttattagttaatatccatactaaatgatttagaaccaaattaatacatgctaaaattaattgacccaaacaaatttgttaatttttgttttggttaagaaaaataaactatactttttttagatatagacatagtatatgtaaaattgtttgttatgtaattttttatatttctttaagagagaacaaaaa

SEQ ID NO: 28084 - DNA, 3521 bp, Arabidopsis thaliana landsberg
aatgttatacccgatcaacatagagaatccaattgacaaattttgtcaagtacttcaagtgatctaaatcattttataaatgcatgagtaatgcaatatctcaaaacaaaatgattacacaaatcattaatcatgggcctgagtaagatattaacccgtttactaaaagtgcttcaaacattattcacatggggtacttattcattctcctttaccaaagtgcgtcatgtgtcgcgtacgatatgtacgaccaatgcttatgatagctaatacaacttcgtaagtacgtataaaaagacttttaacaaagtaaaaaaaaagtacgtatacaaaaaacaacaagcactcgttgtagattttgcctctaggttcctggatccagcctttaatttgacttggtttcgactatgttccatgtaatatgctttggttgacttcaaatcaatgcatctattttggtataccgtatctatatcaattctcctttctttcttttgtatcatggggattataaaatgattgcattgggctgtatattactcacacattcaatataaattattatatacacttattctattaaaaaaataatactaaaaggctattctccaatgttattattttgtctttttaagcattatgaggctttatttgaatatatatcacatcgttttaaaaaatttaccatccacgacgcctaccacgaagtattgactccattcaaattacgattagcattatgcactttatgcgtaattctcagattaataccctattgtaattttattttttccttcataaaccgaaaatcagaaaattttggattataatttgtaatcatatggactggggataaaaagcgggtttaatctccttccaaagaaaattgaaccatagtatttctgttgtaaagagtcatgactcatgagtataaaagcataagcttatacatctaatctaatacgtgtccttaaaaagaaataaaacatccatccgagcaaaatagtgcattaccagttaccaaatcagttggacctaccgaattagatacaacattcaatgtctaatttattacaaaaatcctcacgtttattactaaaaaacataaaaatcaaatgaataaaaaatagcactcacacatcattatcgaccgacgtatcatcgccgttatcaacgacggtaaacacagcgcaacgccgttaactcatccgtctcgttccgataaacaaaacagttactataataaacttgacgacgtcaggtattataacgcttgtcggttttgtaaattgacgtaaatacccctacggccaaagtggcgcgtcaatcacagattgattaaaaacaatactccgtcatcttaatctctcatcatcactgactgtgattgaatttttttttttttttacaatctgagatctgaaagatatttctaaattctcattaaattcccccataaattttcaatctttgctgattttcccccaaatttctggagatagataaccttcgtttttcaggagtttctttctatatttcttcatcgatttcgttcagagtctttaaagagattcgtcgacgtattatcgtcggaaaaaagctatgagaatctatttctcatagctccagtaatgtgaaatcgagacaacgctttatcttcagaatttgctaatccatgggagattcaatcacattccggtagatttttttccagtttctggggaagtcaaaaatttctagggtttccgatttttgttttccttttccaaatgttctcgaatcagtttgttctcttcttctctcttctcctatgtctcccatttgttttcttctttgtagcgccacatgtgtttccttctcctcctggtgaatctttaatcccaatctccgatgagattgatgaccggagtttattcatcgccgctgctggatcaacctctctttctcatctctcatctggaaaccctaaccctaagctcaagattgcttttctattcctcaccaactccgatctccatttcgcgccaatctgggatcgattcttctctggtcattcgaaatctctctacaacgtctatgtccacgcagatccttttgtcaatgtcacaagacctgggaatggctctgtgtttgagaatgccttcattgcaaacgcgaaacgcaccgcaagagcttctccgactcttatctccgccacgcggcgcctcctcgctaccgctttccttgatgaccctgcgaacacttacttcgctgtgctctctcagtattgtattcctctccactcgttcaactatgtttatagctctctctttgaatcttcaatttttgataaatctgatccggatccgaatccgaatccgagaggtattagaatcttgtatcggagttttatggaactgatatctgatgagcctaggctttggaaacggtacactgctagaggaaggtatgctatgatgcctgaggttccgtttgagaaattcagagttggttcgcagttctttgttatgactagaagacatgctttgttaacaatcaaagatcggatcttgtggcgtaaattcaagctcccgtgttatcgttctgatgagtgttacccggaggagcattatttcccgacgctgttgaacatgaaggatccggatggttgcactgggtatacgttgacgcgagttaactggactgggactgtgaaaggacatccttatacttacaaaccaaaggaagttgtgccagagttgatccagagactccggcgatcgaatcactctagctcctactttttcgcccgcaaatttactccggattgcttgaagccgcttttggccattgcagattctgtgattttcagagattaagttatgcaggtaaggttttttcccaaagcctctactttgttactgactttcataattgtggtgtgtctatgtgttttggtctaggaactaaaccgagattgatagttttgatctaaagccatcaaaaatgaaaaatgtttttataagtagaacattggctaaggtggttacacagtaattggattttatagcttaatcatcaaactctggtttattagtgaagggctaaagaaaagcacttgaagtgttttttagactgatcaagaatgataagaatcaacttggattatacaaatctgccatgaaaaggatactgtactcctttcggctgcattgttttgttatattgtttgttgaagaagacgtggtgaatccaatttagtaatttagatcaaacaatcccgaacattacaacgggattgtacaaatgtgccataataagtgtaccttgctcttttctttatctgtttcattcctctgtcatacatcgttgaaaaagtcgtgttgaactgcattgtgttggtgttcacttgcttgggatctttaacaaaactgaacagatgctcactttcgctttgcttttgggtattgtcttttcagggtgagaaaacaaaagttttggtgaccggagaggttttatgtatgggttgaaaaacaaatgcc

SEQ ID NO: 28085 - DNA, 1389 bp, Arabidopsis thaliana landsberg
tgttctttgctcgtttagtcttaagatatcatacatagtgattgtgatagccaaacttatctaacagtgtctaagacaagtagcaatgagtcttgttttggtttcttagttgaagcaattccaagtgcaattgtttatttaccattgtctttgatgtgtgttttcaggtatttgaagtacttgacaaagaagtacctgaagaagcacaatgtaagggattggctcagagtgattgcagcaaacaaggaccgtaacctctatgagttgaggtacttcaacattgctgagaacgaaggagaggaggaagactaaacctcagaatccagtttggtttagaagtatactctattccatgtttctgttttttggtttctactcggtattcaatacaatttgtctttgcccttctgtcatttttgtcagatgttatttagttttgttcaagttaactcttgttggttatcttactttaagagctcatatggatctcgttctttcagattatcgttaaaaaagttggataatgatggaatgattggtttatgaggattaaagaactcgaacgttgaatcgaagataatctttcaatttaaaatatttttgcaggattacttcgattagaatctgttttccttcacaatttgggaaacttagttgaaaataatattctttcgacgcacattaggattgaataccttagccaaatatgattgtgtagttcttatctctgcctatataaacaaattctcgagaataacattccctatgagacctttttctctggcatataaaaaacgaaggaatggtaatgaacgctgaagatactcctccaattccatgttttttcgatctcttttcttgtcagagtggagatttggcccgtgtggtgccatctgccccaagaaacgaaagaggagttagtctcgacacttgaggaacacccaccctagcacacttgagaaacatgtcaagtgtaaataggggcataaagaatgcaaataatgtatcaccagcactgactctcaccacaggttgttatgaagtttctccaacttcgttttgttttcataagggtttttaaaggattatcaaagtggattcaattggcacttaaaagtttttttggatgctaaaaagcatatatgaggaactgctaaaataattatattcagaacattctttggtaattgaagatgggcactaacaaaacaaagtaaaaacatgttatgttttagctatccaccaataacaaattgtcatctttattactgttataaatgggcatatcaccctaaacaatggtaacgtaaacaaaccaacaaaaagtaaaccgaaaccagatcttgtaagcttaattcaatcatcagtttctctaatctgagactgttg

SEQ ID NO: 28086 - DNA, 649 bp, Arabidopsis thaliana landsberg
ttttggtcttcagtctaaacagagacacaatcgcggacagcttgctatggttaacacagcttgtatatagaggtgtctcagcatctgcaagctttgcaaggaactcgtcttctttcttgccgtcacgttctgcaatctcgcccaattgaaccatagcatcaaactcttcgtccaaatactctgcagcctgatacaactcaactacttcatcattccactgactgactttgctttcactttcaccaccagacaccaattctccatgatgataccagtcacaccgcctcttataagcctcatccattcctcttgtcacaagatgatcaacaactacacagcctgagtgacgatctatgttacgacaatcaatgcaaggacatacaatcatatcatctcccaaagccgcagccacataccgtacaaacttgatagctcctcttctcataagcaggatcagctctttgttgtagaagtagaaagagaaaaaaaaaaaaaagtaaactgcccgtaacccttactgaaacctaaggaatataattataattataattatattccttacctaccaagatgcacccaatccttggccaccattctatgtgctaaccgtaatataaacctttagtaacctaagcagcataccatattg

SEQ ID NO: 28087 - DNA, 1781 bp, Arabidopsis thaliana landsberg
tatattagtaggtgtcatgatgacttatatgttaattatttcagtaacaatgttatggaatgtgttgcaatcggaggtttcgcgattcaatttaatgaagaatggaaaagagcgaggggtgaacgaattgtatgagtattacagtggtggagaattcatagatcttcacgtaattctcttattcacaaaaaaatatatatgatctacgtaataaatttctataattttgattttgcttggaaaaaaaatcgcttatctttacaataacatagataattatataatggcaggacgaaatgttgtttgaaccgttggtaaatgtagccggttggatatcagtcttgatatgcctgaggttggagaatttctagagatgtatgtattattttgcatagttaactgctttatatatcttcaaaaaattctaattagaaagtgttgaacgtgtattttgtttacattgggatttagattggctgctgaggaagctaatgaggtaggttctaccgattcagattattgaaagtgtgtatggtgttgtcgtgtagtaaattgatgtgttgtttgccttgatcaattagtgatcaaaacaatgttcgtattattcgacctcttggttttggtttgtaacgtaaaaccaatgttctaaaataatctataactaatgttcgtattatcttataagtagtattttgacttatatgtttggttttgttaacaaacaaaatagtccgatgtctaaatattatatgacatatcattttcagacgggtaaatagatctaaatatagatgttattaagaagattcttcttcgaaaatttttggttgaatttcaaaaatatagatgttatcaagaagattcttctttgaaataacgagatgtgtcaagtcggcaacaacttagggtttccttggaatacacagccgcccataagctagctctatagcattcggcagcaaaattctcatatgctattggtttgtacaataccgcattcaaagcatgagaattgttggcttcaagacattttgtaaagaaatggtaatagatggagtgcgtcatggacagccacatgaaataacgagatgtgtcaagtcggtaacaacttagggtttctttggaatacacagccgcccataagctagctctatagcattcggcagtaaaattctcatatgctattggtttgtacaataccgcattcaaagcatgaggattgttggtttcaagacattttgtaaagaaatggtaatagatggagtgcttcatggaccaccacatgaaataacgagatgtgtcaagtcggcaacaacttagggtttccttggaatacacagtcgccttaaatatcggaccatccttcaccatattttttaaagcatcaacgccatcttcaacaacatatctaacaatttttagcaagtactgatgcctggatgtgaatttctgggctaacagcaacctgagggaaaacacaaacagaagcagacgattggtttttgtttatgttgaatatcaagattaggttacgctgaacaaccattttgacacctgaaagggatggtgcttcattcttgtcgaccttcgttaacttgagcatactttctatgctcaaatggaaatcgatggaatgtggtatggaagaaacttaaacgaatcgtagggtttgagtatctagagattattatggttacagtaattattttagtttcccggtttattagaagttgtaattgggaattattatttttcttatgtttcatatttttgattctggt

SEQ ID NO: 28088 - DNA, 844 bp, Arabidopsis thaliana landsberg
ataaagtgtcctggcaggtcatgcgcagtagtaataaggatgcgtcttaccccagacacaatttcatcgatagccgattctaaggtccagcctccagatccctattaagatccatctcagatgaaatcgtatctccctcttcaatataggattgtgctagcatatatagagctttcgcatgttgaaactcaatatctacacactggagacaaataaacatgagaagtcattcaatatatctaatagcaatatttccaagatcatgtacatgtcacattaagtaacgtgcatctcattttacaatatggcacacagaacatccgctggaagttataagtactcaagagtgaaaaattgcataacgaacacacaataaagtaagcctccaagtgtcattagagatgagtatacttattttttgtttattcaactatacctccgaacatagaatgatagtttccagaatattctttagttttagaatacaggatgcaccattcaaatagctatatactctcacagccatgacgggcttttcgtctccaccgtcataagtgccattttcgaaacagtgtgcagcctgtaagcatatattatcatgttccaaagtatacatgtccgggtttccgatggtatgttgtgtaaatttcaattatagcttttctggtgaatcaccttattatatttctttgctgctcgctcgtacttttgagttttgtatagcagattgccttcttctttctttctattttttgaaatttagagacataaataaactatttccatagctttgcattttactagacagaaattacacattcaaaggaaaattcgcaagggcagc

SEQ ID NO: 28089 - DNA, 1016 bp, Arabidopsis thaliana landsberg
gaggaggcccaataacttctgtttcactgaagtctattttatcaaaacccaattacaataaacaccaaaatatgtcaattttgtcgttaaatattttattcacctcgcgatatttgattcttttgtcgttactacttcgagatttaccaacacgaatattttaggatgtacataagaccgtgacaaattgccagcttaaactaacttgaactattcccaaaagtccaaaaaatcaaataaaaatagaaaaaataagcaaacagaatttatatacacttatatacttctctcctttctcgttgtttccgcacaaagcaaaaaaatctctgtaaaagcagaacgataatggagtcacaattatggaattggatcttacctcttttgatctcttctctcctcatctccttcgttgctttctatggattcttcgtcaaaccgaagcggaacggtctccgtcacgatcggaaaactgtttctaccgtcacctccgacgtcggatctgttaatattaccggagataccgttgctgatgtcattgttgttggagctggtgttgctggttctgctcttgcttatactcttggaaaggtcggtttctcgtctctttgatttgattgcttatggattcgaattaggtggtgatagttttgttgatttgattctggatttgaaaattttagagaatgagtgatgaagcatatgtagtactaattgtttctttttgtcaaagcgaattgtttcgattctctgattgtgtattgaatccagttctggtttcgtggaattgattgaatatgcatagttcaaatccagattttctgtaaacaatttttgtttcacacaatgcgcgagttcttgagattaataggatgaaacattgttatgtaggacccattgtgaaattgtcaaagcgaattttttcgagtcttcgatcgtgtattgaatccaactctagtttcgtggaactgatgcatagttcaaatccattatttctgaataaaacttgtttcacacac

SEQ ID NO: 28090 - DNA, 1610 bp, Arabidopsis thaliana landsberg
aacaaaataagtaaatctttttccaagggtgctttctcataaaaattaattggtacaaatatacttttgtttcgggtttctaacatcttactttatttaacttgaatcaggaattagaattacaaagttatcaataaacatatacatatccacccaatatttagatagaaaaaactaatcgaaaaagtaaaatatcaaagattttttcaaacagagatttattattattgtaattcatgaatcagaattagaatatctttcccatgtgttgtgtgctcattaaaaaaataatttgttttgggttttgaaacggtaacagatcaaataaaacaattaataaaaattgaaagatgtcacggccgcgagtcgttgaagcctaaaaaccaaccaaccccattgagcacttaagctctcaccaaaaccatgaatccttcttcttcttcttcttctcatcatcatcatcgtcagcgtctgggtcctcatcgccgacctcactctggattccgattctctcatcgccgttcctaggttcaccttcctcgtcgcttcttccggcgatgaaagcggctcttcataccggagacgccagagcttggaggtattagggttttcttttcggaatttctcattgattttgctatggcggaagagaatcgtaaggatcgaggtgtttcttctactgtttcgattccttctggtttgaaccggatcaaaactcggttagctctcgtcaggtcctaaacctgaagattcctccgataccgctcttaaacctccgttaatcggaatcagaagattattgttcctcgtggtcatggtagaaccactggctcttcgaaacaaggttttgattttaagattatgaacttttgtttttccctttgttcatctgatttatggttttttttttctcagtactaagttagaattcgttgtgctagatttatggtttgtatgatcaattaggatatcaaaaatttccacatgatcatagtaaaaaaaaaaattgttatctctgctacagaaagaagaaaatgagagatgtgcttatagattcatatattgtagttgataagttttgttgctggtgagtgttgttaattctctgtttcgtatatctactagagcgtaagggaacaaaattgtcaaggtggcttgcttcctataaacccaagtattcttgtcaccctccaaaatatgcttgctcgagtacaacgagtagtgaggtaaaatgtagttttgcttcggattttccatgaaaggacgggattggctttgaattaaccgtttttttttttggtggcaggagatcaagttaagaggcaagaactctggtaaagacgaagagaagatgattaagatatctgaaactaaccctccctgttcaaagtcaatgggtataaagagcttttcccatgaattaggaccaaggggtggtgttcaaactccctaccctcgtccgcacagctataacgatctgaaggtcctacaacaatcttaaagtttagaattttctttaattgagtttgaaaattgtcggaagatattgcttttcaaaattgatgaaactttctcaggggttgagatcttgttttcttaaaaaactgaaa

SEQ ID NO: 28091 - DNA, 1657 bp, Arabidopsis thaliana landsberg
tttttttgcggtaaatgtattaggcgttttatgaaatggcatataattaatgatatatctcataataaaggaaggaaataattttaattaaaatgtcaactctggtctatcgtatacacgtagataggttacgactgttccttttttattttgtctaatatcggcaacatgaatttacgcacacacactcacacacagacgatattttagcgtagtttcacattaacagccaccataagaccaataaaagatgagaatgccagaagatgagtcttacggatatatatgaacatattgactctttacgaattttcaaatatctctggcgtgtccaaaacacccaccaaattagtcccacgacctaatattataatagtaataaacattattatagcaataaaaaaaaactcaattacttcttgctaacacacacaaagccacaatataaaaccccctctcaacgtaccaaaaatttcaccacctccccataacgaaaaattcatttcacttttcctataacaattcaagattaagctatgggttatgaaaccaaatcgactttggacaccgagagatcgaccgcgccaggaaccgccaccacgacgaagagttgttcgatgactcaagttgtcctaagatttgttctgtttgcagccactttgacatcaatagtggtaatggttacaagtaaacagaccaagaatatattccttcctggaactcccattcgtattcctgctgcagagttcaccaactcaccggctcttatgtaagttcatcctaataattcattaattaatattttcttttattttctcgaatttgattgatcatctttagtaaatgtgactaagggccagagttcatatgtgatttgtatatctcatatatagtcaaactaagtagacaatataattatgggttgttgtgttgtttggagaagtaatagaggttgttttatcaaacacgggtcttaaaccatatcttaatcctaacttagaagaagtcatgtcaaattaggatagtgtaatacaatgatcgcttgatcggtcacatgtatggaccattgaaaatctggtcagagcgtggattttttcatgtatacaaaaatatatatttaattttgagaaaccaagaggattttggtcatgtatatggaaaagaggatgtagtatcacgtaaatgtttacacatatacttaacaagtaaaatttatacatacaaatcgccgatcttatatgaattgtttatttacgtgtgggagtagttggaatttcgaaacaaaggttgtggaaagtcaaaagtaagttggcgaactttagttaacgaaaaagactcaaaattatagtaaatgttcagtgataatgataaagcagcttctttctttcttttttgtcaacctattttaaaaaacatctttgtatcagatgatttaaatatcgtataaatcttttaatttatgtagtatttaattaactaaatccacttttttcgtttgctaatgtgtagatactttgtggtagcattatccgtggcatgcttttacagcattgtatctacatttgtcaccgtatctgctttcaagaagcattcctgctctgcggttctcttgctaaatcttgccattatggatgcggtaatttattctatctagctc

SEQ ID NO: 28092 - DNA, 1578 bp, Arabidopsis thaliana landsberg
  unsure (1)..(1578): unsure at all n locations
catatattcccaaaataggatcaaaattgatttacatagtgcatttaccttttcattaagataaaaagaatctctaatgcttacaaatttatttttaactgtattaatatgtaattctttcagctggggtcaaatgatctgatgcaacaagcacagatatttctgtacgccaacggcaaaaagaatcctccaactgccgttgattttgacagatctttgcttagagactttctctttaatcaaagccctccaaaggtaaattaaaaccgaaccaatcaatcttataccggggcacttcgatttgattactgaaccgatattttttttgtatcataggacctcgcattggcatcggtatccattagaccgatcccattcgcaccggtcagcgaaaaggttcacgtgtcggagaaaaactacggttctatccgacggttctacatcaaaaccatggaagattacgctgtaccggttcttctccaggaagcaatggtcaaattgaacccaccggaacaagtttttcagctcaaaggctccgatcacgcaccgttcttctctcggcctcagtccttgaacaaaatcctcgtcgagatatctcaaataccgttcaagaaatcatcctgatatttttgtaaaccggatacatgtaaaccaaaccggttctaggattcttgttacattttagagatttgtttttgaaagttgctctgacagtgagaagaacaaaacccaatttgggaaacttgttcttaatttttttatttatttttgtcatttattactatttaatttttcattttttttctaacaacattatatattatctatctggtaatttgattactggatttaaacaacagtaatttgccaaaaattcaatggacgttatgatagatagcgattactgtttcataatgtttctgttggaaatatctgttttggccttgtatatagaatatgaagttgagttgagtttgcatcatatatcgtcgtcgtcactggcattttgtcttttagaggaacaggaaatcgaatgggtcgtggagtgagcgtaggtggtgggcaagttctttagggtatctttttggtagcggagaagctccaaagccagccattaacaatgctcctgcaccatcatctgaaactctgcctataagtgctgatccttcaccaaaacatgnnnnnnnnnnnnnnnnnnntgttaccaagcaaatacctgctggtatcaataaatcctctacaaacaactacattcgagcagatggacagaacacaggcaacttccttacggtattgattaaataagattgttgtttaattttatcccctggatatgtcatttaccaaaagcaaaaaccttgtccacaactagcatatattttcaaaagcatctctgaagtttcctactttcctattgcggttattcatttgaaatagggaaatttgcttgatacatcggtgcgttaagatatgaaacaacgtcactcaagtttttgaatgagcgtttgctaggagtatcatttcttgtttcatataataatctaaagatcaacgttttggtgaccaaggccagttact

SEQ ID NO: 28093 - DNA, 5461 bp, Arabidopsis thaliana landsberg
gtgtacaacaaaatactaaaatgatcactagtattatcgttttcattaaaacgcaaatccatgtccgacttgcaacacacaccacaaaacatatacatatatatcaatctctcaggccagaggattattcaaatcattaatttgtcgaaatccatcacttgaaagtcgggttagcacgagcaatggtggaagaggaactgagcttcatctttgccttctttatgtactcagagaactgatctgatgatctccggccactactacctacgtgagagataggcacatggtggtgacgatgatcatgacgtgtctgatctgtttcatcacttgtctcccacgcatcctccttcatcatatcaccgacattcgtcatcgcccttatcttcagcttcgctttctttatatactcggtgaacctctcgtccgttttgatcgtagtatccactcgagcgatcaccggttccacctttgtaatgggtttggctgccctaggcctagccgatgtctctgcaaatttgacgcgaacagcctctgctggtgaagatttggtggagatgcgacgaacggttcggacaggactagtcactgctctgaagatcttctcgcacactctgttttcttgcttcttcttgctactactctgtgatgatgagttctttgccatggatgtcaccttgggaagtactaaaggtgatctgtgcagagaagatagtgacattaacgagctttttataatgcaaaatctatgtgattttatctttgttaattgcagaataacgtgtttcaacatgcaacaagcgaagaaattacaacttgttgaaaagaggaaagttggaaacttttacaagtttttcaaaaaaggaagagtgatgttagaaagggatcggattctgattccactatgttttctttctttctttcttcttcgttgtttttgttttggattgttacgttcctgtcaggatttgagaatcatgcatcagctgtcactcctctcaggagggggagattatatctacttgtaacatactaatcttccaataaataagcacttcacatattattaaaatacagtagattctcataattaggccattttccataagcttttgtttacttatttcaatccactagtatgcttttcacattattcttttcctgcaatttagcatgaatcatgtatgcaatttagcatgaatcatatatatgaaacgggggtttactaaaactctatacataaatttctaaaactctaacccactccaacccggttttttctgttcgggtatcgggtccggtttttttttcgcaggccctaattaagacattcaagaaaacaagaagaagcataagaagaggcctaaatgcccagagaattaaacaaatgggcctttaacaatcagatctcaaaaagctaaagccttaatatataaacaaacatcaatctctcgccgtcaaaggttacatctatcgccgccgctgagaccgccacttaaggccgtctcctacgcaatctccgaaaccaaaaccaccaacatcgcctggtaagctcgattttttaatcatttcgatctcatatgatgtcgatctgttcaatcttgcgaattcgatctttattttgttctgagatttagggtttcacgaatttgtgttctaggttttctggcttaatcattcttattgttaactgttctgattggttcttatgcttttggttacacaaagatctcgacttttttgttgactctgtatgcaaatttgtcaaaagtcaaaacgttgttacagaaactctctttcgtgcttgtgtttatgtatgaacaatagcttcgctattgggtttgttgatttcaccacacttgattaaatatgtatattctattgaaaatgtggtcaatcttggcaataaaaaccgtcattttcatgtgtcttagctctagtagcaccttttgtttagagatcctgagtttaaagaagcagtagctagcatctttggtatagtaaattgtttccctgacaaattgtatatcatttggttataactagattagtgaaatttaatggatcagattatgtagcattgttttaattttgtatggagagaactggtggtgggcttatttccaaaattttcctttgattaagtcaagaccctttattttgagaagtgagagagaggattgtctgagtattgtcgctttctcaaaatctttccggggctaagcagagaaaagctgatagttaagcttaggaatgtgatcttggtcttttaagaatcttgaaactagtgggtaacttggatccatcgaatttgttttccgtaggtgagtgttctttagcctatttctgagtctgaattatacagtgtagacatgaaaataggtttttatgtgatggactcttttgttttatggtttaatggatatgttgaattttgtttttcccatgagtctcttataaagttggaatttgattcatggaatcttggatccagattacttcgaatatataaatgaaagaacacttagatgtatcaaagggaacttaagcgtgtgtactgtttagtgtctcacaacttggaatttggattagcgctttcatgttttggagtttgatttatattcttgatgtttggatttggatagtaccttggtccattgaactatgtatcataataatgctttggatatggatatcgttttgatgacttacttgataactgctcatacttaaaaaacatttgttctagaaatctagattctcgtctatgagtgtttatatgttgaattcatgtcgaagtcatagtttagagatctcattgagcatttccccttcggaggagtgaggagtcttgttttggggattctttttagggctagacctgtgaggaccttcattaattgagttcgttttattttgtacccaaatgtgttttttcggcttatcccattggcattgaaaaagttattgtttacattaaaatgttatttttttctttcattgagattaccttgctagtcattggatttattggttttaaacttttaatagctgaacaaaaggggttttattctaatgtttacttaacactagtctggtcataaacaagtataaattttgggtttaagttatactttttttattggaaatacatatcaaattagggcgtttcatagatagttgatatattttcttcacttgcatgtagttatgttcggtattatcgagaacttactgtgtttgaagttcctcggcaggaaaatcctgtagagtttgagccaatgttgtcggtgtgaacctcaaaagttgtgggtgtttttcccgccgataaagctgctggcaagatgggttggggttgggtagaatggtgtgtatggcaaggtaaggatgcttcacttacaaaagaatcatttagaaccgtttctttctttgggatctaaatgtgtttttttcggcttatcccattggctttgaaaaagttctctagtttgtatctttgtactaggagcattcttaccattctttaaacattgggcagtgaaagatattttcttggattagtattctgcttcttgtggttttgtgtgacactcctagactatgttatttcctgttaacactgtctttgtaggacaggatgtgagaaatatgctgtttctgcaggataccctgaatttaccagtttaccggaatcatatcagaaacataaactcttatgttacaaaattgtaatggattagttgatgcgcattctgtgttttttcagttgtaaatttgcagaattgttgaatgttgattgctcgagaagagtcttgtgagtgaattctatttcttaatatatctgattatcgtttttgttgttgatttaattagcagatggggagaactaaggagcaggcaacattaactcggtatccaccctgtcctaggaatcctgctaaattcaatgatataaacaaagcactccaggaaaaaggatatggtaaggctctgaaaagaaaaccttggacgggtgtgacatgccctgtctgtcttgaggttcctcacaactcggtcgtcctcctttgttcatcttaccacaaaggatgccgtccgtacatgtgtgccacgggaaaccgtttctcaaattgtctagagcagtacaaaaaggcatatgccaaggatgagaaaagtgacaaaccgccagagctattgtgcccgctttgtaggggtcaggtgaaaggctggaccgttgtggaaaaggaacgtaagtatctgaattctaagaaaaggtcatgcatgaacgacgagtgtttgttttatggaagctatagacagctcaagaagcatgttaaggagaaccatccgagagccaagccaagagccatagaccctgtgctggaggcgaaatggaagaagcttgaggttgagagggagaggagtgatgtaatcagcacagtcatgtcgtcaacacctggggctatggtatttggagactatgtgattgagccatacaatggttatgatcatcaagatgacagtgacgattacagtgattcgtcggatgacgaaatggaaggtggggtattcgagcttggagcattcgacctgggccgtcttcaaccgcgttcggctgccatctcaagccggggaattcgcggtatgatcataaggaaccggtgggctcgaagcagaggtgcgagcagaaggcgacaaacataagattgatgattggaagcttggaaggcagatgattctacaccgtctgaccaagttaacctccgaactctatatatcggcagaggggaaggcgagtgggaacaaaacagagggttgttgattaaagtttttagttagcggtttaggttttcaggtttggaatatttgagttgtttgttccctcgacctttgatttaaagtgttcaaacgtttcatttgctacttttatttgatttgaaaatatctccattggcttcttttcttaatttctttagcatggtttcaaactggtgaccactaaaatacattcttaacaacgaacactaaactccggtcgatttctagtgcttcacaaacacaaaccccatgttttggtgaccctaaccatactatacataaaaacgaaatgaaggtaaaccagaatctactcttgtttaggtcgacaataaagaaaatttcaactagttttgctcgtactagttcctccagctgccgtattaacctgtttcgagagataggcttcataaatttcaacgataagacgaggatccttctccacgagctccatatattcctctcttttagtaagtttatccatattttctacgatctgcgacaacgcagcatcgagaacatgtttcgcgttgtgctggtgtgcaaaggcataggtcatgagagagttatccggactaagtatggtaaccaaaaacctctcacaataactcttgagatgtttcacttggtatttctctgacaagaccaaaag

SEQ ID NO: 28094 - DNA, 2007 bp, Arabidopsis thaliana landsberg
attaattaatgtagttatataacttattttagtaggacgccatattttatagatattaaattggatcacgaggtttcacttgcatatgagatttgacattaatgatattgagaaagttaatgttacgtggcccatttttaaatctggatgagctcatttcacatgctttattataacaaagatttccaaagtcggtcgatatttatttaagcttatgatgaacttactagatttgagttcccgtggtccaacaatagagttcatgtatattccttgtacatacatatacaagacaaatctttttagtcgtgtaagtactagagctagcatctacacagaaatttaaacacatttgccgctagaaaaaaaacaatatcagttttagtattcattataacgtaatttctgacccacaacaatgcagctatatcgaactctatggaactatttactccacacatagcggaaagtcggggaagatataattttcttaccaaccctatctactctctatccaaattacattacaaagatgaatttaaggttgaacatcgtatagtacgaagttgtaagcaataatgttaacttcaacatcctttaccaaaccaaaatttaaaataaaaaccattgatagattataactaatcacatcctgtatgggctaaaagcctaaaagattacgattccacatgttttttgattgccttagttatgttataattgggcttaacataactgggcctgaacccattaaacactaagaggtccgtacaaaaaaggattcgcggcaatattgtcaagtgtcaactaccctcggaacgacttcttcactaaaagttaaaacttaaaaccctaaatcatttttttctggtgaattgaaatagaattctatttcaaggaattggagaagaagaagcaagaattgacacgggataatctggaattgaaggaggagggtgagattactgagagagattgaggagatgagaagtctggaagtggagatgaagcagaggtgtggagagatggagattgagatgaagcaaatagaagaagagaagaaggttttagattctatatcgacgggagctgtggagcttgagagtgagtattcaggatgatcttatcactgcgttgagcggcgagatgagacggtgacagaggtggctgaattgaagaaatggttaatggagaaaggtgatagctttgagagttatgagaaggaagtagagagtttgacgaaagtgagaagtgatattgagaagaggtttaggggaattgcaagtctgagaggaagctttgagtgaatggagaagaaattgaagaaggttgaagaagctaagaaaacgctagctttgttgaacgagaggatcttggagcctactaatggagtcagagctacaaaggatgttgcttgcgatggttatggaaagatttacttggaaggagaattacagtggcagtggttgctgctggttagtggcagcgacattgttcggatgctattcaaaacgaatgtgattcgataatatggagcataggattagctgaagaccataacgttttgcagtttcacagtcatataggtgcccaagattttgcttggctttggtttcgactttgtgatgtttttggttgtttttgtttgtttaaggtaattggttatcctcgcttttaggctaaagatgtgtagttgcttttcttttcaaatggtctgtagtctcctgttaactaaattacaaagagaaacatttttctaaaagtttgcttgacagtggttcattccatagatcctaaagagaaagtgaatatgagctacttactactataaaccattttgtgttggttactagaacaacatgtcacgtctatatccttactgctaaaatcccttcattggaggtagattttcctggtatctgcaatatatggacccccagcccccacaagctcgaggagtccccagcaaaaactccataaaattggttgcagcaccggttgcttccc

SEQ ID NO: 28095 - DNA, 1651 bp, Arabidopsis thaliana landsberg
  unsure (1)..(1651): unsure at all n locations
ggcttgggcctattttagattaaaagcccaatttctaagataccgatgtagtataagtaacataaacaatggattaggttctgatttttgtttgggcctaaaatgttactgcatacatgagatacgggcccaatgacacaagtacacaactcatctaggcatatatgaaaccgaatcggttaatttctacttgagtcattgtgagagctgacattaactgtaacaccaaacaaggacaaaacattgaaacaacgaggcagaaacttgagctcatgaccaaacccttacactgatattatccaaaataacaatttgttggagagatccccgagtaatggaccaaagaagctttcaggcttcataatgagtaactaccatcggtattcatcttctccggttctccattccgccttagtcttgtccaacaacttcacacaaaacatggaaaatgattctcttcagagtcatgcgttgatttattaacacttgtttctattagatgcttttcagcagcatatattatccaannnnnnnnnnnnnnnnnnnnnnnnnnnnctaagatgaatgatctctcctaaaccaagctcatagatgagttgagcacatatgatgacttaccgcggagcgttctatcagagtaatatgcactcgttgcttaaacggcttcagaccattactttacatagattatgtcttcgtcggggtcatccacttcccaatcttgatcatcttctgttgagtcagatggttctgttttcccttcaccgcttcctttctcagcttttattttgtccagtattgcaattacctgaaacagtctccaattcagtttctgctcatagtgataaccgtacatggtattacaattgcttgactgactatatcagcatccaccaagttccggtttctaatatagcacagaagaggtgattttcagagaagacaatcaacaagatcaactagttcatgactcaacactcatgactatgaatgcaagatagagattttgaccgcatcattgagacattcatttactaactgaagactaaatttcattaaacgctagtttactttaagtgaaagatatattagaatcccttaccctgcttcctctttccatggcttcatcctcaataaacctgacctcaggcgtcaatctcaacttcattcgcttcccaagctcactcctaacgtacttagctttcgatttcaaccccgcaattgcaacgtctttccctctatcatctccaaacacggatacatatactttaaccacctacaaccccaaaagaaaccattttcagcttctaacattactctgaagtaataatactctcaaaccagcggctaggtccagcacacaaatcataaaacacataatacgaattgcttctgtcaaaaactgataaaagaatcaggattcaatccgtgcaagccacagtatagcataagtttaatcaaaagatcaagttaagcaattctggaatcaaatatttcgaaagaccctaaatttccactccagctgcataaatagagcaagacccacatgaatacattacacaagagtttccaattagggtttctcatcacctgcaaatcattagagacttcaacatcgctaatggtggtgacagaagagacgcagcggtca

SEQ ID NO: 28096 - DNA, 1254 bp, Arabidopsis thaliana landsberg
acttccaccatggttggccgcgtcttagtgctgctaaatgaggtactatcatttatcgtcgctgaatgatttataacatcttccgtacttgagatcttacatatgaaatcagagttgaagttacctctatattttaaattttgtgttctttctaacttgatagggtctgcttccatcgaatatccttgctatgactttcactacagcagcaacttctgagatgagagaacgcataggaaaatctgctggaaagaaagcagcgaaagacataacaatcagtacattccattcattttccttgcaactttgtcggatgcatgcagacaagtgagaatatgatttgtgaatctcttggtattatggtggctaatctcaagtctaaatgtaggtagaagacattaaatgatttttcctcaccactggaaaatgtcacttatatgttgttaaattggagttacagtgccaaactgacaagaaatggaagtaattcttgaaaacaagattagtttctaaattctattcttgatagtataactcttaggtgattttacttttttttttttttctttcttgtttacatgtgttcgtttgaagttgttagttgcatatcacttgttaacatctttaaagttatagatttatgggattcatttaccctatacctttcctactgtcacaggttacaacgtacatctgagttctcagtgtatgggcatgggcaacaaagaagagcgataatagaagcagtgcgtttatatgaggaggaaaagaagaatggaagcaaaacttctgttccatgcgagtctggagaaggtctaaatggtgcaggagcaggagcagtaagtcctgaatatgccaaggatctatcaaaaaaatggcagaaatttgtgacccaggttgccaataatgatatagttttactttatgttctattaatagcgagtatatcctgtctttcacatataatctggctcttaaaagtagttgtttttaacttgtttccccattttagggaaaagcttccggtaagagtccagagcagtgtcgtaagatgggcaatgagataggagtaagttagctaatttgttttttcaggcatctctactatgaattaattcatatgatatgattctgtactggtgctgatacaggctaaaattcttggaaactacaacgatatcctaaaagcttgcgatgctctggactatcatgatttgatcagttgttcggtcacactcctctctgactttcctg

SEQ ID NO: 28097 - DNA, 3379 bp, Arabidopsis thaliana landsberg
tttaaaggaaggccatcaactatttgctctttaattatgtcatataacactaaggtaatgagtcctataattcattaaatataacctgctaaagcaaaaacactaaggaaccataatattttattagtttatcgattctttttagttgttaaaattttggagaaacatgagttaacacattttaatagaaacaataaattaattatctaaatgttattattattgtagtttttgacttgaaaatttaatatttagaaaataaacaattcttttgaacctgcaatgtaattcctatttttttcattaggtttatctcgggttagagataactacggaattaacaagtacacataataattaaattagaaatcaatgtgaataattaaattcgtaggtcgcataacatcgcttccatctcttataaccctagtttttttggaagcaagttatcatcaaactgtctatttttagtatgatgaagaagagaaacatagtagatctttctgaagatttggtagtggatatactctctagggttccggtatctttgggctggccctgagcacaacaaagtaaaatatttgctgtggcccaaaatttgagtggcccattttgaaacaaaaaatttcatatgtataattcaaaaaaaaaaaaattaagtggcccattttatactttgagtttcataaaaaaaaaacataaagcccaaagtaatttttttccctaataaatccaactccacgaggcttcatctttctctgctccattacacaacacaaaccctttcatcatcgctttctaatcttcaagactccaacgacacggcgacatcaccatgacaagtatatctgattctttttaaaaaatatctgttacttgtagaatttgagtttatgttaaagttacagtagaatttgacagaaaaatagttcttcctatatttatctgattgtttcggattaaaaatttcaggggttccaattcgaaaatcaaattgtaaatccggagcccaaaaagcaagagagaagaaaagaagagacaaaatgacgaagtctttggctgattctatgttgaggtatgtgaaaagatcaacacctctcaaaccaaatgagaatcctacgagtgttgagaatgacaaagcagaagaaatttgtgaagatactgatgtgaatatgaataccataccagaatgtgtttacagtggagaaaaaaatgagcttttggaaattacggatccagcaaactggaaaaatattgatagggaattaagagattttctagtcgaaaaaggtcctatgaaaagggtacatgagaactatgctttcccgaaaactgctggtattagaagacatttttctcacaggtattacaaaagagagatgaaaaatggagataagcaagacagaaattggttattgtactcaaaagtaattattgcttttgctgcaagttatttggtcgagaccaagacgcgatgcagttgtcaagcaccgggtttaatgattggaggaatattaggataagacttagccaacatgagactagtcatcggcatattgtttgcatgagtaaatggatggaactagagttgagactacgaaagcatctgaccattgataagtgtcttcaaaaagaccttaacctagagaaaaacccttggagagaagttctgttgagaatattttcattggtaaaaaaccttgcaaaacagaatttggctttccgtggagaaaatgagaagattggtcagaaaaacaatggtaactttctgagttttattgaatcgttcggcgactttgatccagtcatacgagagcatatcaaacgagttaaagaaggtgaaactcactatcattggctaagccataaaatccaaaatgagttgattgttatgttaggatctcaggtccaacttatgattattaagaaaattcaagaggcgaaatacttttctgttattctcgactgcactccggataagagtcataaagaacagatgagtctcattatcagatgtgtggatgtctccatggcttcgacacaagtttcagaattttttctaacgtttgttgaagtttcagataaatccggggaaggactctttgagctactttgtgatactttggttgctctcaatttgaaaatcgatgatgtgagaggacaaggctatgataatggatccaatatgaaaggaaaacacaaaagagtacaaaagtgattgcttgatatcaattgagtagcattttatacgtcatgtggttgccacagtcttaatttggcacttgctgatatgaccaaatcatcttgaaaagcgatttcattctttggaattatccaacgcatctattgcttgttttcatcctctacacctaggtgagaactcctaaagcgatggtaggaggtctcacacttaagccagtatcagagactcgttgggaaagtcgcgttgaaagtgttcgagcaattcgttttcaggcccaaaaataagagatgcattggactacttggctgaaaattgtgatgacccgaaagctcgcagcgatgcagactgccttgctacaagtgagacacacggaattggtggatttgagttcttgtttggtatggttatttggtacaatcttctttttaccatgaacacagtaagtaaggcgctacagtcagagaatattgatattgaacttgcttttgttcaactgaaagggttagtctcttatctacaaaattacagagaaactggttttcaagaagctaaagcagaagctacattaattgctgaatctatggatatcgaaccaaaatttcctgtgaaaagaaagcgcatcattaaaaggaaaaggcattttgatgaagagatggagaatgatgttgaaactgaattgcttagcgaggaagagaactttaaagtcgattttttccttcgaatcctagatcaagctatagaatatttgcaggtgaggtttgagcaatttgaagagtatggaagaatttttagatttttgtttgatctaaggaagctcaaatctgcaagtgatgatggcttaaaggcagcatgtataaaccttgaaacttctcttaaacatggagatagttcagacgttgatgggaatcatttattcttagagctgaaagttttaaaagaacttttaccgaccgagatcacgaaagctattgaagtgttaaactttttgaaaaagtttgaaggttgttatccaaatacatggattgcgtttagagtgatgctaacagttccagtttcagtcgcctcagccgaaagaagtttttccaagctaaagttgataaagtcatacttaggatcaacaatgtcagaagagagattgaatgccttggcgatattgtcaattgaaagagatttagt

SEQ ID NO: 28098 - DNA, 1491 bp, Arabidopsis thaliana landsberg
  unsure (1)..(1491): unsure at all n locations
aaacttagtattcaacactggactttatagtagtataccaggaacagtaagaatgtggatacaatatcttcaactgaccaaatggttcatctgatttcaaagaatattatgtaaaagcaggattctttatttgttttaatataccgtatcataccctgatgggtgttgatcatctcctagacctttttcaatgatggttgtggccccaagatctgataatcttttgtctagcttctttgctacaaactaaagccatcagaaagagaatcatgtcatgaatttgtgccacagaagagtaaatcagacaaatctcacgatttctggcagtgaggattcttttacaaaaataaaaaaccctgaatagaaaggagaagggtaagtttgctaatatcattcttccttagtaaagcctagttttttcttctcacattgattaaaacatcaaaaaaaatctggaggaacttgggaatagcccaacatggggaatgttaaaacaaagcgaaactgaatataaatcatgtcatgaatttgtgccacagagaataaatcatcccacgatttctggcaatgaggannnnacaacaaaaaagaaaaacccctgaatagaaagcaaagtttgctaatatcattcctccttagtaaagcctagttttttcttctcnnnttgatgaatagattaaaacaaaactggacatacttgggaataacgaaacatgtggaatgttaaaacaaagtgaaactgaatataaagaggcagaagaacttacgttgtacttctggtaaccagaatcacctagtccaaacactgcatagcgaacttgttgcaaccaatagtttcccagatttctttgaagaacaaacctccaaaatgccttgaatgattgntatgccaatgaacaataataagctacgattaattaaaagcgttttacaggaataaactaattggtaacaaatttcaggactttaaacgaaccttaaaggaatcaggagagtctccttgccctgtagtggagacaacaaaaacaacagcctcctcatgatgaggtaaggaactctgcagaaaacaacacatgataaaaaggaaaacacttttatgtcgagagtttgcgctaacagctgattattggcgaggggaaaacatatcagcaatcaacaatttttgcaattgaaaggggtttgcttccaaaacatattagcaatcatcatataaaaacgaagcaaaccatcttccaaaacaaagtaacgagcttttaaaatcaaattggttttactacacacataccgtgtcgaattcgtcggtggagacgacagaagctggcagtccacggcgttctgcttcgcggccaatacgctccgccgcatcaagagcgtttccggtctgagaggcatacaacacaagcagcttcctttgtttttctcccatcgcgccaatagcaccaccgtccgaataaagaatacatgacaactggatccggtctgatgattaaa

SEQ ID NO: 28099 - DNA, 1667 bp, Arabidopsis thaliana landsberg
gggctgtctttggatgaatatgcctctattcttatctgttatgttagattagattgacccatttgcactaaataccaaaatcgtacaagctaataatctggtacctcatgctcatctgacatgcatttaccagagaggacaatttggagttgagataatatttatctcttgggataatgattcatgggcaaaaacgtaattgtaagttcaagatagatcacgtagatattaatctaaaggtttatatatgttgcaacttcatcacacaatggagagaaatatctacagcttcaaaaatatctctggttgtgtacaacaggaaatactatgtctactcttaggtcgaaacaacaaaactatctacacagctttgccttcttccacaaggtaacaattagctaaactcaaatctctcagttcatgaatatatatctatatcagtgtctgattattgttgcatgctctccctgaagttcatagctctagacatcgctgcagggtttgcttgtagactgtgagaagtttcggagaccaagctacttctgttgctgttaccctttgtgtcaaatccattgaacaaactgaatccttgcgtttttttctcgggttttgtcgggaacttagaccacaccgcgctcttactagcttcgatattcattttaagagattctggaaccaatcttgctcttgtagtagttattgttgtattagtgtcattgattcttccttcagtttgatctcttgaccgttttcctaaacatgaggaagtctctgatgtagggtatatcggaaccgtgcatccccaatagaaggggacagggtagaaactagctttaggacccgttggactccattggtaaggccaaggagaagaattattaggtaacattacttgcggaggaagaaacccttggtagcttttatgttcttgagaaactgaatcagcacttatctttgctgtatcacctgactgatgcttaccagtctctgtaaccgaagactccgaagaaccgaaactgaggatcgtccccgagttattattatcacaatcctcagaagtgacttgcaagtaatggtttgaagaaggccatcctttgttcttgcgacgacctgagccaacgggaacgttcctcatagatccaccagctgtccaatacctctgacagttcctgcagaagtaacgtggctggttcacgttgtagttgttgtaataacagaatttggtgtttgcgctttcacatctaggacatggaacaagcttgtccggtttcttgagagccgttgatttctctcctgatgtagtacttgtggtagttgttgttgtgatctcgctctgttgatcacagttgttcttggaacttcttggggatgaaatctcagatactgcttttggtggttcgtttagatcggataatatatatggatctttgaatttgttactctcttgctcactttttttaaccggaacctgaattttttgtagaattttgatttgaattagcaaagagatataaacagtcaagcaaacattaatttttttagcctttatcactcataacagagagagaaagtctcatattttagggttaaaaattcagatcgagatcgacccattcgtagatttccatagcccagaaacttttatatattcatctcaaaatcataaa

SEQ ID NO: 28100 - DNA, 821 bp, Arabidopsis thaliana landsberg
ctatatttaatttgatagttgtgtcttcttgtgttataggttcttcttagaggacctaagaattcacgtgaagcagtgaagcatttcggacctgctcctggtgtgccacacagtcactccaagccatatgttcgggccaagggaaggaagttcgagaaggccagaggaaagaggaagagtcgtggattcaaggtttaagaaagttgttgccgccattggacttgattctggagtactgttgcttcttggttgcttttgtaatcggatttttgttagggaactctgttttttctttcctctttcagacatgctactaagtttgcttctactggattcatcgtgtggttattacacttgcagctttactatgttaaacttaattcattatctttctactaaggtcttgacatctcaagacatcatagaactttcttggtgtttagcattctttcattatttctgtcattgtttcacttcttttacgttgctaaaagtagttaggatgaattggaataatgtgatagactgaatcagctagctgtaggtgctctactgcgattgctttcattggacctaatgggtcttctgggttctgtggtcaaatgggcctgtgttgtcttttatccctcctattatgttgttgggccctagcatgcgttctgccaatgtttcacttggttatttctggttcatttagtttgcttataaaatcattgtgaaatctataaaaaaaattggttttcttttgaaatcttaaatccagccttctaactattttcgccagaatcgattgttcctacacacgttgagcttcaaatccc

SEQ ID NO: 28101 - DNA, 1622 bp, Arabidopsis thaliana landsberg
tttttatttaataatttgaaattacttgtagaatcagatcaagccgttaaaagttccataccagtaaaagagtagagactaaactttaaaatccgggcaaaagggctatttccaagattatttaatcacctttctatgttacttggtccctaacaattatgtcttgcttgttctcttcaaatgctgaatgggcatgcacactaagttaacagctgaacttttaaagaatgggcatgcacactaaatattggttcgagtgacacttgagagaagactatataaaatgctctggtccttggtctagagagatgtacggacctaaatccaaaacctcttaatcatcaaaaaaacggcatcacatttttgatgctcttactttgtcaccgtgttctgaaattacttcagccctggctggctggattccacaacatgtaatgtctagagcaaaaacaatagtaacaaacgatgatgaaagaaaaaaaaaagtacctagaaacacaacatgcacgaacgacttaagcttgtttgtaacacaaggttcttcctccgagaaacatttgagagatttctttatcttttccatatctagagtataaaaaaaaacagagtaaatgaattataaataaattggttaaaaccttcttttttttaggcaaatggtaaaaccaaaatcataaattaacgaatacctgttcattaataaaatacaatgattactgaaaatgtgtggtagcagagatttcaaaaccctgagattttctatatcaataacgcaacacttgtaaacattgacggtaacaaacctgagattttctacaaagatcgcatccctgttttcgtctcaaacacaaaattatatatcatcagagaagaatggaggaaacaagttacgaagcacttcccgacgatcttcaaacagagattctgtcacggttgcctctaaaatcattggtgcaatgcatctgcgtctcaaaaaagttggcatctttaatccgcacaaaagcattcagagatctttacttgcgccggtcgttgacgaggcctcgattgttgttcatcaacttcccgttcggacgtgatgtgttgattcactctgtttatcaagaaaaggagccattgtgttcttctggtcatcaacggatacttatttctctcgatccaagatgtgagatttctcaacccattctaggtctgatctgtattcaagaaaataccaaggttgtgattttcaatccgggcacgaaaaagtctgtggctttaccagagatccaagcgcataagaacgttgtcgtagcaagattctttggatatgatgaatctacggatgtattcaaggtgttatgtataatacagttcggagatggtaagcgatctaaggactatcaggtattcacgatgaaggtggaatcgggtgaagaatctaattcttggagagtgatcacatgtaagcatgatcattcaccagttactgaaggactatgtaaaggaggtttcttgtactatggagctgatgagtccaatactgacaaagatgtggtagtgagcttcaacgtgagttctgaagagtttagcgtcattgaattgcctgaggaagtcaagattgatcattcgtggagattggt

SEQ ID NO: 28102 - DNA, 1891 bp, Arabidopsis thaliana landsberg
  unsure (1)..(1891): unsure at all n locations
tggctttctgaggtcgaaattagggtatgtgaagcccatgatatcctctcgcaaagcgatgaagaaatagataatttatgttgtggccaatattggtctaagagatgtaaatatagctacgactatagtaaaagtgtaatcaacaagttgcaagatgttgagaatcttctatctaaaggcgtttttgannnnnnnnnnnnnnnnnnnnctataccaaaggtggaggaaaggcttttccaccaggagatagttggtcaagaggcaattgttgaatcaacatggaatagtatgatggaagtgggagttgggcttttgggtatatatggtatggggggagtaggcaagaccaccctcctctctcaaatcaacaacaagttccgcacagtaagcaacgattttgacattgcaatatgggttgtagtgtctaaaaacccaactgttaagaggattcaagaagacattggaaaaagactagatctctacaacgagggatgggaacaaaaaacagaaaatgagatagcatcaaccataaagaggtctttagagaataagaagtatatgctattgttggatgatatgtggacgaaggtggatttagcaaacattggaattccggttcctaaaagaaatggaagtaaaatagcattcacaagtcgttctaatgaagtttgcgggaaaatgggggtagataaggagatagaggtaacatgtttgatgtgggatgatgcctgggatttgttcacgaggaacatgaaagagacattggaaagtcatccaaagattcccgaagttgcaaaatcaatagcaagaaagtgcaatggcttgccacttgctctcaatgtcattggcgagaccatggctcgcaagaagtccatcgaagagtggcatgacgctgttggtgttttctcaggtatagaagcggatattctttccattttgaaatttagctacgatgacttaaagtgtgagaagaccaagtcctgcttcctttttagtgccttgtttcctgaagactatgaaataggaaaagatgacttgatagagtactgggtaggccagggtattatacttggttctaaaggtataaattataagggttatacaatcatcggcactctcactcgtgcatatttactgaaggagagtgaaaccaaagaaaaagtaaagatgcatgatgtggttcgcgaaatggctctnnnnnnnnnnnnnnnnnnnnnnnnnnnnaaacaaaagaatgttcttgttgtggaagccaatgctcaactaagagacattccaaagattgaggaccagaaagctgtgaggaggatgtccttgatatacaatcagatcgaggaggcatgcgaaagtcttcactgtcccaagctcgaaaccttactccttcgagataacagattaaggaagatctcacgtgaatttttgtcgcatgtgccgatccttatggtattagatctttctttgaatccaaacctcatagagttgcccagcttttcacacctttactctttacggtatctcaatctgtcatgcactgggataacgagccttccagatgatttgtacgcactgagcaacctgttatacttgaatttggagcatacgtacatgctgaaacgtatctatgagatacattatttaccgaatttggaagttctgaaattgtatgcttctggaatagatataagtgacaagctagtgaggcagatacaagccatgaagcatttatatctgttaactataaccttgagaaactcctctggtttggaaatttttcttggggatacgaggttcagcagctacaccgaaggtttaactctcgataagcagtcatattatcagtcactcaaagtaccacttgcgacgatttcgagtagtcgcttcctcgaaattc

SEQ ID NO: 28103 - DNA, 1181 bp, Arabidopsis thaliana landsberg
aaaaaaaaaattaaagtgttaaaaaaaaaaaaaaacacgaagagccaagtaacctttccattcatacgcctcaaacagagacgacagcgtttgaagtagaagacaaaggacagtgcaagaatctcttatcaacatgagaaaaccatcaagcaaaaaaaagaaacacaaaagctatctccgaggttagagcaatggcagctgtgaactgccatttcttccagctatcacgacatctcaaaccttctaggccttctttttcctgctctgcttctcaaccttcacaaaacaacattaaggtaatcacatcaccatcaacatcatcagaatcaggagtttccagacaatgcagctttgatatgataatgcttctaatttccctattaggtaatcataaatggagctgcaaaggaaataggtagagcggctgtggtggctgtgactaaggctaggggaatggagttagctggtgctgtcgataatcattttgttggcgaagatattggcttggtgacttagcttaaaacccatctgtatactattccaactggttggtttatctattgattgactccctaactctaatgttcttgcatagctgtgtgacatggaggagcctttagagatacctgtagtgtgtgatctaacaatggcgttaggctcaatatctgaggtgggattattttcttaaccctccctgtctctctgttctcaccagatttaaattctacggaacaacctaaacgaatgtctttagtagggaaaagaagtcggagttgtgatcgactttacagacccatcaacagtgtacgagaatgtaaaacaggtaaccaattaacttctctttttgtcaagctcatatccagtaatatggaaacaatcactgcgttaatgatttctgaatctatcaaggcaacggcatttgggatgaagagtgtggtgtatgtacctcggattaagccagagacagtatctgcgttgtctgcactatgtgacaaggccaccatggtgagcacagggtgagatgagatactcgcagattattcattacgttccctttctttgtgaggtcgagtctgtcctgaagcaacaattggtagacgagagatggttcactaaaatctaatttcgtctctgcttgcgttatagggatgtcttgtagcaccaactctatccataggatc

SEQ ID NO: 28104 - DNA, 1187 bp, Arabidopsis thaliana landsberg
gaagtatttgaatctcaagagacagacattgaaagcttgttggagacactgaagcatagaaaagactcaacgacaacatttccaacatgtgtttcatcggtatttatgtgttctagctcctaaaagaaattttcaccgtatgaaaacaaacctaccatttacacacattttctcttgcaggagacaacaaagctgaaggccaacggggtaggaacaatgaccggaagattgtttctcggaacagcggagaaaattcctccagaagagcttgtagacaccactggtgctggcgatgcattcataggagctgttctatatggtaaacaatttgcaaaaattcttgtacacgctctgagaaatcagaacccaaaacccaaaactgacctgtctctacttgttttccttgatctgtagccatatgcgccggcatgcccccagagaaaatgttaccatttgctgctcaagtggtaactcttctaaactgaacctctttgttttgttttcaccaatgtatatgaatcttcaacataacctatagattatgtgaatcttgtaactgtgttcgcataaccgagctttgtaatcttaagccaaaaccagactaatcgtttagttttgacctcccacttgccactagtttgagactcatataagtggccattgatcccaatgtttttctagcttcaccaaaccgtcaccttcagtccaaaaatcattcatttccaaatggaacatacataaatcacttccatcctgatctttgtatttgcaggctggttgcagctgccgggctttgggagctcgcacgggtcttcctcaccgtacagatcctagacttgtaccctttctggtttgacactctctgtgttcctttgtcaacctttctgagtcactactttactccattgcccactttcatatattttgaatgttcttctacttattagatgaaataaaagacatggtggtatgcatcaaataatattctggttaggtttgacttttttcttattataaaaagtagtaacatatatgatgatgaagtggtgttattctaatctactaaaatgctagcaatttgtgaacgcttcaaccttgatcgcgtccgtaagatcaacggctaggatttcaccaatctgataatctcagccgttgactgctccaagtcaaaggtggatagctacgct

SEQ ID NO: 28105 - DNA, 2238 bp, Arabidopsis thaliana landsberg
tggatgatctcttaccggaggttcttaagaaatgcttgagcacaaatggaacatgtttatcctctgtgttcaactattcccttttggtgaactggaagacatagctaagtagccactctgctcccaagcaaaatgggcataagaacttcaagcagcaattcactcggaaggcctcgcgagagctttttgttaagaagttttcctgcatggctcccgtttatcataactgtagaatatacgctaatgatggacggttgctatgttattgcgataaaagaaaacttgaatggtagatgatgatctactgttgtattgtatctgtacttcctcagttactttgattcaagagcctactctctaagttatatatctttgtaatatcttacaggtatctaaaccgtggccttgcgaagctagttgaagaaaatccacctgcgataatgcttttgtttgagcccaaagggcgtccagaagatgaggggaacgatttttatatccagaccaagaggaatatatgtgttgggtgtggggaagggaaacattatctccgttaccgaataataccgtcgtgctatagagttcattttcctgagcacctaaaaagtcatagatctcatgacattgttcttctttgtgtggattgtcatgaagttgcacatgctgctgcagagaggtacaagaaacaaatcgctacggaatttggaattcctctttttgttcgtagagtactcgattcaaaagaagcacaagggacgtcttctttagtggaggatgaatcaactggtgactctgaggatgcaggtgtctcctcattacatcttagatcagcttgaatggcgctcttgcaacatgggaacagaatgccttcaagtcgccgtgaggaattgttgcatgtgatgtgatcatctaactatttcaactttcaagaaattgatttgaaccaagtattctgttattgatactttcttttggattctgaatatagactgtgaagatgtattacggtggacgggacctatctgaagaagatttggagaaagctttactcatcggattgagccctcacgaaagaagaaaactcgaaaggaaaaaaggggtctccttcaaacattctgcagaggttgctggtatggacaaacaagaaggtaaccatataataagcattgaaaattgtgttggttgataaagtgtaagatatgatgatcctttgatatccagaaatactgatgcaaacaacttcgtatctttagatgaaaacaatgatggggaggctcttgcagattttgagaaaattatgactgtagaaaggagcacagttgttgatgatagtggtgatggtacaagtgaaggagatggagctaaagagctaaatgatactcagtgtaatgggaatacgttgcaccaacaaaactccaaactctcttcgttaggacatggaccgcacggtaaacagatcgtagaatatcttttaagggaacatggagaagatggtgtacgtgatttctgtcaaaggtggagaaaagtgtttgttgatgctgttcatcctcgccatttacctggtggttggaatgttagtcacaggtaaaccttagatttacgtcttctttttaattataaacttgaggttctacttggatgtttatcatatcttgttgtgacatgagacaagtaacaacttttgtgttagagaaccaaaagtctttgaatttactaaaagtgaatttatgtggaccttgttctttacaagggtttgattgttttgttgctagtggccgaagagactttggagaattcagcgtttacaatcccacaaagagactctccaccgagtagatttgtctgtttctgtaccatctctaccgtttcgtcaattttggattgtcataatctaggattattttgtaatcccccgaccgcatcagtggtttgttgttgtattcttctgtagacctctgtactttgttttagccaaaagtctgatccttttaaaattgcagtatatgactattttgaaacgataccagaattttgctttacgaaagtcatacaaaaatggctctatgcccatcacttaacgcgagctcttcggttttgaaccgcggctcaaaatcaatcaatatacatgaggaatccgaaactgtttctacaaagaaatgatatctagttagtctggtgtatagcagaataaaaactccagaaaaggttaagtttcaacttgaagtgagggtaaaagatatg

SEQ ID NO: 28106 - DNA, 1356 bp, Arabidopsis thaliana landsberg
gttatttggcaagatcttttattcagtcttcagaaatgcttccatcctttgaagatgctgagagcaggagccctgaacggcttgatcctacttctagtgaaggggaggaaaagttttatgaagcaccagaaatcttggttgattccattgactatacatctctcaggacccctagttttagtcgcattgatggattgctccctgttgacaacaagaatatcactaagccaagcaatgagacaactgagtcactggatagtttcgtgaaggctcaaatagtcatataccatcagacgtcacctcaatataaaaacattgataaccaggttgatagttttctgcttttgcatcttcgaatccggagatcttagtgtttcattgttaaaaagtgaagccttactaaatcactcatcttttggctgccttcgtaggtgatggtaactttagctactttatcatttttctgtcgaaggccaacaattcttgctattttggagtttgtaaatgctatcaatgttgaggatccaagctgtgaatcttttgaggacaactctcctgtagctggagagcatacttctccaagaagagatggatttgaagattctagggatgcagctgtcaagggtttgttagggaaggggaaatctagaatcattttcaacttggaattgaacatggctcgggcgcagatattcctaatgaatgagaatggaactaagtttgctacattgtcacaagacaatctgctgacagatattaagggtgtgattatgctctttgtatttcatctctttttcttcagtatagtgaatttttggaaggtaagtgggcattttctgtactcccatttgtttgaaggtctttccgaactcgttcagtattaaggcaagtcttggaaatttacgaatcagtgatgacagcctcccagacaaccatatgtacttttggatctgtgatatgcgagaccctggaggaacttcttttgttgaggtattggttgtttgtttcttttcacttttctctttgtggaatgagaatggattgcgtagatgagatacatgtaattttttcatcttgatttacctttttttttttttctttgctagttggttttcacatcattcagtatcattgatgaagattatgaaggtttcgactactgcctatctgggcagttttctgaagtgcgcattgtttatctgaatcgctttattcaagaggtagttcattctctctgcatagatacgagtaactttttgtcttgcttcctacaatcaccctccaccatgtaggttgctgaatacttaatgggactggtgccaagtgattcaaaaggggttgtcaagatgaaggatc

SEQ ID NO: 28107 - DNA, 1076 bp, Arabidopsis thaliana landsberg
cattatattcttgtaaaataagttttagtgggatttaattaataatgcagtaagtttagggtaatgcatgtgacatgattaattatttttcatgaattttgccttaaccctggttgaaattcctcaattagaaagtcaaaacatatgtgaaagtagtattttataatgcatgtatctacaaatcgatacgtacacactttttttatcaagctaatacgtagtatttgagttagagattgatcgctaatgatcaaacggtctattctgagcaaataattgcatttttagatacatttttaattggccagtgaatcacaatcgttgggaatgtggcaaaatatttgatttcgaattaaatgatttagttaattaattaattcattgttttaagataagagtattatctataagttagttgatttgtcaactgttagttaattaactacttcaccaagaaataaatcagtgacttaagtttatactaagaaaagcagaaaacacatgaggccacatgaaactcccgagttttgtttttctcttaaaaaacgagaacagctttagcgttatatatatatggccattagatatatagtataacaacaataataagccgttaagtatggttagtgttgtaaccgactaaccgtccggtcaaaattaagaatgttcagtcaaagtagttacaagttcattaatttctaacatgcaaaaagtatcacaccttcttctttgactaattattttccacataaaaataattaatggtcataattaattctatagattaatgttttaattcgtgactagaaataaagctacataagcttcacggtataactactggattaaccaaatacacgttagtaaatcaaatttaataatagtcagacttttatttacttcgtatcatcgtgattcacacggcacattctaattaacataggtttagttaaattattacttattttttaaagtttaagttttaaattttcgggaaaattattattatgttttttaaaatgagtttaacacttttttcaatcgcattgcttatttccttttttgttcccctaaga

SEQ ID NO: 28108 - DNA, 1485 bp, Arabidopsis thaliana landsberg
  unsure (1)..(1485): unsure at all n locations
gtttagaatgtttcggttgatatctttgggggcgcattaaatttgggttaactatgatcagtgtaatggatccttcgattgttcccgcgaaggttagttaaattagttttttttttcttcttcttcttccatttgtttataattttgagctttttgtcttttatacttggtgagatcaatatcgtcgggtcaagtgacgtcatggcgtctatatgtctacatcacatatcttgacgtggcgcttttgttgatgccctgatggctaattagccgacggcggcttccactttttttttttacttatcctcatattttccatcacgcgattgttcagcgcgtgcaacacacgcccgggactcagaaaaaattaaaacagtcattatttatccgatttgactacaaccatcgaaatgttcaaatggtatagatatctctatgttgtcaattatttaaatactggttaaggggttattctagtagatatactataataacaaaaatatgactatcatcagtttagtcttgtttataaaagttaatactaaaaactccacattgtgtccgaccgtatatatatatttttggtccaacagaatgttcaatcaaaaagagtaacaaatcacacttgtcatctaagtaaaagatgtcatggagacacgatgaacttaaacgcgcgtgggctaaacgcgccgtcggctatcagcggatgaggacttttttcaatgccattaatttttttgtttgtttcttctctcttcccttaattctcagtaacttcttctcctttctcattaacttccactctccttcctaaaagtaaaaacgatacataaaaaaaagtgttcattgtatatatatttaaaaattggactaaaacaagagagagctcacacatctaaatttttctccatattacaaaagaactaaagaagatggatcagtcatcatcaacgttgctcataaaccagagaaagtcatcatcgtctccgactaggatcccacctaagcagaagaggaagtcaacgactacgcacaaacccatcaaagtccgttacatatcaaatccgatgagagtcgagacttgtccttctaagttcannnnnnnnnnnnnnnnnnnnnnnnnnnnnnnnnnnnnngatctaccaccgtcgcccaccacttttaccgcagtagatctccaccgtccgtgtgagtcggagatgaacttagagccgttggatggagaggtccgtggagagtattattcaccgttggatgaggaagtgtttaatgctcctcagatgtcggcaggtctttctggttttttctcgtctggattttacaatgttaacgctttaggaagcattggttctctctgaattttaaactatgaatgttttgtttcggcactgaaacaccgatcacgaagaataaaccatctatagttttagggttttcatcaaaacctatatatggatatattacatatatagttttttttctcgc

SEQ ID NO: 28109 - DNA, 1220 bp, Arabidopsis thaliana landsberg
aaagaaatttgaaacttgatctttatagaacaaaaaaggtaataaattctgatatctgtagatgctataatgtttcttctcctctgagttacccaattatgtaccgtttggatactgttccatttatttacaccccatgatttactttgtagaaaatagtgttataacaaaatcgatttgtagctgctgtgatgttcaaactttctgtctctcaaaacaatttcaagagaaaaaaaacagtagaaggatttattttaatattttttatgaaataaaaggaccccagaaacttgaattctatagggtctaacaaagatttgtacggatacggctgtcttcgctaatatatttccttacactggtacatatctgacaattctgtaaatattcttccacattacgtcaataaccaattccgaaacatcttcgatttttctcttcttgttaaatatttgttgtttttcagtgtttggctgtaagatagatgtcgaattttcttcacaaaataatttataagaaaaaaaataacaagtataatagcaacacattatctatcatgtgggtctcaatcatcgagacttccacttttttaatttctttttttcctactctctttataaaaaaaaaaaaaactaatcaatctgttctttagtgaacatggccgttgaatatcgaagccagattcacacaaatcttcttccttcaattatttcaacttctcttggcgtgagatttgaggtatgtatgtggatgtggtgttaagttaggtactctgttacgtttgttcatctttttattacatctcaagcaatcaaaatcaccaaacactttctttctttttctgaaaattgattggggtatttggcaagagattttcttgttgggaaaaatattgttttttttttgtcagagagtgaattataagtgagatcaataaattttgccccatttttaaagcttcctccttttaaatattttaggtcgcaactaaattggagttaaagtctgctgttgagattgttgcagatgagtttggtctgaatgtttggtggttttggatatggaccggaggagctggttatggcggagaaagtcatctgagaaaagtcccggcgaaactgagagtactggctctgtctcatctcactctgaaagattctctgacgatcaggttacacttttttgcaatgcctttgtgacactatgtgattgtggtgaaa

SEQ ID NO: 28110 - DNA, 2486 bp, Arabidopsis thaliana landsberg
atgattattactccaaggtctttgatgagcacaagcgtccatgaggaacaaaacccgacgttctgaaggaagtcaaggtcgctattggccttacgtaacaaagctaccgatcaagaccaaagatcatatcttcttttatatattaaaatttaaatatgcagtccatgagcatgatataatattctctttgagaaaaaaaaattgatataatattctaccacacatctcgcaatatatgtgttgacccattattcaatataagcaaataatttactaaaactatagattttacttttatgtaacaagcaaaaaaaaaagaattgaccacgttacaaaaaaactctccatatataaccagagtgggagcagtggagcataccaaaagaggaaagaggcagcagaaactttttagttaccagagaatcttttccaatttatattaaagtgtgataatggaagattgagatgtttttttgaagattgaaacaaaaacaagttatctctacttgaacttgtactcccttctcatcgcactacaacaatacttactacttcaaacgattctcttgattatacatatcaaaaaactcatagaacattcttggaaagaagttcatatatgatgataatatgattcttccaaagctcatatgatcaaaacaagttaaaattatgttaaaactggtaacctaagctgacttatttgttgtagcttaaggcaattagcacttgagaagggttaaatcactggagggttccgcatattccatcccccaactaggccgccccaatgtgaaatccaaattgagatgaatgttggtatcctctttctcttcattgtcctattttcaaaatattacacattataagtacataagtaaaagtgtaccattgttaccattgtcagcatgcaattaatgagagataagggataaataatgtaccttagtgtgatgagttgttcccaagtgagaatatgcttgtgtagatatgctcctagatacttcctttgtcgatgaccatgaagctctgttcaaattttaataataaaacacattttagaaatctgtttataactcctactgctggaccagataatcccttcttgttactggttttaccattcatatacaaaattgttgtatttggacctacttctatattatcatcaattaatgtacatatacaaattaacaaagaaaattcaaatatcttatatttctaattagaataaaaccaaaaacaacccttaacgaatttaatgagagatggaaaagtacattcacataagccctaggagagggtcatattcatcaaatttcacacagaactaaggcaaaaagagattaaatgcaaaattttacaaaaataaatatataaataaaaagtaacctttgggtcttttgcacagatgatgagtttggcgaatttgtgtcagttccttcatcagcttcttcattcttattattgtcccctatcctctgctctgcctctttctctacctttccttctcctgtttattcccaagaacaaaaatacaaattttcttttaaaaattaataaataatgaaattttatttacatttatatcttataagaatgtaaaaatcagtgaactagtttgaatgcatacctggtgatcctttatcagtgcatttcactgttctatacatctgcattaacaatcacacattcttgaaaaatcaaaaacaaattgaaggacgaaaaaaattaaagaaatgtttggctaagttcatttccaactatgcaatcatgtgtagatagtggcccaataatatacatttcatacattttaccatatacctatatatctatctacatttaatgtgtttgaattcgtatgagattccattaatttatatataaaaaataaagaaaaaataatgaacctgcaagtgactcttgacatgagctagggttagatccttcacattcatgagctccaacactgatttaggcgttgctcctgagacaaaccaatacatgacaaatcttaatactttggtttcaaaacgttacactaacataccaatctcgattggttatgtctttctttttaaaatttttttgattagtataggaaaatgtaagaggacaatacatactttcatggccgccaagaagttgaacagcatggacgaagtgagcatgaagagtagaagtccatctcattcttggagcacgaatgcttcgtttaagaccaaccattgatgatgagcttctcttgaaatctcgaccgtagatttgaggttggaacatgtttgagcgcctttgatgatgatggtcaaatcctaagctcaagagaggtttgttgaagaagttgttctcatggctcaggtcactgaggctgcttccagaatcactgcttgtggagctccggtcaccgccgtgaagaggttttccggcgtgatagttaggtagactgatctgaagagacagatctgggactgagtttgaagctctca

SEQ ID NO: 28111 - DNA, 1684 bp, Arabidopsis thaliana landsberg
  unsure (1)..(1684): unsure at all n locations
cgtactgtgacggtgacacttttttcccgtcgtactacccattttctagtacgtacatgtctcagtgcttttgttagaaatgattcttattagtgtttttacttatgtctatttcgttttgtatatagtatatatgtgtgtttatatagcttatatcgtccttctcatgttttaagttttatattctttctttttttttatgtaacatatagggtgactttggaattgatttctttttgatactttctttgagtgacgtcgaagtcttccccaaagttcagctcgctacgttggaccgttatgattccacattattatatataaatatctatatgcatcacatggcatactgtatacgcaacatactcacatgactccataatatttagatatatgtgtgcttttacgtattcttttcttttctttttggatatgatataaaccaacataaacaacattgtctaatgtttaaaaccaaataatcatcaatgtttatcagtttctaagttatgtttggatggtagttaacaaacaaaagaacaaacagtgagagaaatttcgacgagttttagtattacatatctcatttacagtggaatgcataggcttttgtaaaaggaattcaaggcagcctaccatttggtaaattactgaattttcaacgtgtaaagttgaatggagtgataagaattgtttgtgcatnnaaaaatctaataataaggatcgcttaaaccaaaagaaattagacattacaagtacagtccgtggacctttacctatatatctctatcaaaataaaatattgaatgttggttaagaagaggaccattttgatattatagctatataatactacactatacatcataaattcgcccacttgctggttaggtttgcatgagaatgcatgtgacgagcacctcaatctatgctccatttccctttatttaaattaaataatatttctatatgacttttgtgctgtgcaaatttgtatttgtccctttactatactaaatatatttcagattaatattacagcatcagatttcctcgaatattgtcagaatgtaaaacgtgaaagaagttaaaattcagagaataattaagtttgataaattataataacccatctgtgaataattattaagcttccggatcccagtgttttgggtgaataagaacgttttttacttttttatttgaatttgattttaaattgaatggaatatattgttcttaatcacacacgacgattgcaaccaaattcataacacgcttaacactttatgaaaataaaaacagtagagaaagggaaataacaactatttggaattttttattttgggttctagttggattcaattattttcgtgactagtattaaaaaccagaaatagattgatatgtatatcattaattaactcctttatttctaccatatttctcttattttataaactttctaattaaaatttcgggaagtcgaagagcaaaaacaaaagctatcaaatatatcaatagtactagaagtagtctgcagaaaatgaaaaacaaatgttaaaaaggaaaaaaaaaaaataaagctaaacgaaacgaacaaattattgcgaaattatccacgtggaaatagaaaactagattaagtgtctaaaatcaggagccacgtggttagtattattat

SEQ ID NO: 28112 - DNA, 1341 bp, Arabidopsis thaliana landsberg
gtgattagatgtttgttttaatgatcgtatgataatgacatattgacatagtaggcatgtcgatttgataccgtatgaatcagaatccctaagcctacctaacttgattacatctaaatatcctaaaatatatattagattttgtatagctatcgtaatttcattcttagaacaattcatgcatattgcatgcggacgttgacactaacttgctagatgcatgcaaacgattcacttcgattcaatattaatttattcgagtattagttcaatttcattcatggtaactcattgtgaacacactgaatggtaatatatttttacccgattctcatttattaaaaattatatatatcggaatatcggataaaaccttgcaagagaactacttagtacttaccctagaatcttgattagttctaattttaatcagaggctgcaataattcctacatagctagtgttttttcttcttctttaaaaccatgaaatctaagatacaacaattgttccttgttcattatatttgtccatcttttaaagttacatggatgcaataattatgctccaatagtaatacataggcttttgctttgtctttcaaatctttttataatctttgcacgttttagtaccactctctctctctctctttcgtcctttataaacccctcacatttcttctccttagctcataagtaatcaaattccaaaaaaaataaaataatacaaatctctctttttctctctaaaaaatcttgatatggatcaaaacgtaccaataagcaagaagctatggaacatcgtacgttttctcttgtacatgatccgcaaaggcgtctcaaaaaacaaactcatcgctgacttcaacgccactctcaaacgtggcaagaacctcatgttccaccaacgtcgtcgtgtccacgccggttccaccgcctcagccgctctaaacgctacttcagccaccgcgtcatcgcgacaagagtacgagtttagctgcagcaacactccaaactattcattccctttctctaatatggctttcatgaggaaaaagagtcacaataatctcttcacgtgtggtcaagcgcctcagacgcttgacgacgacgtagccgccgctagagccgttcttgagcttcttaacggcgttggagacaaaggaaacgtcacgccggcagatttaacggtggctttgtctccttatttccccggttttggacagactccattggttagaccgttaagagtaacggactcaccgtttccgttaacgccggaaaatggtgatgtggctaatagacacgttgacaaagcagctgatgattttataaagaag

SEQ ID NO: 28113 - DNA, 1388 bp, Arabidopsis thaliana landsberg
agtctcctgcacgactgatgtctctggaaaactctccaagtgagtattccatttcacttaccacttggaatcgctcagtttgtttcttattcagcaaatatatttatgtatttctttgctggatcacaggattggatagacgaaatgacgggattcattaagtcaatcgatgacaagcatctcctcacagtaggtctggaaggcttctatggtcctaatagcccgaaagggctcacagttaatccagaacagtgggcatcccagctcggaacagactttgttcaaaactctaactcctcaaacatagattttgcatccgttcatatctaccctgatcactggtaagtgagctggatcagagaatcaagatataattgcattgagctcttcaagtgcaggtttctcacttgttttattctgctacaaatgtatatatgggcaggtttcataatcagacatttgaagagaagctaaagtttgtggtgaaatggatgcaatctcacatagaagatggattgaaagaactaaaaaagccagttctcttcacagagtttggcctatcaaaccagaacaaggactacgaaccatcgcagcgagataagttctacagaatcatcttcgatgtggtttacaaatcagccaaaagaaagaaggcaggtgcaggcacattggtgtggcagctattcatggaaggaatggaaacattcaacgatgactttgggattgttccacatgaacaagattccatttacaaattgatgatagaacaatcttgcagattgggtaaagtcacaggacgtcttaaggaacaaaagttgaaagaactttgttctcacagacattgagagaatcacatgtaaactgtcttttttctctacagtgaaatctgattctcatttttgttgtatacaagaatcaactcagtgagtaaaaatatcttgatgcattcaagttcattggtcagagttcatagataaatccatatttataagcacaaatacaaaaaaacaaactaagtactcaacaattctaaaccctaagagaaattattgaagagactaaatatgaaaactaattagagctacgcttagccagtcttggagatgacctcgttgaacttgtcttgttaacttttacgatcttcttcttctcaatcaatctcttcttctccacaaactcagatttaatcgtatttcttgttagcttcaacatgtttagtcttgctttcttcagcgactctatcaaaatcatcagagagttttctcctgattctaaccacaccttcatcttcagatccgacttcctcatcatcagaatcgttcagatctaagtacctccttccgttcaccacaatcggagcagaaggaggagactcagaaccagatctc

SEQ ID NO: 28114 - DNA, 1488 bp, Arabidopsis thaliana landsberg
tccattcatacaaggcttgtcacttccactattgtgcattttcaggtagagattttgtgtctgctgattcattaccaaccactatgtaaaagatgaatctttcttcaaatttaagagtttataggcagatcatttgcatcattattggattaagttaatattttgttcaatattggtttagttggtagataattaaagcataggttaaattgcatctcatttgaaaaatctatgaatttcaaaatggtttcgatgaggtataacaaatatatgagcaggtagcttttgtctaagaaagtgcttcaggttgactaaattgttctctgagtacagttcatgactaccagcatccatggtgatactatcctctttccattttctttttgaatttattaactttacgctttcagaaatcgaaggcctgcgctcgggttttctattcgctgtaatcctttttctgcagaggtctcggcggatgcttgtatagttgtatttatattttgcttttctaaaatgtttcttaaatgttaagttcatcatatcagactgcatcaagtgactttatcagccaatatcgaacaaaatcacagacttaagtatgaaactagagtcgggctttaaagttgttatgcacgttgtatgaataaagtgagggttggaacaatcatatactacatcgtttttgcactgtactttgcatatatcctcttctgcagatctgcggtgtgtttattctaatgtgaacatggcttatcaacatattactcaataatttgtggcacttagggatattttcctctaatttcaacctctgatgcagttgggagtactgtctgagcagccagcagcataacgatatgggtatgataggagaatgttgtaaccatgtgtccagatagaattttttgtttcttaccacattatacggctatgcatgcatataatttgttaaacttgagtagttttgggtgctttactcattcattcactaacttctctgttcccgcatttcatgcattgcatatcatatatatgggatggcgtttaactcaatctggttatagatgcaacttaatcattttgtgtaaaacaacattgttcattttagtctctaacttgagtccattaaaaagaaagtcagaaagccaatttcacatcaagtctggttcttacctcatattcatatacaagaaaatcttgttttcatgttttctgcgtatatggcgcgtgattgaactttcatattcttccttttacagcttcggaatttggtatgggcgacatctaagcatgatgtatatctaatgcaaaattattcactcatgcactggtcatctctactccagagagggaaagaagtagttaatgtcgccagatcagttacccccactcaggtgagagccgttggaacacatgaaaactattacaaatatatagttttccagattgatcttagttcctagtttgatttttactttcagaaactac

SEQ ID NO: 28115 - DNA, 1829 bp, Arabidopsis thaliana landsberg
tcaaggaattgtcttattatacttaaaacccctaaagtttttttttaaatattagatcatgagggaagctaaacccctaaaccccttaaaacccctagtttcaattacatatctttaaaactgtgagcgttagtccaaccaccatggctagtcttgagggaagctacttgaaatatttgtttgtggctcccattttgttgaactttcttattactacaaaactaaacttgaattactattgccataactttttcataagaggataggaaaatctaatatgaactctatcaaattatatgtttcaagtaaaaatactcaaaatgtttagctaagctccattatttttgaaaacagctaaaatgcataaatgatatgatacaattgagaaaacgaaaaatgcccccaaatataatacatatgtggcttcatatttgtatatttgtaggatcgacccaacacaccacaaccgtggctagtatttaatagactacaagcagaaaaagaaatttaggtctaatgagtgaaaatgaaaaaataataattaaataaggcaaataagggtagatgtacttgaatctgtaaaccttcgacgtatctaaaaagcaaacaaccaacttttctaccgaaagttataagataatgagaccaacattatgtttatagtaattgagggcggaagcatgggcttgacccgcttgtgctcatgaacgggtatgcacctaatcacctacaaaatatcaaaagcagggaaaatctatgtaaagtgatcatggagagcataaacatttcctagatgcttactatgacatttaaaaacccacttgaaatgctaggaaatgtattagtagacatcaagaaaatcataattctagtatatttaatagtcatgtattagatttgttagtgaaagttagcatccaactaatcctgatttgcttaacattcttaaaaatccttaatagtcttcaaaatctactttacccaatagacatccaactaatttgatttatagtatatctatctcatagtcagtgtcgtgagtcgtgaccagagctatagaagcttaatgctgtcttaaaaattatggacttttcaaaaaaaactattttcgtatttataaagttatcatcttggctatttgtgatggacagatgtgatacgattattgggttttcatattttggtgtttcggtcttttcctttttagtattggttttgagagttttacttttaattatgtttaagtcggtttgtatgaggatctatatataagatcctcttataatcaataagaaaccaaacccccaacaattaacctaagagcaaccacattgattagtttctaaacaaagtttctaattatattttattagtcaattctagtagttttgcaatttagagtttttgtagagattttaaaaattttatgatccattggtggaattcttaaatggatttctaaaaagattttatcctcaatttggttcatgcctcttcgatttgataccgttttcatcttcaatttggttcatgcctcttcgatttgatccgccgatttcgatttggttaaagcttcgaattgattgaacacgtcgtcggtgattagcctcttctctcccgatttcaagctcgaaaaatcgaatcgtcggagattcatatgaagtagaatcgccatcaaagaatcgcaatcagaaaaaaagaaaaagaaagagaagaagaaagagaaagtcgaggaatcaatttttttgtttattttgacttaatttcaaatcaatcaaaattgtccacgttgctatttgatctcagcattcttagtttctctaatttct

SEQ ID NO: 28116 - DNA, 1526 bp, Arabidopsis thaliana landsberg
  unsure (1)..(1526): unsure at all n locations
taacattcgaccgaattacatgaaacagaactacatttctaatgatatgattgatatggtaatattttaaccggatttcggttcaacaaaaccggaaatcgattagttcagtttcgtaatttccaaaattgaagtccataaccgggtttccgaataacagaaccgaacatcgactaatccaaatggttaataaaattcatttctacaccacagagcaaagtgttttttttttcctatggcaaagattcttaaaatcgctaaacccgacaaggatcctagattcgataaaccaccggtacatttaccgctaaacagactattcgtcaaaaaaccaggtaaagtttttcaagagctactttacagttttacagaaattgtacaaggggccttcatacgtgtttcaattctccggcttcatgctggagttcattatccctggaagagacggggatttcactggagcagtatcagcgctggaagtaacgttgttagtctcaggcataggaatgatttgtagctgagaatgctgctgatgttgttgcgattgaagatgagtctcgtacatatccagctgcggtgttggacctgtgctggggcctttgttagggttttctggcgtgaaattgtgacaaaccagctggctgttgttctgaccgtttggttgttgcggcggttgatcacaaaacttcatagtcttgaggacaaaattgtcgtcgtggagctcaaatggagtgctgcaaatagtgaaaacagttgtcacagtgtcagtaatcggttccgtagatatattagctgaaaagagatcaaatctggtgtttggattttacctgttgaaatcaaaatgcacgagctgcatatcttctgatatctccacttctactgttgcgtgaggaccagtctggtgcagagaaacaacaacaatcaggtgattttttcattttctgaggnnnnnnnnnnnnnnnnnnnnnnnnnnnnnnnnnctgttggtgaagtttacctggacaaggataaaaggaagagcaacaccgccactgggagcatttcctgagctatataagtgctcatttctctgtatcagattctgaaggcctacatactttcagacatacacagagatgatagaaggaccatgtaagaatctatgataaaagtaacaggaagcagataagccgagagtatcgatgatgttcattacttgttcttccagttcttgggaatatgcagttttcttctcaattctgttcctaagtgagagtcgttcgttctgcaaaacaaaataattcaaattcaggaaaattctctaaataagctatggaacatctgcacatagaatatgtggttgaaacctttaattcttcaatgtcgcttaagcttgtccgaggaagacctctccattgaatttcttttttatccttggatattacatccatagccatgaggacgtttaaagcataaaatactcttcgtcatatgtttttctcatcatactgttgcgggtcaaacgttttcacatgatataatttcat

SEQ ID NO: 28117 - DNA, 1711 bp, Arabidopsis thaliana landsberg
taccgcgcttatgaaacgtcccaagcgatgatcccgccgttttggttcgttacttagcctcggcagcagaagcgtccgttaaaaagggtttgaagttcctctccggaatcaaaccaaaatacaaaggaaacgccttcgccacaacatgcatcaccggctgcgagaaacagctacacaacgccttggacgactttgcagatttctggaaagccgcaggaaaaaatctaacgagcatggctgacaattacttcacatgtaagaagaagatgacttccatcttcacttaccattccacttgtctcgatgacatttacgacaagacgttgcacaaagtggtcgaaggagggattggccttgggaaaagaatgagtggtgagtctgtgcatgtgttcgctggaatgggcaaagtctttaacactttcaacattaagaccaaacttaaccagaaagataccgacacgttgctcccaccacctttgtccttttactactattgattttatttatcaatatatattatatatcataaaacacaacaaaatgtactgcttcggtcgatggtgatgaataattttcatcgattgggttttcagatattttggggatcttgtaaccaaaggttccttttgatgtatgtttgtatttaatatgttatggattataatcatgtatggacctcgtgattggaaaggatatggaataatgtgattatctaataataaaaacgtaattaatatcgtatttgcatatatgtattttatgtttatacattcttactcatattttcgtttgttttttttcttcattgatgctccacattctgacgtaaattttgtaatcaatggctacatacatttttttttaaacaccaaaaaccaacgcaatttgattccccgtaattcgtcattatttagtgacctaactaactttttaccatacatcctactcagccgaagatgaataccatttcgtcgctgattttacttttgtggatttgtttgtagtatataatataccctttatgtttagtaggcaaaatgtgtagttattaaaaaaaattgtggttatatattataagtacttaattggttttattaactagacatgctactgatcagccgaagatatataaataccattctgccgctagttaatttatattttttgttgctacaattctgttttctttcttgtagtgagtgatttactctctctttgttggttaatgtaaagatgtgatgatttactctcactattgatttatttttcactatgaaaatatgtagatttagatattttacaaaggggaaaaaatcaattgaaaagcaatttagaagttttatcttttgtgggtcacatattaattcttatacgtatgtattaagttccgaggggcgagggatacgaaaatgtaaatataatgtttctcgtcaattaatcaaactgctatatatatatatagctacgtttatatacatagcatgttgcaataaatcaaatacgtacgggattgttgcggtgcatacgtgaagacaaagtatatatattgcatgacaaattgaactggtctggttacctatagtagagctcattgtttaggattttcttttacgaagagctcatttaaagagtctgctatatagacgctctgaatctttataattcagtgatataatctggtgcattcatatacaatactgcatgcatacca

SEQ ID NO: 28118 - DNA, 890 bp, Arabidopsis thaliana landsberg
  unsure (1)..(890): unsure at all n locations
ggatactttctttggtccaccagaaactggtgtgtacagctcttctgtccaacgcactctcttcctcatgggaagcgccgtactgaaaaggtatcatcatatcagtatatatttattttgctgtttgtgtgattatgtgattcttaccatgataaaggttcttattaacatgatcaggttcgttgatgtatcatcgattcacctaaaactgccaaatatacactttcaaccaagcaaaacccttcaatggtgaaggtaagaacctctatttgatgttgtctttatgatgaaaccacgaaacgtaaacgaaaatgataagtagaaaagtagcagcagtcgtacatagttataaacttaaaatcagacaacaaaaaaaaacttgcataaaagccaataattttaggatatgaatcgtttccaatgaattgcatttgcagtttaaagatgatgtgtacctgccaaaccaatgaacctcacggatctatagaagcaactttaagccgcataacctcgaaactatgaggtcttaagacaatacatcatacatggaaatatcaaacactatttcacaggttctgcaactttttggcttttgcctcttcatgaggtgctatacgttgtaacttgtaactatagtttgtactgtttcaaacacacaaaaattctttgtgtgttttatataaatgtaatgaaatgctgaattttttttcttcacatatctgaaatattatttttatcattgaaaattaacatatctgaaatttctattaaacaattcaaatttttatattaatagaaaaaatttaacaaaaagtatcaaaattatattctatttttatgntaaattgaatactttttgggatctatcaaactatacatatttttaattt

SEQ ID NO: 28119 - DNA, 1784 bp, Arabidopsis thaliana landsberg
atgtaatgtcactaaccattagaccgagattagcggctgggttaggggaatcttcatgatgtcctccagcctgcataaactcctccacgtcaagaacctctgcaataatgagcagcatcttaaacataggcaaatggtaatcaagaatctgctttcacaaaattgttttatttttcttctcaagcaaatatatgaatacctggatctcctgcatacggtctcctcattggaagtgtgatagggtaatagctgtagtaatcctgtgagacaatccaagaattaattatgcatcaacattatcgatatatgagttcgagatataactttagggacagggtactgttataccgacccatggttctttatactctatctcctgagtagaggttgatccataagcaccatctgcacaacaaccagcatgtatcaacacccccgcagaattatcaaaaacttgtgatgtgttgtgaatacaattgcctatgtttttttttgttaaaatatataattgcctatgttttaaacaaagaaaagaaattgttacttgatctattgaggtacttatttgatctggttgaattcaccactccccccaaccaagcaacttgagaagcaggaactgtatgatacataacaaaaactaaatcagtgatgtatcaaagtgatgtttttttttacaactagataacgtagcagcaaacagagtaaagatacgagtctgagtttcaagttaaagacactacctttcttgtccgcttttggcttgcgcaatgatctttcctaaggcaaacaaaaatcaaaattaaagagaactgagtaagtaagaagacacaagagcaaagacaatttcactcaacgattaaaaaaaaaaagcttacattaactctgcgtacgaattccgatgcttgtgcactgttactattatcctcaaccacttcactgcattcataattcaaaagtttcagaagaaaaacatctgtttatgttaatcagatcagtcattagtgttgcttacggtttaacttcaggttttggcacacgtttgggtggagcttttttggctaacttcatctgcagaagaacgcaaaatcgaaaatttagcagagccaaatattttatctaacatgagaagttaacgatgatagcaaacacaaaccttccgtactggtggtttctgctccattgcaattgaattcaaacacttcgactaaataaaaagaaccccagaagaatatttagttacgattattcaagtattcggttaatattttgaaacgaaaaattcacagaattaagaatcagaagctgacctgtgactccaagttcaatgacggccaacagcttgagaaggaggatgatcaccaattaaggagagaacccataaattagggcctgtgccaaaacggcggcgttttagtctaaccatggtaaaaaagtaaaccggtaaattaaaggaaacagacatagtaattccaaacgttaagcgcgctttttaaggcccatttttcagcccattaatacggcccaatttgtaaacgtcggcgagaattcatgctttcgtcttatttcccctcgacggcgattctcaccgcctggaaataaacaaatcgtcgttgttctcgtctaacgcttgtgcaatggcagatagttcgtcgaggaggaaccttaaacgatccttcttagaagatgaagattccgataaacaacctccgctagtttacaatccttttccgaaaaccctaaattcccaattttgttctgctaaagcctgaccaaaccgtgtc

SEQ ID NO: 28120 - DNA, 3395 bp, Arabidopsis thaliana landsberg
  unsure (1)..(3395): unsure at all n locations
tgacaaacaattaaatttaatacttaatttatttaagatttaatattacttaaattaaaatattatatttagtacgaatttatataagaattaacctaagaatcattagatttggctcttatataaaaactatgcttaacaattaattgaattataatattaaatttaagaccaattttatctaagaattaacctaaaaaactattaataatgatggtctaatggctatctccaaaacaacaagtacttagaaaaagaaaccggaaaatccgaacgctccatgagccgagccgggtcctagccgatgagtgataatccggtgaaacgcatattcaaaaacactcgatatagcaaaaagacaacggaaacaaattaacggtcaggattgtcagttcggtaaaagttacgggacccacgtatctaataggggaatctttctgatgtacggttggattttcatgctcgtgggccccacttttcctccatacctcactacaccccacgcctcattattactctctctctctttattaattagtttataatatattaactcgtttttaccttacttcgggtaattaaagagaaagtacgttacgaaaccaaataaaaacaatcaattaatcagaagaaaaatctcggagaagaagagttgaaaaaattgagtgggtacatatgtttgaaaagtagtgtagtagtgtaaataggagttagaaaaagtgattggtacgaaatgttttaacttaaagaaaaaaagatcacagagaatctgaggacagtaattgcacaaaatcgccgccgatgactttgtatgaaaaggacacaaccatacaaagagacatgaacagcaagtggaacatgtgagtgattgcacaacttcatctaatgggtcgtttttatattgttggatggccaagtttttttctattagatacgttttagttgtgtacacactgttctttttttattggagttttaggctattgagtttgtgtactgaaatgcagactaatcatgatagatttactgcgtgtgcatgtttatttttgtaatgttgtacttgtttggaattgagtcctatatgtattggtttactaccaagtcactcaagactgaattttaccttgtcgagaatgtttatagactcatagtagggcattttatagtaaacataataaggccacatcgaatcgaatgttttagaaatgaaatatgaatgacgtactgtatacagtttnnnnnnnnnnnnnnnnnnnnnnnnnnntcattatttctggctttataattgagtgtttttacgatgtttttttttttgtcaacatgtcctaatcttttaatgatatatttttatgatgaagaattcaaatttttttatataaacctttaacacaaaaggatattggttaaaccttctattatttctggcaaacaaaaacaaaaaccttctgtgtttttctaaatacgcaatcaaatgcatagtacataaatcataggattctctctataataaatagttgatttggacaacttgatttaccaattaccatgatcggaacttgactggcaatttgaaatgaaatgcgcgtatgtaagacatctgtgtgtgaatgtataacaattaggccgaaactttattcatgcatagcagatgaaataatatcattgtctggtataattgggcttggattgattttaaatttttaatgcacatatgctgcaagaaataggtaccaaccttttacaaacccattagcccattgagccaaaataatatataatgctaacgccttagttttcttcttcgtttcttcttttcttcttgacttgtttatgaacagaaagatttatatcttcacctgttttttacttcatccgaaaaaaaaaaaaaccatttggcatcttacaaacactaagataacaaaacttggaaaataatggaactgaaatcgaatattctaatatttacaaatccaaatgcttaatgaacactacactagcatgaaagcaccagtggtctagtggtagaatagtaccctgccacggtacagacccgggttcaattcccggctggtgcaatttgttttgttttccaaaatctttgagatttaaggcccgttctatttattttgcagacgagcccaaaactgtttaaacgtaggcccaaatttgatctctttatttaagtcaaaggcatatatcacagtacttatagttttcttcttttccaagaccaaaatttgttggagaacgaacactctcgagacggaatcgatggcgaattctcagacggtgatggctatgatcaggttggctagacctcctttccgcaacaatcacgataaggttgctttcgctattcactcttctttcgtcgcttccggttacatcctcaccgccaccggacggcctgctttcgccgacgaggctctctcttcgtcttctcagagttagtattgattccgtttagttgtttttctgattttttctagggtttaggtttctgattttgttcgattttggaatttttagatgatgttggaatcgaaggatggaacgaattcgagggagagtatgcgtttgtctatgcgaatccgaagaaagggtcaaagaaaattctggttaagtgtttggcgatggatgataaacttcttgttgatgccatagctgatggtggagcagaacctgctcatcttgagattaagtaagtttctctttatttgtgctcgattctgattctttttgtgcaaatctagtaagaattttctggttgtttgtgcagagttggggattatgctgaggaaagcaatgagggggattactctgcgcagttcaagaatttggataagttagtgactgatttgcagagtgagattatcgataagcttgatggaaaaccaaaacctgttgcttcgagagcacagtccaggtaatttcccttattaagcaccaagaatttgatgcctcttagtgtttgatcattgggacttgcgacgaacatatgattgtagcttgtattgtcactgaactgtattggcgatgtaaacttagatttgctcattcgtatagtctttttgacagagttttaaacacactgaaataatgtgcagcagagtctctactaattttgagtctctcttttaatgaactaggttttgatttggtacatgtagtctgttctcattgtggaacttcgttttgtggaggcatttgttaattggaccagaatgatatttgtttcctaatactagaagtgtattctgagatctccattgtttatcatttgttgcttgcagctctgagactaatgaagagcctagatattacgatgatacgcctaatccattaggccctcagattcacccctcagggtatacatcactttcccctcttatgtg

SEQ ID NO: 28121 - DNA, 2130 bp, Arabidopsis thaliana landsberg
aaccttaaatcaaatctccctccttcaactttactcatactatataatttatatatattatacaacaaggtcaaaaaaaaatcaggatatacgagatagtttcaataatgcgctcgaagttaaagatatctcaatagcataaagaatttgatcgatacaaaatataccgcttgaatatccatcaaattagcagaaacaaaaagaaagattcaaagccatctcttatcacttctatctatacattcatctttaaccactaactaattttatatcaccaatcaaaccattttccaaatatattcttcttattgttctgatatttttctaccaaatgtttagtgtgtgaatcagttaaccactatcttgtatgaacataaagaaagaaagattgcaataagttgattttagagtttagttttgagatgagttgtctctaaatacaggtatgtgtgtttaaagcaacggttatatattctttcaactccataatataccaaagaagaaggttactaaaatcttcacgaaattcaagtttagcaaaatatatgtggaatacgcaattaacgtttgtagaaatgctctagttcgcgttgtagaaagttgttggtcacaatttatgggttaattaggtggttaatggttatggttgttcaaaatataattatgttctactatacgaaccgaatccaaataaaaatgtataacaagagaaaacgtctcctcgtctacaagaaaagacacattgattttgaagaaagagtaataataacaaaaaatgtaaagacaaaacactgtattatgtgtgacttaattcttgttagtttattgtatagtatatgaatatgattaaccaatacactattctaacgtcaaaacgtgattatttgggttattttattttcaatttgaatcacaaaatatctcaaatttgtttttagtaaagatcaaacaaaacacatgtcgaagctatgcgagagaagaatccatctactttttgttcaacaacactgcttttttaatacatagcaaatgattaaagtttacaacacaatcaattaatcaaacccactaatctagagaagacttttacatgccccagattcctctagctgaagcaactctgctattagatctagcagtgagttcatacaaaatcctagcaaatgaatcagaatacttaccctcttgaaaaagcagctcagcgaaagcattctcatacgcgagtagcaatcctctgttttgaggctccgagacaaggttctcaaggatcattgcagctttcctacatacttctggaaccggatgcggagtctttatcactttcagcaacctatcaaccgccctgaaaaagatcataatggtgtgtcattgttgcgatctaaaaacagtttgattgtattcgatagagagggagtatagtttttgtttaccatctctcacttgctagctttaatctgcaatccatgttaacttccacgagattgtagagtgctccaacagctgcagcttgtgcatcaacggcttgtatgctcaaaagatcgactagtcgcttgtgtatctgcaagggatagatccattgttgggtttaaatactagttataacgagtaagtagccagaaaccatatgaagattatagaagttaacaaacctgcggaattaaaggactaatgaaaggttcattgtccggattgattatcaaacgccctagcaactcagcagcagcacaattccaagcttttgacagaagaatcgaggattccgaccacagctttgaacagctttcttttcactatatgcacaagagtaatgaatgattcacattggtatttgaaacaagttatggattgtgtaactaagaatgcagggagatacaacttctcactttatgttgatgtatgactgcttaagcgagctgaaaattcgtagatccatcaaatgcgctaggtttacaattgtctctagcgagtttgtgaccagctcttcatcctctgttaacaaaagattgtcttaagaacatagttcccaatcaagtatcaagcaaacaaggaaacagagacaatacattcaagccaatacaaaccaataagaaataagaatctatcagaagcaaatgtgagggattataccta

SEQ ID NO: 28122 - DNA, 1566 bp, Arabidopsis thaliana landsberg
aacggactcaaccagatggggaaagagctgttggagtttaaaggcaaacaactccaaataacttaaataaggcaatcttgtctccatatatggaaagtgaatgacaggagaatacgattgatcccatgcatcttggtgcaccttagaatgatgtaggaaaattctagaagtagtttaaagtctcatgggttccaatgatacgtttggagtctccaaaacccgtgagcatccaaatacgacaagtgtagactgttcggtttagaaacttgatacctcataaacaaaaattggttttgacttgattcaaaactgatgagctcctgatgagtcaagaatgtaagaaaattaactttgtagtttaactcctcctggttgggttggaattctccaataagttgatgatggtctccatcgggttctttggaaatctagtgacttgtaacttgaatatcttcctcatgtggaaagcttttgaaccaattccatttcctagtgattccttgatgacttggtgttggctcattaaaagcatttctaggtaaaaccattgggaaacaaccacattccaactccggttgggttgatatgcttcaataaaggcacataagtctatggtacacatgggttggttctctccaagagtcttggtagtcttgatagtctggtttgtgtctccttcatgctcattgaaacggtttcgacctcaaaactgtataactttgacattgtggtggtttggtgatgtgtaggctctactttgagcagataagataggattacgcctctgttctgctcaggcgcgtggctcttcttccttgtagcttttacccatttggaaactttgatcctgttcacttttggtggtgatgcttctttattctcagcctggtttaacaacaagttcttctattggttgagcttgtttatgttttatctccttagcacctcaaataatctcaaaactttggacaagaaacaaatgcattatgacttctttacaaaaatataaacttgttgaatcaaaaattttagcgctagttttagtatacctatcttcaacttgcgattttaaacatattgtttccttatgctcttgtatgatttagtaaactctttgatatggatgtcgcatcaagagatacaaacgaagccaacgttagacttaactgtttaacaaagtgtatagcttgaccaacagactcgatcaaagatcgagtggagactgctcgaccggctagcttgatcggaggtcgagtggggacttctcgagctaggatctcgatggataggcataagtgcttaacactttgtctggtggtttctccttgatgatttcctttccattagcacgttgatcaaccttagtatttagtgtgatgctgcagctatcagttgggccagttcacttcttctcttcacagattatggtgtcttgtatgctatctccgaatttgtatctctatagattctcaatggcaacaataagtgcattatatttgtatttaaaaatagggttcgatcgcactaaacttattgatagaattagctagctgaaacattatttta

SEQ ID NO: 28123 - DNA, 2091 bp, Arabidopsis thaliana landsberg
ctttttctttgcggggaacaaaagacgaggagatagtaaagcggagacaagctttggtgtgatgcttcaagagaatctcaatttagatgccacttcaaacgcaaacgctaacacaacgtcatccacatcttcttaccagctgcaagaatctgattcctctcaccatcatcaagctttgtggcgagatccacaaagcgatttcaaaccgcagattttaacgagtggtggtaatcgcgggtttttcttagatcatcagttcagtcctcatggtagctcaagtaccgacagtagcacagtaacatgtcaaggtttcgctgttgacaactcgtcaaacgccatgtacgcagcaacaacaacaactcctaattcatcttccggtatgtttcatcatcagcaagcaggtggttttggctcttctgatcaacaaccgtcgaggaatcatcaacagtcatctcttggctattctcagtttggatcatccaccggaaactatgatcaaatggcgtcagcgttaccatcgacttggtttttaagatcttctccgccgccaaaaccacacagtcctttgagattctctaataacgcaacgttttggaaccccgcggctgcgggaaacgccggtgctcctcctcctcatgacgcgtcttctaactttttcccggcgttacaaccgccgcagattcatccgcagagttttgacgaacaaccaaaggtatatatttatagctacacgaactactttatttagatttatggatatgatctatataatttatatgtattggttggtcgtagaatatatcggagattagagattcaagtagcaacgaagtaaagagaggaggaaacgatcatcagccggcggcgaaaagagctaagagcgaagcagcgtctccgtcaccagctttcaaggtattttgctttgttgatattattttttaaataaggggaaaataaacaataaagcttcttttttggtatgaaaataaaagcatctttaacgacattgaaataaaaccagctttccatggttttgccaaaacaatccgaatctttctattaaacaaaaccgaaaccctaatttgaacaataaaattaggtttatcatttaccaccaaagtatatgcatgataggatattatgaaacattcttttattgcgaagttgttttattttatatcaagaaaacaaacattcttcccacaattcttgcataattgcttatactagatctctggagtttattacttcatagtattttttttataacaaggatttgttttgataaaattttgctgaattagaggaaagagaaaatgggggacataatcgctgcgctccaacaattggtttcacctttcggaaaggtactatctctctctctctcattttctgcaaatttttgctttacctttcagaaagatgatgagtgtgtattagtatatttggatactgacattattacttatcatgttattgttattatatctttatggatttattttatatgtaaggtctatttcaatagatatttatgttggagatgaatgaatgatataccatttcttagattttgttttactgaatctcatgtgcttttgtgtcagactgatgcagcctcagtgctctctgaagccattgaatacattaagttcttacaccaacaagtttctgtaagttagcccactccttcgtatttttagtacacaaacattttctgctacagtttagttagatattgtatttcttctactgatgtacaacaaacctgcaaatgattataactcaggctctgagcaacccatacatgaaaagtggagcttctttacaacatcaacaggtaatattttaattatataattttatgtatacattattaaaccattatcatactgttattattattataccattgaataaacgtacggctctcgttcgcattctttattacatgtatttaatatgggtgcttcatctttaagattggacaataaagccttatatttcaagaaacaatgtagcgagaccggtttgcaacgaaaaaagaaatcatttgcaacctaaattttttccttttgctttctaaaggat

SEQ ID NO: 28124 - DNA, 1475 bp, Arabidopsis thaliana landsberg
gccccttcccggtagcatgagcctgtaggatccatcatcctgatttttaggtatcgtgtagcacaattgtagaagagtcagttttgttacgtacagattctcccccgcctatatacatataagcagcattagaatatagcttcgcctgtttccttccatccatccagggaaaggatctttgtaagtgctttcgatgacgctaggccttataataacaacaggtacgtctcctcgagtgctattgatcatcatctcacccattgcttttttgaaaacataagtgtcttgccatccatatgatcttgccctgtttcaataatttgtgtatttaaggttgttgcaaatatttgatagttaagctgaatatttagagattagtaccgctctagaccgagatccttcatcttctgtgcctcatcttgattttgagtcccttttctagcagcttcaagagctaacttcatctctctatcaacatctaatgcttttctgtttccttcgaggaagttctctgttgctatacaatctcccatagaaaatggcttctccatgatccttccttgtctttgtccattcacataagctgcacaagaaaccggaacattcagaaaagactgtttagctctgtttatgttttgtcacattcacgtacctgtggatacttgcaagaacagtttgagtttcttgcacttcttggcgaatcccatgagattaccgggccctcttgtgttgatgtccagagcaacatcgtatcttcaatctccgccaaaatgataacaagattagtaaatatctagataactaaacaagagaactcaaaacacataatctgacagttgccaacctttcattgaaggttgtattagcagcagaattgattataacatcaacttctttcgcaatctcttcagctgaatctgcttgcaacccaatgtttgaatcgcaaatgtttccggtcacagggatgagtttagttaacatgaaagacatgtaagatgctccatgagtctcttttagagtattaaaaagctctgcatctaacacctgtaaaggaggccagagttatgcacataacaagtaaagaacttgactaacaaagaatccaaatgaaagggacttacctcgttctttagccgctcgatcgcagcttctttgcttttggctttaatcaagagatatatcttgctgacatcaggagccattctcaagactttctcaatcagtactagatatatcgaaagaaatgatttagagacggataattgtggaatataatgaatatatatacatggagttttttttttttacctttagctaagaaaccggtcgagccagtgattagaaacttcttcccttggaggaaactgaataagccaagtccgtttttcaagcccgccatataagcggccctgaaagggatcaaagtgtttccggcactgagttccaaaaatgagccaatttcgggtaggagtaat

SEQ ID NO: 28125 - DNA, 1284 bp, Arabidopsis thaliana landsberg
  unsure (1)..(1284): unsure at all n locations
accgccacaagtctgagtgagaaagaaaattgataatatattgtggattatattgtgtttattctgtttcttaataaacacgtggggtgacttacacgtccgtcggaatatttggctctgtaaacacgtccgattgagccttcccctagtagatttccaggtgagaaattggctgttgcgctttgcaaatcagagagctcgaattccacagcggaacgagttgaagtggttcgttttgcattgagcttgttcgcaaattcggtatcagtgaaagacatcacacgcgacgaaacataatgttttagtccctttgatcctatcctatggatattttcatcatccgaatctccagatttcccatctaccataaataagctcatcattatcagttacttgccaaacaagataggttgaaatgtgtcgtnnnnnnnnnnnnnnnnnnnnnnnnnnnnnnnnnnnnnnnnnnnnagatccatgcgaggtgagagatttgaactttggggtgtgatgactgttatcttcgtcgatgaaatgaggtgagagagatgattttttcttggaaacgagcgcaattaaaacaatgatcaacacaagaacgcctaaacatgctccagcgatcaccattccagctccggcggttatacctcctccgtctttcgaacccgaagattttcggccatatttaacacccggtggtggtggtggagcagtttcagttgaccagtcgttacctccagtcctttattaaacgcaaaacagagagaaaacaggggaaatcttttaatatcctctgttttttttttcatgctgaaactgtttctggtattgcaaacgtttctcttacagtaaactgtctatgtccttaagctcattaggtatccatccttcaaactggttgtcttcgacgttcctgcaatcacataataagcaaatgaatgttttgagttttcggaattgtgtcgcagcctaagtatggtttttgctgcttacaagtcatcgatggcaaggttcctgagaacgtttatgtcgcctgtgaatcgattatcctgcaagtgtcttgcacaataacaagacagtttccaatttagccttcgtagaaaaatactataaagtaatgatttgtttcttattccttacagttttttgaggcttgtgagattagcaaaactctgaggtaatttcccagagagtttattcaacgaaaagtccctacgtacataaatttgggtgtgtaaggtctcaaatttgatacttcttacaaacattttctgttaaaaatgtaca

SEQ ID NO: 28126 - DNA, 2049 bp, Arabidopsis thaliana landsberg
tccctcaccaccacctcgatgcatttcggcatcctcataaaacacaaacatgtgatcccctttgaacctcaggagcttctctcggagcccaacacctaaacactttctctgctttaccagcgaccacccttttctttgtcttccatctgcttacgcacctaacgccaagcccagcgttgttgtgactatcatccgaaaacgatactacaacgaagatagcaaaccccaagagtgtctttcgcagggaaggagttatctctatcgttgcaaatgaacctgcccgcaaattataagaggttgcctgatctgctcctgcaggcccgcaaatgctgaatgcaagtgctttgatgagttcctggtcccaacaagaaaaaggaaaattacatatacgctaaagtatgtatgagtgagaaagaagggacatgagaacgagagagttacctgctgatgttcgttgccaatgcttgctactttagccaggccttttacaactcgttttctagccacttttggagacttattgaagcaatcgctgaaggtgtaatgactaggaaactgctcaaatccccaagaaactgactctagagacacacaaccatgcacgttcaacagtttcaggctttggggaagcgccggaagcaatatgaggtttctacaatgtcttaatctaaggctatgtagtttagataactgctttatgctttcagggattttgctgaaaccattccgaccaagatccaacagcactactgaaggcaaggaacaaatctcttccggtatatgcatcaaggatgcattgaagagggataaagatactagggcataaaatcttgggaccaagccatgtaaacttgaagatggcagccttggtcgaggcaaatattctctacgctgctctgcattctcattgaaagtcaagagaagataattcaaattactgatgccaatttctgatataccattctggataattgatgttgatacttctcttatggacatcccagatggatccgttagcttaagtgtgacaagagattttaagttactaatctccattggaagatgttaagccttttgcaattctgtaaatctaaaactacaagttctgagagatgcttgattaacgatgtcacttcctgtatagcggtgccagcaagatataactcttccaagtttcttgggataccttgaatatcctcaagttctgagcatccagagagatttaacaccgcaagagaactcaagttacctattcccattggtaacttgtgaaggcgtttgcagttctccaaatctaatacaaccagttcagaaagatgcatgagcgaaggcagttcttttatggctgtaccaccaagatataactttcttaggttttttggtataccctgaatatcctcaagctctaagcattgagaaagatcaagaactttgaggttgtctagataaaccatgattgacagactttgcgaatcagacgagacctcccgattcaagaatttgtgatctttatgatcataaataaatgagttatctagtggagagaaggtcacagttggtattgatcttatgccagtttgtttgagatacagctcctcaatattaggtggaacctctgggaaacttttgatctttatgcaaccagagagatttatcacccgaagatgctggaaatgacctgttgctagaaatctttgtagtcttgcacaaccttggagatcaattacctccatatttagagcaatttggagttcttgaataccaactagctgttgtgaatgacaaagcatgatcctcttcagcatcccaagttcctggaaaaacaaattgttaaaaaaataacaacagagacgcaaaatagtaattggttttcaaatgcatatagactttcttaccttggttccttcccaaagtctctgaagtttactgtaacacatgttgagtataacaagatttctagtgttaaaatcttgtggtaaggataacaatggaaaatggtcccagtgcagtaaccttaactccttccgtggggatttgacgcccttggga

SEQ ID NO: 28127 - DNA, 712 bp, Arabidopsis thaliana landsberg
gtctgatccttctcttcttacgctgcatatatttatatacactgacacacacataaattaagcaatacactgacacacacacacacataaattaagcaatgtaacatgatttttggaagggttttacgtaaaagaataatgaaagacaataaggtatataaaattgatgaaactgaggttaaaatattgaaacactggactttcacatttattgagtctgattttaaaaaacggaaatggtccacctttctaattattataagccggtgattattatatagttttatcataatatccctcgaggtttattatcatatattagaataaataaatacttgttgaggttggtaaaattataaaattgatgaagctgaggctggattttagaagaacgtgaattgacacctctttaattatgcatctatgattggttggtgactattatattgacttttaaaatcgtttgaacaaacttctaattttctagtttaatatgtgtatcaataatgttcattatacaactttaaacgtcaatgtagacaccaaggccaattttgttttatcagagttatggaactagaaaatacaacttgtatacttgtttagtagaacaaggactgtaccatagttacttgcatagaaagataactatgtatcgatgtcaaaagatttatcttctctgaccattttcctttacaatgtgagacattga

SEQ ID NO: 28128 - DNA, 1156 bp, Arabidopsis thaliana landsberg
ataacagctgtctctgttttgtatgcatattttgccttgattcttaataagagtgttattattataaggaataacatattctttaagaccatgtgttattcagacgttcagattttgtgctcagtcagttggaagctggaggaactgcccttaagtcaaacctggcttacacaaaaactaagtgggttctaacgcatttggacattttacaaaaaagcaacatcaagtgttgtgattatttgattatacaaaacctaaatcttcatcttctacccttttacttgtccttcgacccgataaactaactagtagaggtgcctcatatgcctctgttgcagtcttcttcgtcgcctcaagtccttgttggcgcagaacatacaagacctctttcatggaaggtctatgactaggcaatgtgttagtacacatgagacctagcttgaaaactgttgtcatcgcctcagtcgtggaagcttctttgatgtcctcatcaaacgcctctgcggtcggttttccagattggtaatgtttccatgaccaatctgctaagtttgtgtgttcatctccgttgtttccttctcttccagtcaccagctctagcaaaactaccccgaagctgtacacatcgatcttctcatctacctttgacgtatatgcgtattctgcaacataaaaatattagagatcacacaatgagcgactctattcgactctaaagaatgttttttgtttacgggtattacctggagcaatgtaaccaaaggatccagcaacagctgacatggtatgaggttcttggttttgcttaatcaacagtttagccaacccgaaatctgcaatcttcgcgttgaattcagaatcaagcaagatgttactcgacttgacatctctatgtatgattgcgggagtacaatcatgatgcatatagcaaagtccttgagctgctccaactgcgatattcaacctctgtgaccatgtaaggttattagcctctacggtacctcccttcttctttccatgtaaccattgatcaagactgcgtttctcgagatactcatacactagaagctttgaatcttcccttgagatacaacacaatagtttcactatattcgagtgcctgatcgttccaagaatctcaacttcagcaataaac

SEQ ID NO: 28129 - DNA, 187 bp, Arabidopsis thaliana landsberg
cggttgccagtctggcgggtggcatcgggcacgcgcacgtcacgcaccgcgacgtaggtcggcgagctgtccaccgtatggccgccacgcagggtgagcttgtcgttgacgtagtagtccgcgccgatcgacgcatacaccgtgttgcgccagttgaacgtttcgctggtatcgggctgggcagcgt

SEQ ID NO: 28130 - DNA, 1294 bp, Arabidopsis thaliana landsberg
agtaggcgatagggtcctgaggaggaggtgcatatccgaatgcttcatatccttgaggaggatacccatagtatccttcaccaccaccatactgggcttgatcaggttgagactgtgaaattcgaggatcaacaagtcatcagatcacataacgtatatgaaagcgtagtaagcttggtgcattgtctaacagatacaaacctgtttgttggaaggactgcgaccccatgaaagacgaatgctttgtcccccaagttgtgttccgttcaacacagaaagtgcttgctcagcacatgccctgaagcatacagacagattaaatatgtgaaaaaacattctcaaaataagtaaagatgaagttcgtctccaagttcacatttacctattggcgtattgaacaaatccgcaacgttttcctgcgggtattttcacatgaactagttcaccaaattgaccaaaaactgacttcaaatcatcttctgttacactttgatccacagctccaacaaaaatctggaatagagaacataacgcttcaatttcaacaatatatcccacagagaaaaaggcttaggcaacgtcaaagaaaaaaaaggcttagggaaaccaaaacaagttacgcactgttgtgttagttggatcactttctcctgaatttccttgagtgttctgatatgaagctgcaataaaacagtcaagagaaggtaaggaaaaaaacctcaaacatctatttatttaattaagctgacagtgcaaggacacagacactaacacaaacgcacacacacgacaatagcagtagcagaacttatccaaatcaagacccaaaattatcaacatataaagcaaatgccatacataggttacagctcgaagataaaggtaaagtgattctgaagttagttgctaattaatacaaaaaagcacattaaagatatactaggggaagtgcctgcaagatccaacttcgagaaattagagaatcggacctaaattctctagggtatcacaagtaacctaaattccttccaaggtctgacagtcttaccattgtaatcaacttttccgaaagacgaaatgtaacactaaaaaaggttgcaagtataaatttagaggcacaacgtaactgaaagaaggaaaaaaattgcagcactaactactggaaaaagatgaattgagaggtatgaaaaagatatcaaaacactctttaaggattcaaactggacaaaataaagcgaagagtaatgaactatgtaacatgaaaagaaataaaagatagggctaaaaattaaaa

SEQ ID NO: 28131 - DNA, 3231 bp, Arabidopsis thaliana landsberg
tatcgcattggaagtaaattttggatatgcttcacacttacaacatgactgatgcaaaagccgtctccacaccaatggcatcttctcccaagttgacccttacaacatgcactctactctccgatccaacaaccttaggaagcttgtaagtagtttgcaatacctctcctttacaagacttgagtattgcctatgctctcaatcggttatccggatttatgcatcgacgaacggaggatcactcggaaaccgcaaaatgaatacttcgatacctggtgggtaccccaatacatgggattttctaatctagaacaaattctctcaatctccatggttttcagatgctgactaggcaggaaatccaaagattgtgtctccacgggcgcttatattatctatcttggtagaaaccttatatcttgttcagttaagaaacaaaatggagtcccacgattgtctacggaagctaagtactgttccgtcgctaacacagctgcaaaaataagatggatatgtaatctactcactgaacttgggatttctacaatatcataaccggtcatgtactgtgaaaatgtaggcgcaacctttctctctgcaaatccggtctttagttcaaaaatgatatacattgccatcgacatacatttcattttgaacaagttcaacatggtcttctatgagtagctcatgtgaacaccaaagaccaacttgcggatacactaacaaaaccattgacacggcaacggtttcttgagctgagagacaagattgaagtagcatcagaccctctatcttgagggggcatgtcacagatacgattagatcatgccttcaataccatcgtatctcctcttaccatctatagttctttctttatctagtcttcgtgtctaaactgtatatatagatgtgtaagtctcattgtaagatatatgaaacacatttattagacaattgtagcatcaataagttttgttctctaaattcgtcaattcaattcaaaatagtttgtatgtagaagcatcctcattttaagaattggaagagtaataaaaaataatagcagatgagtaatttaatttaagttcattacttagaaaactaccttattagtggataaagtatctaaactttaaattacacttggctcttttgcatcatgtttttgcataagtaaataaatttcactttattaagccaactaaccatttcattaatgatatagcggggttgtggcccatatccactcttctgatcatgagattaatctttgtgccctttttaaagaactaatagacacatctagttcaagtcagtttttacattttcatcacaatgaaatttttgatgtagaggaaaattctgaaatatagagactaaacaaaggaatttcataagatggaggtgcgaagtgatgacgcatatctttttggtataatagtttgtgtcctctaggacagctatatttgatcatgggtgagcgtgggtgtattaccttggggattcagtctaatgttactattgtgaatgttgattgttgggtacaaaccaatgttttatatcggaagttaaaaaaagaaatttctaatatataagccaactccaacttcaactagtatgaggtttttaaagaaagagtccaataataatttgtggagttgaacatgtaagtccaaagaggatatcatcatattaaaaagggagttagaaaagacccaatacttattaggatccctgccgaagacggtactgaattgttgtgttatacataatagaagctgagattgaacgatgcacgagttgtttagtttgcatctaggaaaattttgctatgtggtaaagcctttatgaaaattcaaaggaacttgagttggataaattttaaatttattaaatatatgtatatatacaacatgacaatagtttaggactttaggcgatattcacatcaaagtaaaacgaattaacattgaactcatcgaagttaaaattccacttcgcatataatgtccataaatttacaaattgatcaaaacgtgtgcttctctccttggcgagacgaatttgtgttctacccggtaaacctataatcatttacaaagattgtgctgtagtgtttaactatcttcaattgtgtttctttagctttatgtgacctcatgtctttataaaaactaatctcaattgttcgatttaggtattgtcattaacaagaacactcattaatttttatttttattctgtcatgagatattatttaaggctcagacgagctaaaaatacggaaaaatgtttacataagtaacatgtagcggttcaacatgattttttcgtgccaaataatccaccttgacatttgcagtacaagatattaaagataaagaaaatatagtgaattttttcttgtcgatcaaaaactcctccaaatatgttgaaaacgctgaccattcggttagggaatacaccattttcaccaggtctgtgaagaattcatctaaaacccagcgaagaaattttattaaatattaatcatgaactatatatagatgtttatagaagagatgattacattacatagtgagaatcacaatatatatacaagagtgagtagctagggtacatcaacgtaatgaatgagagtatatacgactttacatatgtgtatccatgacagtagcaatctaggatatcaatcatatcctcaatacgcccccacaagatggagggactttgatgactccaatcttgcgagagaagttctgaaaagcgacgcgggacagaggctttgtaagagtgtctgctaattgatcatgagtggagacatggacaacacgaagtgcaccagattgaacttggttacggatgaagtgataatccgacgcgatatgtttcatccgagaatgaaacaccggattggcacatagataagttgctcccacattgtcacaatagatgaccggtggatgtgacaattgaataccgagttctgtcaataaggaacaaatccattgtagctcggatgaagtgtttgccactagcctgtattcagcttcggtagatgagcgcgcatctcctttctgcttattagagggccatgagatgggatgatgacagaggttatcaatgtagccattagtggagacatagtcatcggtacgccggcccaatccgcatcggagtatgcgtgtactgataatgtgttgccttcgttaagcaatgtgccatgat

SEQ ID NO: 28132 - DNA, 2721 bp, Arabidopsis thaliana landsberg
tgcgtctcagacaggatttgtgtcttccatattaactccatcgtaaaggagtcgcctgactttaagtcttttgtttcagcaaactctttccaaccctttcccaaactcattgttcctttcttgtcccgtttaaccgttgtcagccacttcctaccatctgtatccaatagatatatcgttccaggctggttaatattgttctcccttgcaaattgcgctgaaagaatctagaaaacaaattgatactcttattatgtgataaaaccagtaagagtaaaatagagaaaaaaactaattctctgaagcaagagttgtttgataaactgaccagcctattttttccgacacaggttggtgtaattgtaaatgttacaaattgtttttggcacgatggatttaaatctctcccttttagatgattcctctctttatccactgtcctgatcttcttcatgaattgacttggaagaatctgcaaaagatttgaaccaacacatctctcattatcagttatgatttcaagagagaaactatctcacctctgaaaaacaagagtagtttgatgaagttaccaatttacaggctttaacatcttcaggtgtgagtgctggagtcacgattcggtttttgattgttggggatgattctctggttttatgttctgaggaaattgactctttctcgttagcttttgaactcctaaactcggtacgtaacaaactgagcataggagttgtgtcttcccatactaactccatcgtaaaggattcgcctaacttaaagtcatttgcttcagcaaattctttccaaccttttcccaaactcattgttcctttcttatctcgttgaaggcttatcagccactttgtaccatctgtatccagcagatatatcattccaggcttgtcaatattgttcttccttgcaaattgtggggaaagaatctggaaaaaatatgaaacgagggtaaaattaataacctcttgttatgggataaaaccagtaagagtaaatgagttgtttgataaacttacaagtctatcttttttgatagaggaaggtgtaattgttaatgtcacaaagtgtttttggcttgatggagttaaatatgtccctctcagatatttcctctctccatccactgatttgctctcttctttgtcatttttctctttgctgttgtcatctttgatgttcacgtctttcctgatttttttacatgtgctaggttctattggaagagactttttctggtttgtttcagatcgccctcctcctgcttctctgtcaatgctacagtctgcaggacacaagctaagaacaggagtttggtcttcccaaatcaactttagcgtgaaggagtcacctgtctttaagccattatctttaacaaaatctttccagccgtgtcccaaagacatggcaccatttgctttgtcgaataacaaattcgtctgctgctttataccgtcttttcccaacagagtaatcctccccggcttgttgatgccattctccctcgtgaatacctttgggagacgctgttgaagatttcagttaaagcaaaatagtttatcaaaaccatatcaaagtacaataaactaacaaccactaaacaagagtcatttgataaacttaccaatctatcactggaaggtgtaattgttattgttacaaattgtttttggcttgatagagttgaatctctacttttcagatgatccttctttctctcccatgacatgttctcctctttgtcattgttgctgattttgtccctgttgctaggatctatgaaaagagaatgtttctcgatagcttttgaaatctcttcctgctctctgtcactgttagattctggactacacaaactaagcacaggagttgtttcttcccatatcaacttgagtgtgaagcccgtctctaagctgtttgctttaacaaactctttccaaccctttcccaaagacattgttcctttactgtccagcagaagacttgtcaaccactttctaccatgtttatccaaaagacatatctccccaggcttgttgatgccattttccctaacgaaaggcgccgaaagactctgtagatatttgaacaaaagccgatttaacatgcgtcacaactaataagcgcagaatcaagagttgtcattgataaacttaccaattttccaattctagcataatccggtggaagcgtaaatgttacgaattgtttatgacttggtgaatatgatgaatatggtgaacctcttggtttcggaatatacttctttttttctactatattcatcaatgagtccaacgagctgcactcctctttactgtcctcccttgtaatgttctcttccccattgatagattctgtaggacagaaactgagcaccagcgtttcaccttttcccactagtttaacacaaaaaaacttcctacctttttcccgttttcgtcacagaaatgtctccaacctctggttatgcaaaaactatctaagtttttgtcgaacttcagatccatttcccatgatctatcccctccatctgttagaaaaatcttgcggcattttttatttagaccattagaacttgtgcaatcttgtggaagatactgcaaaacaaaaaaagggttcacaaaagaagtgttgtcagatgaagaagagccagtgccagtgttcacaaaaaaaaagggttcacaaaagggctaaacaatttaa

SEQ ID NO: 28133 - DNA, 1252 bp, Arabidopsis thaliana landsberg
ctgtaatgtcatttaagtcgcaaggttacagatagaaaagaataatggtgtacatatatagaccttttgtacatacatatacaatcctttttcttcttcttagctctctcttgttttgtttcattcattcttatgaaatcgtcagattatgcattcccgttgattcttcctctcatctaataaacaagtctgttacttacacattagaaggaaagcagagagactcagttccagatgtgatcgtcgcatggatcacaaccttcctgagcaatgtctgtgatctgaacgccggcgtcataggactttccagcttcccagttagctggaaggaccctctgcgaccagaccattttgccgtcgtagcctgcggtcaccacgaacctgaactgcagagctccgttgggtactttgtcagtaacccacacggctccgtggcttctggtcatgtaactccaatgtgacgaaccaacctgagcaatgtaaatggctaccacttcagtttggcctccttggtacaagagctttatcgccaagtagtttggatttttgcttgattcttcaactctcacgttcatcttcttgttaccgtaatcgcaaggaactctgtttcaatattcaatagttcttattactactagctacttgaaggaaaatgagaaaagctagcataacatagatggttcgggaatcgaacctcctgtattcaatatcgacaatgccttgtttgagaagatctctgtcggcgccaacaacaggcttagccatggccctaaaggctctgctgctaaggacaagatcggtttggttggtcttgttcaagtctgtgacaatcacggtggttcctttgctgctgcaaagcgtcgggttcttgcatctgacctggaagcaactccgcagccggagccgtctttgtagatggagggcagagccgcagcaatgtgtccggcgaagaaaccggtagccatagagccatatgcacaagcgccagctgcaaatgacacataaacagggcatgagaaaagaacctcacagatagttaaaaaagaagtagttaggatgtttacaagagagagcagaggcagaggagaaatgagctgctttagctcggtgaagacatcgatcacgagcgttagcggatgaagagaagaggaagatgactacgatgaggtagagaaagcttcccatttttatgtttactaaaagaagcaataatatctttatgatcaaataagagagagagatatgtaatttc

SEQ ID NO: 28134 - DNA, 1214 bp, Arabidopsis thaliana landsberg
caaatgcaatcatgttttttaactcaatacttctttatgttacactaatgatgatcaatgcggtggttgaattttacaaattcaaaatttttaagttcatagaaactagtttgatcttcgagcacatcattacaaaacaattgtaaatgtttaatagagtactttttaccttcttttgtcttcaaaacaactataaaaaccaaaattttgttttattagtaaacaataataatagtttttatttgtaattagctattcaaatatattgattataacagtaaatattcttttatgataaataaaaggcttgataaattataaaagtagccaaatgtctttataaattaataatatttatcgataagttaattaaaaattttacagtctccgaaagcgtatatatatcaaagaatgttttctaatccttcgccggccggaaaaaaatctacaaactccggcgataccatctactccgattctccttcacttccccgagaaaccaaatcaaacttgatctgagaatcttcaacaacactttcagatgcatgaaaacggatttgaaaatccccaatcagtgaaatcgaagatctagttatggatttcttagagctagaagcgatcgaaggattaagatggtcatggaactcatggccaactacaaaagccgattgcgaatctctcgttgttccattaagtatcatgtatactccattgatgcacttctctgagcttccaacgattccttatgatccattgatttgttctcgttgtggagctgtgttaaacccttacgctcgtgttgattaccaatctcgaatctggtcttgtcccttttgctttcataaaaaccttttccctcgttcttactccggaatcactgaaactaatctcccggcggagctttttccgacttatagcgccgttgaatactctccgctaccgtcgcgtcaatcgggttcaaatacgacgactccgacggctgctgcgagttggagtaatgggtctaatcaaggggttagatcattgccttcgaattcgggtttttcttctctagcttcttctactgttggtgatggtggtgtgattggtgagcatggaccagcgggtgtgtatgctgccgatgccactatggatgatgatgagtaaagagctgcgaggagagaagcaatggctgataacagatgaagggactgcaaattgcttgtcagatcctg

SEQ ID NO: 28135 - DNA, 3887 bp, Arabidopsis thaliana landsberg
agaaagaagagtatatgtgtactatctttagtttagatattaccttttgttttgacaatatcatttattgaataatgcattcaacagggaaaactcaatgatggaagagaggtagcagtgaagctattgtcggtgggatcccgacaagggaagggacaatttgttgcagaaattgtagcaatttctgcagtccaacatcgcaacttagtaaaactttatgggtgctgctatgaaggagagcatcgtttgcttgtatatgaataccttcctaacggaagtcttgatcaggctctatttggtacgcacagaagcatgtttatcgatccatgcttctgccaggctaaaatcactcattatgtacatgtcattggtttgaatgttgcaggggaaaagactttgcatcttgattggtcaacccgttatgagatatgcctgggagtagccagaggtctagtctatctccatgaggaggcaaggcttcgcatagtacacagggatgtgaaggccagcaacattttgcttgactctaaattagtaccaaaagtttctgattttgggcttgcaaaactgtacgatgacaagaaaacccacataagtacccgggttgcagggacaatgtaagtaactcccaaccctgacctctggtttgcaacacaactatggatttataacacatgttggtgattttactgtatcaatgcagtgggtatcttgcgccagagtatgccatgcgtggacatctaacagagaaaacggatgtatatgcctttggtgttgtggctcttgagctagtgagtggaaggccaaactctgatgagaacttggaggatgaaaaaagatatcttcttgaatgggtatatatctaacttttcctacaaacacatcctttttaattccaaatttggtgaataatttggtctttgcaggcatggagcctacaccaagagccacgtgatatggaagtagtagatccggatctgacagaatttgacaaggaagaactgaaacgtgtaataggagtagcgttcttgtgcacacaaacagatcatgcaatacgaccaactatgtcccgagtggtaggtatgttgaccggtcatgtgcagataacggaagccaatgccaagccagggtacgtctctgagagaacatttgagaatgcaatgagcttcatgagtggttcaacgagctcgagctggatattgcctgaaactccaaaagattcttccaagtcccaagttgaagaacatggacgacgacattgaaacttgaaaacttgtggtttttctattttttgttcttacataaaaaaaaagaagtcaatatagaaatcgttgttggtaaataacacatatacatattcgtttgaccaaaattggatttgactgtttctcctgaaagttgtgtttggtcccatttttaacattaaaatcccttaaaaccatcattggcatttagtatcaaagtccaaaggtggtgatgcttcttgcactcgtaggcagcagccgccattgttgaaatctcccgttgacaacgcagcggaatctcggtttaagcgcgtccacttcacggcttgtggatgcatcgcgtgagacgcactgctccgcgtagttggttagaccattaattaaattcaaattaagccaaatgaaaagtatctcttcaaagtccaacataaacaccatttttgaaccaaattaaaaccttctccgtctagttttggcggctatcatcttcttctccgtttaattttagtttccgacgatgctcaggctatggcggtatctgtgtctactcctcactgtctggttcttgtgtaatttcggtccggtttacgtggttcgagctcaaaaccgaacaggagccaccacacatcccgacgaaggtctgtcttcttcttctttgaacaacttgacaagttcaaattcaatcgatcggattgaagactgtgtagctaggtcttaagctactcttctgatcctaattgataaaaccgatgtttacatttataatatttttttattttatcctaagaagtttaccggtttagtttcaattgacattttttgtttagttaatcgtattttgttaagagctaataataattgactgttgtaaataaaaacagcgctagctttgaactcaattttcgcggcttggaggattcgggcgccgagggaatggaacatcagcggcgaactttgctccggcgccgctatcgacgccagtgttctcgactcaaaccctgcctacaatcctctcatcaaatgcgactgcagtttcgaaaactccacaatctgccgcattaccaacatgtagggcctctttcccccttttttctgcaccccatttgttcgacgtattctcccactgggaattgacttttgtgggggaaacgaatggttttcaatttcatgtctcaaattcttctcctcatttttggatgttgttgatgttttcacagcaaggtttatgcgatggaagttgtaggatctatacctcaacaactctggaccttggaatacctgacaaatctgtatggttttactatcacttgatgattatacaatttcagctacaaaaggagcacacattttcacaatttaaaatcacttctttcaggaacttgggtcaaaatgttctcactggctcacttcctcctgcacttggaaatttgactcgaatgcgatggatgtatgtctctgacaccttctttttttcttattgtttgtggtgaatgtctacacctttcattgataatgcacccttataggaacatttcttgtttctcactctcaattgtttatcacgtaggacttttgggatcaatgcgttgtctggccctattcctaaagaaatcggtttgcttacagatttaagattactgtaagcttaggctgcttcttcattgttttaatataattgtctcttcacaatgtttctgaaagatcttgacggttccttatacatatgtatatctttttgcagtggtattagttcaaataacttttccggttctataccagatgagattgggagatgtacaaaactacaacagatgtgagtctatctgttaaatcggcaagcgttttatgtattgatttcctggttataatttagataggaaatcttaacctcagaaatcatctagtgtttaccgaccacaacattcttgtgtaattacctttttaaagaatttcttccatcttttgaaggtacatagatagttctggactcagcgggagaatacctttatcatttgctaacctcgtgcagctggaacaagcgtaagatatactgaattcgagtataagctttattgttgggtttgtaccatctatttattactttacgttttaatctcaatgttgtaccagttggatcgcggatctggaagttacaggtcagataccagactttataggagattggaccaaacttactaccttgtaagaagattttcatttttacgggacttatattggatttgttacattcatcttgttttaatatagtctgtattaattttcctcttagtagaacactcttctttatgttttaatttgggattcaacgattggtacatgttttactgcaggagaattattggaactggtctgagtggtccgataccttcgtcattttccaacttgacttcgttgacagaattgtatgtgttgcattggtatcagaatcatgattatttactgttactttctctttccctttcctcacatattcatattcgatatgtaggaggcttggtgatatatccagtggaagctcttctcttgatttcatcaaagacatgaaatctcttaaatgtattgtaaggcagctttgattcaacttccgctccaatttatagcagatttttgtagtgttgaacc

SEQ ID NO: 28136 - DNA, 541 bp, Arabidopsis thaliana landsberg
cggtgacagcgaagacctgagagctacggagagaaacttacggtctagataagtaagtgccaatgtaaaaaagccgttgaaaatgacagtaaaaccaagcaagcctccaactcctatccagtaccagttcttatcatcaaatacatcccaaatattaagcacacttgttcccaacctcgttgtgctgttgccagactgcattttttcaccagaagtaatagttaattagctacaagctaaaggttggtgatgaggacttacggagaaaagaaaacatgaagaagaattaccattttattcatccatctaggagcaaacaattcattgacggtgatggcattgaaagcgtaagaaagaggggatatccaataagcccatctccaccaaaccggaatctcacttcgaggaagaaggaaacctccagtcaagaacaccactagtagaacaaggacaccgccggtattagctatggtcatggttctacatgtagatgcaatgaacctgaatatcccagcagccatttgttggatcaagaatataa

SEQ ID NO: 28137 - DNA, 1321 bp, Arabidopsis thaliana landsberg
gacagtcgttatgacggactaatcacggcttgtccttttgttctacggataaaaggccaattctttcacgagacaggattcagtgttactctcacaaatgtcaaaagtttcatcaacgacatcaaagcacttgtgaagatctaacccaaatctttattgcgttcttgaaggcagtaactgtcttctcatccgttatgtcacatcctctcctgcttttcttgggaaagaagaaaaagctttagattttgacctaacttactaccgaagcaaagatgatcccttagcaccacgtctctacgaggatttcatcgaagagattgaacaaatggcgatatttaaatacaatgcattgccacattgggggaagaataggaacctagcgtttgatggcgtgattagaaagtacaagaacgcaaacacgtttttgaaagtaaaagagagatttgatcctgtagggttgttttcgacggaatggaccgatcaaattctaggtttaaaaggaaacgtgacgattgtgaaagaaggatgtgcattggaaggactttgtgtttgttcggatgatgctcattgtgctcccaagaaaggttatttgtgtcgaccaggtaaagtttatacaaaggctagagtttgtactcaagtaaatcagtaaatggctatgacgatcataccaaattttaataatatttgatgtttaatcgtatatgagaaaagtgaaaacagaacattttacagaacaacgtcttttgttcattatgacaagcttaacaagttttatggtcacacgggcctttgttgttgggctttagccggtttatttggttaaactcggtttacatggttagtcctcgaataaaataatttcggtttaaagatttgctgcggcttctctgtgaatgtatggtcgttgatcccatgtttcttctcaacatattagattgtgtattcgggctcagtgatgagcggcgcatctctggatcattcattggttccgacgaccgctgtagctggtgcaggtgcaagcagtggatccgccgctggtgtaagccatttccattttccgccgcatagtccgtcaaggcaagagccaaaagattaagctatgcgtggtcagttcttactcttttcccatttcgtttcatgatttcgaatcttaggggttccaattagaggttttctataagattcggtaatcaaatttctcagtgatcagagatttgagtatcacatctccagatttagggtttttgatacaatctgacaatcccaattttgttgccctgagttttgtttacttggttgattgatttgttgatttcacagt

SEQ ID NO: 28138 - DNA, 1515 bp, Arabidopsis thaliana landsberg
  unsure (1)..(1515): unsure at all n locations
aaggttgttttcggactggcaggtaggtagacattctactagacagtcgtgactcggttctatgaagaatggaatctgtgacaagaacaaataaaaaaaaacattttgagtgttataacctagattgttgagaaattataactcatttgtgatttgtagacatgatcaacaataagctaaattgttgacaaattataacaactatatagagcacatcgtcttgtaaaaaattgtaaggatagactcggatgtgtattattaagagacttacggaatatcggtcttgaccattcccaagtactcgatgcaatgtggatctgtatatatgtgagaaaaatgtcagctagaaaactttacttgggaaaatgacaatgtagagggtgaaaagagacattaggaagagtaagctcatagaaatcgaaattacttaaaaatgccgttgctccaacgctccagcaagtctccaagattgacgatatatgctctaaaagaagaaaattataaaacaattttttttatcatgggagttagtgtagtgtttaaaattggatcatggatcctaagaccttaaattctcgttataccctttaatagatggtacatattcccacttcctaggcttcacgtccttatccttgcatatctgccatcatatagcaatttctcataaccaaacctggtcacatctaaagttatatgactagcaaaaatgtgaaaacctggagcccggttacactatcggttgctaagagagtcagcattccgtaatcagaatgagctccacatccaaatattcctttcaagggatcagacatccctaaaaggtaacaaaaggaagaaagaaaattgtttaggataagtagggctacgaagcttaagaaaatatatcaccttcgtaacgaagcaaacgcataactgcgataggatttcccagcatttccggtttatcaaagtaatttgtgtccaagtcgagcgccaatgctaataatctagcaagagccttgcaaaccctcctgaccatgtgaaaagctcatcactagtataacgtttagaaaacttccctgttaggggcctatccacatcaaaagaaaaaatgtaaggtcttatattgtcaaaaaaacacaaggattattgttgattttgcccttttcatcaaaatcttttgaaattaccacttttattaaaaattacgaatttaagattttttggcaaaaatacgtactttatatcaaaaactttaaatcttgaaaacaactgcaaccgactaaacccaaatataatgaataaaacgcatgttaaattatatttctatagcctaaaaagtggcaaaatccacaaactattcaaaaaatttgaaaaattcataaatgccattaaaaaatagcaaatccataactgaatccacatactaatccattaattattaaaaggnnntagnatggccttagnaaactgaagaatttaatcttgcctcaaagnctgaagaaataaactagctacttcatgataataaac

SEQ ID NO: 28139 - DNA, 1650 bp, Arabidopsis thaliana landsberg
gcgaccacacattctttttgggaacactgctcaatattgctactgcggctaattggcatttagctacccctactgtttctttcgtcttttgatgcttctggtggacccaaaaaatgagagcctatgggcccaaaactttttcgagattctcttctctgttctcacccccaagcctaaatatcatcttccatcgcaattattggcgacttactaataatctccattcgttagctaaactactagtgaatttatacaagtttgtgaagtttaaactccaatacgtttgatttattatagaatatgttatgctatcatgcacatgattaaatggttcaccgttattagattatcattatcatcactcaatttcatgagtaaagattggtttcacgagctaacttatgagttatatcaaatcgtctagtgaatctaaaacatataatgttaagccaaactaaacagaattagtgactcattacaacatctctatacatatatcaaaaaggaattgcatacaaaagcgtattttagatactaaatcgttttgcatgatagcataacatgcacaccttcatgagatagcaaattgtttttttcaattacaaaagtaaaaagtaaaacaaaacgtggaatacgagagtcgagacaagggcataataggaaaggtttcaggacgctttctgtgacctgtcggggagtagatgtctacacaaaacgtaacgtgtatatacaatacattcatgtgtaccattttcttaaatcaacattttgtgtttaaacccgcctaaagaggaaagtacttacttctaattacggtttatatgaatataaaattacgtttactacttccgtccacttttggaaaataataccattccaagaaaaaagaagattaaaggtctaaaaataaaaaaaaatattgctctcttacacacctttttatcatttcttattttcactcacaatttgatctcatctttaaatttttttgtttcccatttctctcagaaagtgttctgttctttttttcttttgtaatcactaaatgcttcaaaagtttgtccacaattatatttgaaaaaaatgtctgtatctgtagcagcagagcatgattacataggtttgtcagagtttccaaccatggaagcaacaacaatgtctgacaaaaccaaaaccagagacaataacaacggtctcaatttcaaggctaccgagttaagactcggtttacccggttctgagtcgccggagcgagtcgactcaagattcttggctctcaacaagagtagctgtcccgtgtcaggtgccaaaagggtgttctccgacgctattaacgactctaacaaatgggtcttctctcctggatccactactgctactggtgatgtcggctcgggttctggtccccgtacctccgtcgttaaagatggaaagtcgacaactttcactaaaccggctgttccggttaaggagaagaagagctctgctacagctccagcttcaaagtaagctttttttgctctgttttagatttttctcagcttttttgctctgttttatggtttctgtgaagagagattcttgatgttttttttttttgattgagcagacgcaagtggtgggatggcaccaataagatcattcaggaag

SEQ ID NO: 28140 - DNA, 1619 bp, Arabidopsis thaliana landsberg
  unsure (1)..(1619): unsure at all n locations
aggcataacatttgtgccaaaacgaaataaaccaaaagtataaggggcaatgtttgactgatacgcgcacacactttttcccaatggaatatcaacacaaagacttttctctcatgttctcatgtgttgtttataaaagcaaaaacatcgtttggaggttttacgctagactctgtctctgacccaacgaagacgttaataaacaaacaaacaaacgaagagagaagatgaaattgatttggtcaccggaaactgcatcaaaggcttacatcgacaccgttaaatcggtaagttcatctcctctgnnnnnnnnnnnnnnnnnnnnnnnnnnnnnnnnnnnnnnagatttcatactttctcacgaagtaaagcttctttcgatccttttcacattactcgaaaacccaattatctagatgtgataaatttttcgtatgctttgggattttgagacataaaccttagatctttgcacgtcttggccctttcttttaacaatttgtaacgttttttttaaaaaaattgggcaacttttgcagtgtgaaaatcttggaacgccgggagcggcggagctagtggcggcgatggcagcaggatggaacgccaatttgattgtggaaacatggtcagaaggagaaactatagccataagcgttggcttaaacatagcgagtcgacacacaaacggaagacacatttgtatagtaccaaacgcaagatcacaaactgcttatcttcaagccatggcagaacaatcttgctcaaacttgccggagacgattattatgaacgaggaaggagaggaattggagcacaagatgcagacgctacaaggaatcgatttcttggtagttgactgggatcagaaggatttcgcagcaaacgttttgagaaacgctgtgtttggtagcagaggagctgttgtggtctgcagaagcggttaccgaagaagcacttcgtgtttcagttggacaaaagcatttagtgaccggaatgttgtgagaacagtgactcttccagtttctggtggtctagaaatcgctcatgttgccgcagcaagaagctctgggaagagtgataataacagcaacaaaagaaaatggatcaagcattttgatcaaagatcaggagaagaacatgttattcgaaagtaaaacaaaaagtgaggaatgttatgtttgatactttttttgttcataatttgtataagagtggtttgtacataaaatccaatatactgcaaatttttattggatgatttgattgttgtgttacattaaattccaaggaaataacataattttttctaagttaaaagctttagaatcaacctggactccattgtatggttttaagtttaatcatcgtaactaccgcggcttcttctcgcagatttcttgtctgatagaacttttttgcttttaagctcgtttattgtcagctttcgcagctctgaaaatgttagaattcaccgccttcaagattttggatttgagagttaaaacactggaataatgaaaaaagatttggtattttggcttggttggttctcacagctttactattttcttctctctgttcttctgacggtggaggtggaacatatgaagccccatcaa

SEQ ID NO: 28141 - DNA, 1271 bp, Arabidopsis thaliana landsberg
tctaagtctgttgttttgaaaaccatttttgccattgtctttccttcatatactgtttctcgtgttcataggcctgtcatctcttgtgtctcttatcaaaagagctactgggagattttgaggcatgcgctgagacgtttattccagtaagcttaacctcctgtcgtttactactatggcattcaacacatacacattcttgttaatattggtatatggtaatcaggtgcttttcaagctggttgtgattactgtgcttgtaattgcagaatctgctgataactgcataaaaacggtaaattattagctcgcttattttggtttctagaaccatgcctgctcggctaagttttgtgcttacacagatggtttcttgctattccagatgctgcgtaactgcaaagctgcccgtgtacttcctcgcatagctgaatcagcaaaacatgaccgtaatgcaattctgcgagcaaggtaagctggagcatttgtatcccattttcttgtatacagatttatgatgttctggaattgatcccatttttttgtatacagatgttgtgaatatgcattgttaacacttgaacattggcctgatgctccagaaattcaacgatcagttgatttatatgaagatctgattagatgctgtgttgcagatgctatgagtgaggtaggtttctggtaccattttccataatacgagatgttgaagtagggtttatggttgcttgtttatatatgtggtaatgcagttattcggattcgatgcaacttttaatgaatgtatgttttgcatcaattgtaacaaatgatttgtatttactgtattgcccagctatctctctcccatgtgccattgaaaggttttaatatattgaataacaggtgcgggcaactgctagaatgaactacagaatgtttgcaaaaacttggccggatcgttctcgccggttgttttcgtcctttgaccctgtcattcaaagggtaaggcttttcaactctctatattctgcttattatcatcaatgaggcttgataaagcattccatatgttctcagctaataaatgaagatggtggaattcataggagacacgcctcaccatctgtccgtgagagacattcccagccttcattttctcagacgtctgctccttctaacctacctggctatggaacatcagctatagtcgctatggatagaagttcaaatttatcatctggaggatctctttcttctgggttactcctttcgcaatcaaaggatgtcaa

SEQ ID NO: 28142 - DNA, 1617 bp, Arabidopsis thaliana landsberg
gtctggtttagtttctattaaataggattttaatttcaaattattattggacactattgtatcataggttaatgggtttcaattacgttttcttttctataaataaattcatataaagttcacttgtttcacctacaaaatgatttttgatgaacttccgtagtatccagaaccaaattcttcttttccctattaaaattgtgcgcatgttccttttgacatgttagtcgtgagtttttttttttatgttatgcatttctaccaaatacaatatttgatctagatgtacttaattagcttctttgttataactcgtaccaatactcttcttctctcgcctctatatgctcaaaaaatttatatggattatttgttacaccattgagaatccttgttttattcaagttctccaaaagttcattctttgaacagcttagttttttttcttttcagctacaagtttctttttaagctttgctacatacataataaactttgaaattatcaaaattgaacacacatagactcttctaaattccagcaagctccatttatacttacgcgattcatctttctcatcagttaagtatatatttatgaagcttccctatctaagtttctagccgcatcctctcccctccaatgcttgggtttctcaactgatcttaatttaattttcataaaggcctctcggcttgaaattacacctcttgataaccctccgaatcgcttcttagcttgttccaccagaattattgtgtgttccgagagactcgctagactcatatttgtcgcgtcctttttttacgtatcataaatcaatgcaaggccacaaagttagatacgttttattctttatatatctgactatgtatcacgacaatcttgaaccatattcatatttcaattttgctagatcacacattcttcttttatatacatcactagagaaatggaaacgtaggataaaatattttcaaataacataaacgttttaccttgtcatatttattaggataaaacagtccaaaaccatagaagcttagaccgattaacaaaacgctatcaaaggccaatataaaaaaaaaacagagaactacttagatactataaacaccaatacaatctgctcctgctcaagtaacaacttgagatcccgcttatttatcttaacatatagtctggtcgccagatattgagtcaactattctcacatagaacttacaaagtcaacgatatccaccacatcatggagtagagagttggagttcaccactctacagttcaatctgatttgtccttgagttcctgtagttggtgtaatgtttcccatcctattcattgcctccacaaatgcattgaagaatgtttgtgtgccatcagcatatgctctcaccaaggggattgtgtcagtggcattcgggctagagaacaactcttggtcgctctggataagaccttttcgctctttgagattcacgtagtatttgttgtcgaaaaccgtaggcgtacgtagatcaaactctaccaaggcacttcgattgccattaagaaagcatagtccacgaagagtttggaggtaagtagtattgagggtagggtcgggtaaacctgtgt

SEQ ID NO: 28143 - DNA, 438 bp, Arabidopsis thaliana landsberg
tagaagtatgtctcgctataggagaatgcgagatgggggataaagaatatatcaactcaaaatactggagatgaggagtccaactctacattgagaatgttaaaaagcaaatatgtgtgatcggacaaacatttacaatatatatatagagctatcttgcgtattattggggattctgtaggattattacatatctggcatacattcatggtgaaggtgaaaaactcggccatgttgaatttttttttttacattgaaacccttataaaaatctcaggtcggcaatattttggtcttggtgacaaggctaatctttttccttttctagtaatagcattataatgatgcttttataggcgactccattccagcccccatcttctatatcctgtatctagcttactaagcccattccagctcggatcctactagctttgg

SEQ ID NO: 28144 - DNA, 3120 bp, Arabidopsis thaliana landsberg
tataagaagatagatcagagtacgcagagtgatctcaacagtactctaactatatatgagaaaccaaaggtaataacatcaccttctcccacatattcaatgataaactctcctgagttgatatcttcatctgctacaatcccatatccacatttctctgtctgcaagcaacaacttattcaactaacgttgaaaatgcattctttatataagacaacaaattgtaataaaccaacctgaactaacttcatcttcttgatatgtcgttgttggaacggcttgttggtgcattcactactgcatttgcaactagacgaacagcttgagagtagaatcctatacatcaaggaaaaaaccaacaatacatcaacaatcagaaccaatgccgccacgaatatttagtcagacaagtacttgtgatcagatatggaacatacccacaattgcaatcgctgccacaaagagttgaagaaccaggatccaaggagcaagaacagaatatgccatgatccttaactttcttcttgagtttcttcttcaagtatatatcttaaaaccaagctcgtcatgtgaaaacaaataatattccacagttttgtatgacaaaaaaaaatagcatcttgtgacaacagaaaaggatactgcgcttgatgaagataggcttcacattattcaaccgatccggagattcaagtttctccaattccccaatctgcttttttaacttcctcaacgacttcctgatttgattccgatcggaaccctgaaatcagagaaaaactaagatcatacgagaaataatttcataaagagaagaaatgaagattgtgaatcgaacgtaaccttcttcgaggaagacatggcaatagaccggattaattgggaaagatctaaatttgatgttgaaacttttcaaagcctaatatttgaagagaagaagaagacgaggatgatgatgaatttgtagtggcggatccgatctgcagagagtgaaaagacgtaacggagaaagagcggcagttgctgtttttccttttgaggattttgaaatccttctgcgcaaaaggcaataaatcggcttaaaagggtaaaagagtaatatcgatttatttccattcatccgtttaaagacataaatgggcttcagatttttggactggcccaatacaatcaaacccattttgtttttggtaacaaaataattaatttattactagtcatttgcatttattccagacagttatatcattcacaattggtaactaaataattactcctttttaccgtaaaattgatattctgtatatcaagatattcaacgcacaaggaatttttttgaacaatatattcgatttgctttacttggtttaagtcgccggtaaaatttatttggtttaagtcgccggtttaatttagtttaacactgatacatttgacaaatacgaactagtgacaaaattatactgccaatggaaaaacatattcgaagctaatataaaatgtaatgatccatattcgaagcttaaaagatataattacgtaaaatagagaagagagagagagaacacgaaacttttatttcgtaaggttacacgaaacttttatttcgtaaggttacacgaaatcgatcttccgcaattcaattttggtctccgttaattcgcactctcgttctcgtcttcgtcgccggaggtcgtatcaagtcagcctcaacgatccgatttgttttttcaggtgatctatctttatattctgctagaaattccaaaagttgtgaaaatttcgttcctcggatcggattatgaaactctctgcgtttgtttagtgattaatcgagctcttactcttgttccttttgattcttatgctttctggtgtatatatacgagattttagttgccaattttatagttgactgattgatcatttgagattactgtagagatccgccctggagaaattgcgtcggagttcttttacttattgcatgattttgtctcgaatttctattgctgctgtggatttcttcattttcgagattgtgcatatcggattcgagtacctttatctactcgttgtgttcattagatcatctttgattcctaaattcgatttttggggcatattgaaatggagtgtaatagtgagattatagaagataatgcattagctcactttgagaagtaattattagaggtatctctgttcaattttagcctgatctatttttatctcttatgctttattattgcagacaaaggttgattctctgggtatgagttttcttctatgagacagacatgttgtatttggtgcttaatgactaggtaatgaaggctatatgtgatagatttgttccttcaaaatgttcttcatcaagcacaagtgaaaagcgtgatatatcatccccgacatctctagtttcagattccgcgtctagtgataacaagtcaaacttgacgttatgctcggatgtggttgcctcttcctccccagtttctcaactgtgtagggaagcttcaacttcagggcataacccagtttgcaccacacatagtagttggacagttattttaaaaacggcttctatggctagcggggcaattaggagatttcaagaccgtgtattagggccgagtaggacgggtatttccagcagtactagtgagatatggctcctgggtgtctgttataaaatctcagagggtgaatcctcagaagaagcagatgctggccgtgtattggccgcattcagacaagatttttcatccttaatactgatgacatatcgtagaggtttgtatgctccgccccctcaaactcaaaccagcataaaactgttgacagaatactcactgtggcatttccaggttttgagcctattggagacacaacttatactagtgatgtaaactggggttgcatgcttcgaagcggccagatgctcttcgcacaggtagttattattatcattttgctggaggcttcagatttcttaatgcatggtctaaaattatgtatcttcaacaggcgttgctatttcaaaggctgggaaaagtcttggaggaaaaaggattccgaggttagctttgttatccaatatatgttctagtaaataat

SEQ ID NO: 28145 - DNA, 1353 bp, Arabidopsis thaliana landsberg
agcagttgcccaagatattcagctcatagatgctattgcagagagacagtctcttatattttctgaggaatgcaaactgtttcctgctgatgtgcagatcccagtcgatatatccattgtaagaacccattttctcctgttatctccaagttattgcaccttttctcactatttagtcattgtgggtaatggactttttcatatgaattgtaaatgtgaacttagttttccaaattaaaactttgctactatgagtcactagggttagcaatgtgtttttccgtttaaaatcaagctttaagttatactactattgtacttgcaaatcttagtccttaaattgttgcttcatgtttcagcagatgtagtgacattatgttccttaatggaagtttatttgcagaccagatgtttcagaactggagacaaaactttcagaacaggccaagattctctctaatcttcaacagaaagtcgatgacttggcagcaaaggtgtgcttttgtttccccattgaagagttatgttttgactcttaactacagaactcatttactgtttcatcagacttaatatatttcactcagcttattacttatcgcacgtttacatgtaaactgcatataccaattgcttaacattagctcttgtttctctttataagtagtctctgattctgatgtagccaagacttgaacttcataatgtaactaatatgtatatatgcatactcaattcctactacttaatgacttgttgatagaaggaaacagtcatatacataattcctactacttattgacgttgatagaaatatgtctgttttctcctttcagcatgcttacaacccagatgaagaatatactgaagtggaatctcaactaagggctcgtttagaatcgtttcttgaaacagctagggcattcaatacaatctacacaaaggtatttctttttcatactaactcataattctctctccctatcaacctagattagctagaagtaaaatgcataagttcagcttttttcttgcgaacacaaaatgcagactctgactcttagatgctgcttccatgtcgcaaaaaatgcctctgaatatcttatgatctgactatctaaaacagaaactgaaacataagccgatgtatctttatcactatgtttggacttttttcaggaaaatagcccatggacgcatatgatggaagtgcctcagcttcatggttttggtcctgctgcagaccgcttactagaagcatataatatgcttttaaaggtgccccattgtctccttctatctgtatactaggaagtatcgactatatggagtccatataatttatactttgat

SEQ ID NO: 28146 - DNA, 1494 bp, Arabidopsis thaliana landsberg
  unsure (1)..(1494): unsure at all n locations
cgaaaggtaataactgtttaaaataaaaaaagaaaaagaaaaaggaatgaaaaaaaaagaaagaatgaatgaaagaagagaagacaacccacacgaatcgccacttttgaagagagaagagaagagaagaggcagctcctaactttctcttttgcttttgtctccatcttttatttcacacccgtgaccgtgccatctccacactctccgtgcgttaatcctggttttatgatttactttaattctcctgtatgtgaacatcaatttgactagaaaaacaatggtgaaaaaacttacgccaactaaaaaaggtagctagttagcgttatttcagctaactcaaacaaaagttagttggcctaagtttttctttttgttatttttttagtcaattccctattgaataactccaaaaatgctgtcataaattattatttttgtttaatgtacttgtattctgttttgtctcaattatttctccaatcagacaaagaatagcagtttaaagtcaatatttatgttcacaggttatagttttggttttggggatagtagtgaagaagaagttgcacaacacacaatctttccctttttacttgtctctctctccccacaagagtatcttctttgtaggggattgtcaacgctcttcgatagaggtgcccaagaagcttctcttctctctctctctctctcttcaatgccctcctctgctactagcacatatctcctctctttaaaacaagtctctctcacagcttcttcaccactccttctccagctcaaagaccgtttctttcaccagccaaagctccttaacatgggattctcaactgggaaaagaaaatcaagagatgaagaagaagatagagtgagcttcttcgcttctgaattccccatggatgacctcaacgatgacgttctcgagagagtcctctcatggctaccaacttcttgcttctttcgtatgagctctgtttgcaaaagatggaaatcaagccaaacctcgaaaagcttcaagcttgcttgctctcaaatccctactcgagatccttggttcttcatgatcgacaacgattccaattcttcctccttcgttttcgactccactgagaannnnnnnnnnnnnnnnnnnnnnnnnnnnnncctccaccaccaccgtcaagatttcatccccgtcgcttcttccggcggcttgctctgttaccgctgctccatctccggcgacttcctcctccgtaatccactcactggatcttctcgtgacattccttctcaagataacaacaacaacaacaaacctctccaagccgtagccatgaccaccactactgttactccctccagctatacgctcgttaccatctccggtgaaatccaaatctcagtttcaagatctacgaatcaaacgcagattcttggagcaaagaccaagaactggaatcagtcaagaacaatgattcatcattacatgatgattatgatactgacagt

SEQ ID NO: 28147 - DNA, 1403 bp, Arabidopsis thaliana landsberg
aatctccaaaaactgcgtttcgaaaacgcccgccttaaagatcacgtaaacatatgatttgttccataaaactttcactatttctattttctttttggatctttatttgaccatcatcgtatttttcatttaaatttacgaacaaaaatatataaatctttaagaaattatattcgatatctgaaaatgtatataaaactgtaaatattgattgtgaatatagtagatatacatatacatatatgccactaactatttctttttgtgtgaagcgtgacagaatctccaatttcgtagaccagcacaagcccaacgaaccaaccgtggaggactcattagcttatgttcctagccttgatcgcatctcgtacggaattaacggaggcaatatgtacgagccatctagctcatatggaccaccaaattttcaaatcatccaaccacgaccactagccgaaacggatatgagcctgttgtctgaaatcgcggcaagtgcggttgaagagctcaagcggctgtttttggctgaggaacaattttgggttaagtcgtgtatcgacgagacttatgtgattgatacagagagctatgagaggttctcgcatgcagtcaaacatttcagcagcactactgctcatgtcgagtcgtccaaagctgtcacggtggttcatgtagaagcgataaacttgatccaaatgttcttagatccggtatttatttgtttgtctgttcttggaaaaaattattattttgtttttactttttttgaggtttggataaaaaatgtgaaaatggtacttgtttcttgtaggaaaaatggaaagagctttttccaacgattgtgaacaaggccaacacaattcatgtgctcggatcggggcttcctataagaggaaactgcaatgttttgcaagtggtaagaactatttttgtagtgaacttcaaaatgttaccaatcaatattaacgtaaccaacttctattttccttactgttaattgagtttaaggatttttttattcgaatttaggtttgaaggatattagataaggtttgtcttcatgatcaatagaatcactaacacatttggtgttttgaatgtgaataaaattcgatagatgtgggagcaactacacattctgtcgccactagtgccagcaagggaattcatggtcgtcaggtgctgccaagagatcgagaaagggatctggattattgctgacgtgtcacaccgtgctaattttgactttggcaatgctgcttgttacaaacgtccttctggttgtctcatccaagccttgcccgatggtcactcaaaggtaaatataatctcttcatcgcctcttgattgagctcataaatgtcttttttcatataatgcatttaattgatgctatcaaaact

SEQ ID NO: 28148 - DNA, 1420 bp, Arabidopsis thaliana landsberg
atgcatcttttcccaccattttttttccctcactttcttttataatcttgttcgacaacaatcatggtctaaggaaaaagttgaaaatatatattatcttagttattagaaaagaaagataatcaaatggtcaatatgcaaatggcatatgaccataaacgagtttgctagtataaagaatgatggccaacctgttaaagagagactaaaattaggtctaaaatctaggagcaatgtaaccaatacatagtatatgaaatataaaagttaatttagattttaaattttttgattagcccaaattaaaagaaaaatggtatttaaaacagagactcttcatcctaaaggctaaggcaatacaatttttggttaagaaaagaaaaaaaccacaagcggaaaagaaaacaaaaaaaaactatattatgatgcaacagcaacacaaagcaacaccttgcacacacacatacaactgtaaacaagtttcttgggactctctattttctcttgctgcttgaaccaaacacaacaacgatatcccaacgagagcacaacaggtttgattatgtcggaagacaagttttgagagaaaacaaacaatattttataacaaaggagaagacttttggttaggaaaaattggtatggccattacaagacatatgggtcccaattctcatcactctctccaccaccaaaatcctcctctctctctctctcttttactctgttttcatcatctctttctctcgtctctctcaaaccctaaatacactctttctcttcttgttgtctccattctctctgtgtcatcaagcttcttttttgtgtgggttatttgaaagacactttctctgctggtatcattggagtctagggttttgttattgacatgcgtggtgtgtcagaattggaggtggggaagagtaatcttccggcggagagtgagctggaattgggattagggctcagcctcggtggtggcgcgtggaaagagcgtgggaggattcttactgctaaggattttccttccgttgggtctaaacgctctgctgaatcttcctctcaccaaggagcttctcctcctcgttcaaggttcgtcctttttcttattaagaaagctcaaatcttgtgatgtgagtgttatgccatctcaggacagaattgtgtaggtgcttttgttttagtttaccctgaataagagttaggtatctatctccattgatgagcttgtgcttgtcctgtgctatagatttctctatggagtcatgcaaatgctaagatttgttcattttaatgtctgtttagatgattacatctgaatttcgagagccattgagtggaaatttcttggtttgttgtggcagtcaagtggtaggatggccaccaattgggttacacaggatgaacagtttggttaata

SEQ ID NO: 28149 - DNA, 1907 bp, Arabidopsis thaliana landsberg
atcatcatctctgatcgatccacgaaacggtttctgcacatcaaactccacattttacagtaaacgcaaaccattggcacttccttcaaacgaatcactcgacatcacaacattcatctcctcccaaacgcaccgtggcaaaaccgccttcatagacgcagccacggaccaccgtataagcttctccgatttatggaaagccgtggatcgtgtcgccgactgtctcctccacgacgtgggaatacggagaggtgacgttgtcttagtcctctctcccaacaccatctccatccccattatctgcctctccgtcatgtctcttggcgctgtcttaactaccgctaatcctctcaacaccgctagtgaaatcttaagacaaatcgcggatagcaatccaaaactcgccttcacaacaccggaactggctcccaaaatcgccagttccggtatctctatcgtcctcgagcgcgtagaagacactctacgcgttccgagaggactcaaagtggttgggaatctaactgaaatgatgaagaaagaaccaagtggacaagcagtcagaaaccaagttcataaagacgacacggcgatgttgctttactcctcggggacgacgggacgaagcaaaggagtgaattcgtctcacgggaacttaatagcacacgtggcgagatacatcacggagccattcgagcagccacaacagaccttcatttgcactgttccgttgttccacacttttggtttactaaacttcgttttggccaccttagcgttaggtacgaccgttgtcatcctcccgaggtttgacctcggagagatgctggcggctgtcgagaaatacagagcgacgactctgattctcgtgccgccagttttagtaactatgataaacaaagcggatcaaataatgaagaagtacgacgtgagcttcttgagaacggtgcggtgcggtggagcaccgttgagcaaggaagttactgaagggtttatgaagaaatatccaacggttgatgtttatcaaggatacgcattgacggaatctaacggtgcaggagcttcgatagaatcagtggaggagagtcggaggtacggtgcggtggggttgttgtcatgtggtgtagaagcgaggattgtggatccgaatacgggtcaggtcatgggtttgaaccaaacgggcgaactttggcttaaagggccttctatcgccaaaggtaaattacacacacttattccaacaacaaaaataaaataacacttaaattaaaaatattttaagccaaagatcttataaaacaatttatacagttaataaatttcaaaatctggcggataacattttggtaaatagaaagtacaatttatcattctttttttttgggcaacaacgcatcaattaaaaggataacgtatgttttaatatttatattatttaaacatcatttgacataatatcacatttttatttaaaaagatgggcaataaaatacaccgattattaaaaaaaagtatttgaaaaaatgttaatgtatgtttttttaccaattatcaccactaatatagttatctatcaaaaccactatagtttatatttgtttgtgtttaaaggttatttcaggaatgaagaagaaattatatcttcagaaggatggcttaaaacaggagatctatgctatataggcaacgatggatttctttttatcgttgatcgattgaaagaggcttgtcaaagtacaaagggttgccgaggtaagaataaaatttgctcatatcatgtgcagcgtgaaccaaatgacacttgattgtggacaatttgtaagtctaaaaacacaagacaaagagtataagcgttttgatattgtggtacagtgtacctccagctgagctagaggctctcttactaaacc

SEQ ID NO: 28150 - DNA, 5883 bp, Arabidopsis thaliana landsberg
gtttttgttttgggtcagaacacctaagaactagaactgcaggcgttgatttgtctcctagacgtgttctgagaaactaagaagttttctgagggagatagcctgtgacacctaggtcccactgcagccgatgaagaatacaccaacgcacggacttttgctttgcctttatctgaacggaatgcatccttatctctgtctttgacctgagatttgacagagaattgcaacttgctcactgtatcaacaaatctatcccccttggagacactgctactttcaaccttcacagctttccctttattgcctcctttcaagcaggcgttgtgggtatcaatgagttccttctgcctctgagggtccgggcagagtctagccatatccagaactaagtgagacaaaccataacctttcacatattccaagtaaggtctggcatcgatggaaccatgacgaatctttcctgaagtatccttgaaggccatgaataacttttcattggggccaaggctggcatgtaaattttcaaccaaacttttattgtcagactgtacatcagaaacaccttgcgctacttgaatgttccctgcatttgcactggtggatgatgacctgcgatttttcacagcggaaatttgaggagaatcagaatgagaaggctgcgccagtgatcttgtttcagacattttaggggttgaagacgagtgatgattattcctctttgttgcattggcggaactcagagaagaaccagatgagcatccaccaactgtggtacgagcatcttgtggaactgcagaagcaagagttctagtactttcaactctgtcatggtgcctagattgagattgagcagaagcaccagaagattgtaccctgcttgtaattgatatttctgccgggcctcggtttagtgctggccaagcttgagaagaaccagaagttgcacttctatttgtttgatgtctttgacgagtagtcgtggtgttactaactaaactctctgaattctgtccaaatcttgattggccttggtttgcacgatgtctttgacgagtagtcgtggtgttactaactaaactctctgagttctgtccaaatcttgattggccttggtttgcttgcacagagagtggaggaaaagaagattctccaagacgtgaatttccagagcgtcccacatgttgaggaagattattatcgtcgttaaaggcataagatgcttgagattccagaagcacaagattaggctcacgaagagaagatcggcgtcttccacggcgactgttcgggtattggaaactggcttgtatctgaaacagaaccaactattaaacatcataaagcaaaccaaaagatgggaaagataattaactggcaagagttgtactcggaaacgatacatgcctgtagtgatgcattttgttgagaccgagacattctacctccatggtcaatagcattatgcctctagaaaaaaatgcaagtgatcctttaaacatcattgtgtatcaccataacaaacagtgtgaataaaaaaaatgtgttttacttttagctcagcttcgatttggaaaactatgaacttcttagcaaggcaggtttcgtcttcacataggaaatggtcacttcggaaatgaacctgttgcaaaaacaagtaagagacatgtactgttaaagagtcagaacacccaataagattacattcatacctcaagatcatcatagtttccataatattcatattgtccaggcttcagcctgcattgccaaatggaagaaaatgaaatcatttcgaggtcaatcaaattcataactctcacaactacaaatagcaattacctttggcatatatgacaagtgtagtgctctctagacatatgagtgtatagctcattatcaccatagaatggtcttttacagaactcacacataggatgaccagtgaaacctcctctttcactctcacttccatcaacttccgagtcaccactacttatatgttggttcagctgtcccttagtaaacaacttttgttcacaaatgaaaacctgtcaaaacaaaagcatgagcttgttcatgataaatcgttagcagagatatcttaaacctaagagggtagtttcagaacctgaccttacgacctacaagacataaactgcacatatgcaatttgtgctgatgatttaaatgatctttcaagtgttcaacgctcttaaaccgaacacaatggttaggctctttctttggtcgagtcttgtttgtatcgttacacaaattgcaagagagcctgcacattgctttaatccttgtgtaatggttcaagtcatcaaagtaaacattggtttcttcatgataccagaaggatcctactcgaccttcctttggtactgatgggaaagtagtcgagaaatcactaatcgtctttgtataatcacccaaagcctgcaatagaacacagcaaatgtaacccaagattcaagcaaatttacaagttttagtctcagattctcactatcttaaaaaagtttatcttttaccatttaagagcaacacatttgagcagattaaggaaaaagccctaacctttgtgacaaagacgacggggcattcggttttgcagatacagcatcgacgatcattgagtatgaaacgaagacgaacaacgcaagtagagcaaacctctctgtgaccacaagatccgtaaccaacccattcgagattctccgcgcaaacggcgcaactatcatccatggtttctaactccaacgattttctcaggagaaacccagagagagattgcaacaggccacttataagagaaaagagacgaaggaacaacaatcctattattattttaattcagacacaagtaaacatattggggatgtagctcaaatggtagagcgctcgctttgcatgcgagaggcacggggttcgatcccccgcatctccaactcattttttaattttctgagattcgttaaaaggcctttgaagcccaatgtaattaataaaacccattttcaaaggggtaattacgtaattgtaaaagcgagctccaaaaccctagtttctcaaccactactcttttatttcttctcaccacttaaagagtttccccagaaattttcttccgccgtaaaagcaaaaaaagatgcagatcttcgtgaaaaccctaacggggaagacgatcactctcgaggtcgagtcctctgacaccatcgacaatgtcaaggccaagatccaagacaaggaaggaatcccaccggaccagcagcgattgattttcgccggaaagcagctcgaagacggacgtaccttagccgattacaacatccagaaggaatcaacgcttcaccttgtccttcgtctccgtggaggtgctaagaagaggaagaagaagacctacaccaagcctaagaagatcaagcacaagcacaagaaggtcaagctcgctgttcttcagttctacaaggttgatggttcaggtaaagttcagcgtttgaggaaggagtgccctaacgcaacctgtggtgctgggactttcatggcgagtcatttcgatcgtcactactgtggtaagtgtggtctcacctacgtttaccagaaagaaggagctcaggaatgattttcatctcgatctctatcattttgaattgaatactgctttttttttggaatttggaagttgtttttggatgttgtggatcttatgttgaacttgtttgaatttcatatctaggtttttcttatggatatttttatgctctttatttgaattactttcaaatcttattgcatgattgatttatagttcacacaatctaatctaagttacaagagcatttgggaatagatatgggaaacaggagttcttggcttttactattgcggcataagctccatagcaagggatatgaacaattgccatgcataggtacctgtgaatatgttgttttgttagtgtataatcacaatccgtcaaatctttaaaacgattataaagttgattagatagaattaatgaggatggttaccatatcggagcccatggcttgtctagctcgaggaacggatatggccacctgagataggttcgagttgattagaataggttggttgcgctaagttgtgggttaagtatcatcaatgtaagtcgttattgcttaccaagtgaagccacatgcgtggatgatccattggaagataacatagagacaactccatagcacgaaatatcccattcgaaaccaagggaatggctgaaatcagaacaaacgaatttctttaggctcttttcttaaaatctattgtcttggttaacttcatttttgcttacaaggctattgaggagtgtttcaagcaggaggaagcctgcatttgccgtgtgcatgcagatcgtcaactgcatcaaatcataaattcgattagtagagtcttgagtagtttcattgttaaacataggctgaaatgttcgttcttaccgtgtttaacccaaagcgagtagtcgataggaaaggaactataactaaccaaaacacaatgtccgtcagcactacagcccctgcacttgtctttaacacaaaccagacagaagagttactgtgtgaaagtgtgtatgaagcaaaaaattgggactccgtgactgttgacactaacctgaaaaattgtctgcatgaaacaaccacaaacctctaatcttcgccggaactcatctccgaccttttctactaccacatcttcatcagtttcaagtgttagctcctttaaatgtatcaaacaaccatatactgaagctacaatacccatctgcagagaacccaatgaacataaacaatacccggatttaacactcttattcgaaaagctgttacgacgtaccgcaaagtagatgatcacaagcatgaaggtccatctgttacaaaaccaaataacattagtcatgaacaatgcggatctgattacattcagaattttggcttagaacactaaaagaagaaagatcactctgtgtaatagacgaagatgcttgcgtcccacttgatgacatcccaagccaataaagcagccatggagagaaaagaggtggaacgagtaaagagtagccagccgggatgtaatcttgtccagcaactggcccatacccgagccgaaccacggttgttcgatctataaagtggtaacaagctatcgtgggacgtatcatcaattactacgcagcctctgtctctgcgggatagaaaccacaaggacgtgacgattgcagccgcaactatcgcaaagcagatgaagtcataccaataaacgatcaatgccatgatttactaactacaaatttttttatcatttgattagttctaaaaaaataaagtggtttgtttatgcatggagtggaattttcggcaggtgggttgtttttaaagcgagacgaccagctgttgtgatcgtttgttactcgtgtaaattgacagttagataacttatagatgcatgtacatgaaaacatgaatcatgaataattttaaaattaagagttgataaaataaatgaaagagaagtccaaaaatatcaaggtcaatattaacaaaataaaatgggaaaacaaagatttatagggggaaactacacacaaaataggatataagcatttttaacgatttcaatattgtaagttaaaattatatattttgacttgctttattcaaaattaatgtattacagtttacatacatactgttgcttatatgtttcttaatagttaataccacatttattcttcaaaatgtaaaaagtcccgattttgattgtagttttaatcacggcttggcttaacgacagtataaccacgatccaccgccaaattctgaccacttatataag

SEQ ID NO: 28151 - DNA, 1729 bp, Arabidopsis thaliana landsberg
gctggttcatcggtaatttctctgtttattccttttatcttattcactgttgaagttgatatctgcattattagggcttacatatgttttgttttggtttcaggtatcacatcctgcaatgagtgtgtacaaaggatatggttggccaaaaggagcagaggacttgttatcttcgtttgggattaagaacgctcttttttctgtcaatgcaagtcatgtcaaagatgatgcttttgggaaactcattccttgtcctgttcaggttttgacacacaatcttgatctaactaacattcttgtatgagcgactgaataatagagagtgatcttagtgcagatatcatattttacaggaacatctactcagttgcttgtttaatctgtgacattattttagttgacgttcaaaattctgttctgacttttgatttttcatttcagcaaccgtcttcttcccaaggagagtctctcaacaaatcttccccgtctaagagattgcaagatatggtaacaactgtaaatcttttctgttatagagacataattcattgcctttgctgctggtgctatgtattagtaactgtatgttttgcaatctcttgaagataatgatgaaaattcttgtgcctctgatcttcagggaagtggtgaatctggttcattttcccctagtcctccgcagaagcagcttaagatcgaaaatgacatgcttcgtcggattccttccagtctcctaactcggacacctatacgtcaaaatgtaataacatccaacaaaattattcagtcagatgcttgttttcttcttctgcatctttataattcctttatctatcattcgccctcaggattcatgtaccattgagtttgatggtgcttctaaaggaaacccagggaaggctggtgcaggagctgttctccgtgcttcagataatagtgtcctcttctatttacgggaaggtgttggcaatgccacaaacaatgttgcagagtatcgagctctgcttcttggtttgaggtctgctcttgacaaagggtttaaaaatgtgcacgtcttaggcgactcaatgcttgtctgtatgcaggtccagatataaaattcactcttatcttttgtcttgtttgaattattcatgtttgtgccttaattgttttgataacttggattcgacaatggaacaggttcaaggtgcatggaaaaccaatcacccaaaaatggctgagctgtgcaaacaggctaaggagctcatgaacagttttaaaacattcgatatcaaacacattgccagggtaagccaccaaacccgcttggtctagctgctgatttgcttgtgatcaactctgtagtccgtctgcgcaacaatcattagatatccaatcatgtttggttttgagagttttagtgcgaattaggaccaagtatctttgagttcatttgatatgaagatgaccactaattgtaagctgtccggtttgcaggaaaaaaattcagaagctgataaacaagctaacagtgcgatttttctggcaggtgagttagatgaagttcttgaaaaaaaacatatgggtttgatttttgtgtatggatcttgaaagaaatccatacgcatcgctaaccaggcttcaatctattttttttttttgtcaatgtgtatccagatggtcaaacgcaagtgatttcaggcggctagaagagattagtttagtgtattcctgttttcgtgtttcc

SEQ ID NO: 28152 - DNA, 1431 bp, Arabidopsis thaliana landsberg
aaacatccatatccgtattaacttaggattggaaagttatcatcactatcatttttcaaacatctataatccaatttattagttcagaagtttctttctgagtaactaaaagaaaaaatgatctgcttatctaaaggatcgggcagctgaaatcaggatacctttaatattaaaacggcggcgaaacgacgatattccaccctgtctacgcgaagccaatcaaaagctgttttcatctgtgaaaacgagatcaagaattgagcaactatgagccgagacagtgataggaaggggagggaaacaaacaatcttacctgaaactccacttcatcagaagtcattgctccacctgcccgagcaaggtgccccaaaactctactagcaagcaccaagatttcaggatcacgcttcaactcgaacacagtcctcatgtaacccgcaaatctagaaaccttagtagcattctcaccaaatccaatctccgtcaactcatcaatggctctgagtgcacccatgttttccgccacatcagtgctctcaattaaattagcaatcctgtcatataattgctccatgaacctagaggaagcttcaccactaagatcacgaactgcttcctctacgtgtttcctaaacgctaaaggagctccctcctaatacaacaaccaaaaatcataaataagtcgcatacttgatggaaaccaacaacaatagatcaaaacccacaaattgccagacctataagaactaaaacttcgaattttccattaacaagaacagagagattccgtcagataagcaataaaagcaaaagggttatatgggtttctactaaagcataaaaaaggagaatactttacaatgttcttcattaccttaggattaccacggctgcaaaggtcagcgatgacacgattcaaagtgtcaaagcttccgcccccagaatcggtgactgagggtccacataagcggtgcgattgcgaaggggaagccatggatgcaggccgtccagccgcaaaagattgctacgaggtagacatcgctgcagggccagtccagccacaaaaatcttccaaaaaccctaaatctgacccctttttggttcaacaacacttgggcagagagagagtatgtccagaggaagatagaagaatcttcaacacatgatgcgtcgagaaccgaagatcgcagaagaaatcaagattttttctcttatttttttacaaattcaattctctgagtgtctttttagctttcttaggttttgctttgttctttcagagaccaattatctttggtaaataaattggaaaacccgaaaggtctttactaggaaaatatgactttttccttggaaaactgtaaaacttatggtttgtctatcaaaaacttattaatacaatattttccatttttcttttttcactgatt

SEQ ID NO: 28153 - DNA, 862 bp, Arabidopsis thaliana landsberg
  unsure (1)..(862): unsure at all n locations
gttgtctctctctgcaaattcacaactctgttgaatccatcatctgttgatgaacccgttcttgcatttggtgatgacgcaaaagcaaggatggctactatcacaatttttaccattgcaaacaaatatggagattatatacgtacgggttggaggaacatattggactgtatcttacggctacataaacttggacttctgccagctcgtgtagccagtgatgcagctgatgaatcagaacattcatctgagcaagggcaaggaaagcccctcgcgaattccctatcttcagctcatctacagtcaatgggaactccgaggagatcttccggattgatgggaagatttagtcagcttctttcacttgatacagaagagccaagatcacagcctactgagcaacagcttgcagctcatcaacgaacacttcaaacaattcagaaatgtcacattgacagcatatttaccgaaagcaagtttctacaagctgaatctttgttgcagcttgcgcgtgctctcatttgggctgcaggtaggccacagaaaggaaccagttctccagaggatgaggatactgcggttttctgtctggaattgcttattgcaatcactctaaacaacagagacaggatcgttctcctatggcaaggcgtctatgaacatatagctacaannnnnnnnnnnnnnnnnnnnncctgcaacttagtggataaagctatttttggtctacttcggatctgccagagactacttccttataaagaaagcctagctgatgagcttttgagatatcttcagcttgtgctgaaactggatgcacgtgttgcagatgcctattggagctattgcaaataagtcagcc

SEQ ID NO: 28154 - DNA, 1978 bp, Arabidopsis thaliana landsberg
tgtaaatttgacaaattaaaaaaagatggtgtttccacatttatgttttttcgacagtaattggggaccgggatattatcataattaacctgggttaatacgagtgtgtcatgaaatttgtttaattaataaccacaaaattaccatagcttggtgtatgagtgtatcatataaaatgaattataatcgacgtcatgtgactcatgttccaatcaaaactcgaactattagaaaatttctctccaaaagagtgtgtcatgaaatttgtttacttagccagtaataaccacaaaattaccatagtatgtcatgaaatttggtaattatatgatactcgacgtcatgtcccaatcaaaactcgaactataagagaatttctctacaaaatagagttagttgtgtctacactatagatcacaaccattaaatttctttaatttacgatcacaatcatatttctgcgatcgtagaatactttctttttgaaaaagcttcttcaagaaaagtaagatcagacaattataacttaagaaagattttagttttgtttaccaatatacaatttcacaaactgcagtcttaaactcttaatactgccatcttgaccggcattataatctggacttgcattcataaattagcagaaagattcttaaaataaaaaatataaaccaaaaagttacatgtttaaagttcataaaacaaaaaagaatagctaatctcatcaactagttttggcaaatttaccaagttaatgaatacatacatttgctttcacatgtgctacaactgcgtcaaaatagaaccaatacacaaaacaatattgtgtttattacattaggcttgaaaaaatttaaagaatgtaaacccagactcacgtgaccgctcacgggcgacaagtgccagaacctcctgggatgtttgtgcaaccgttcggacctgaccctataacctggcccctttgcagcaactggaacacgaatcggatctcactgtcggcttgaagcggcctagcggcttcgacttgtgtggtgttcaagaaaatcacgaatagtccgagcaaaatcactccaagtattaattgtttcttcatttctttctcttttttgtatgtattcaaagtgaacaaaagaaacaatatttttttctgtttgtcgcgtaaaagttgttgtatgtcttttactcgttgtttgtgttgtatcacatttggttcgataatgacttatatatatagggcttatgatcatggttttgatttgatcgttaaattggtatcttcgtgtgattttggtcttactaagacattcttgtggctttgactttactaggaaagacttggttttctgcatttgaacccgaactatagccattgatcaaagaagttaagacacattgaccggttattgccttggaccgcaatgtatatacattacaaagatacctgaaaaaggtgataaagtgataagctaaattatatttacgtttgtaatacagattcccgtccagtttcagaacaaaagtctactaaatctatgaactcattattaggacttaatttatttatcttgattaacgttaggttttgaagatttagttttgtactttcggtgagtctggtatatgatagttgttgtaacaagatagtagccagttaaatcgaagcattggggtcgattcaaaaaacgtattccaatactaggtgcaattcaattattgactctcataagttgtttttttgcaatatttatgacgcaattcatattcgaatttgggaggtgaggatgacacgataacaccaaaaaaccggaaccactaagcataagctaaggaacttggaaatggtcaaatgtctcaaaaagggaaataatttttttttaaaatcacctggcaagtttgattcagtctttaactcttaaaaatctcaaaaaaataaaaactgaagacataacactggttggtacttgagcgggtgtgtata

SEQ ID NO: 28155 - DNA, 1854 bp, Arabidopsis thaliana landsberg
atgctctttcttctttggttacctcagaatcttgtatgcacttactcttaattcttcttgtgacacatttcatgtcaatctttttgtagctgtttgggaatctcatcacacttgcattactgaaagatggaaaggtactaacttttctttatcgttgacagcaatctcatgtattagagttattagtattgactactgtttaatgaagtgatcattcctaaagttggagtattgaatagcagatcatgctacacattctcagtgatgaattatatatacctccttctagttgggtatccccaccattgttttcttcttgttgacatgactgtaggaaggaagcaccagtggcactaccttattgatgttggtgtttctcttcagtatgacattaggaacaatacttatgttcttcattcggaaaattgatggagaagatggaaaaggacctgtgggttctcctgtgggcttagttgattccttggcatctcttccaaggatgataattactcctttgctcgacatacggatgctactgattgtcccactccttgcatattcaggattgcaacaagcatttgtttggtatgtctctcgacaaacttgatatactttccccgttttcccttttattctcacaaggatagccttaaatgattaggatttattgccatcaaaattattatcccacacaccctacataacgtacataaatgacattgtggtggttgaactctcaccatcttaccactgaatagttgtttccaatctatacataagttttcatttcttgtcagcgaaatcagcaaaagtttgttattttttttgtaagatatactgatataaatcttcattattcttacaagttacattttccactctatagggctgagtttacaaaggaaattgttacgccggcgattggtgtctcaggtgttggtggggcgatggcagtctacggagctcttgatgcagttgtaagttaaaaggaaacgtaaaaaatcatccttttttactctcgtgtttttttttatgtggttaatccttatttttcctgctgtaaaatcattctagtgttcaatgactgctggaaggtttacctctggtttgtcatcgatcaccttcatagtttctggtggagctgttgctcaagcttctgtgtttctctggcttcttctcgggtacaggtttgatacttctacaccctattttcattcaaaccattagcaacttcataaatagagacatatcgagtctagaagtccttgtgtttctgaattcatgaaatgatttcctcataaagcttcattatgggtattggtatgtattagtggcattgatcaagcaacttcctttggtagtatcccgatttctttgtcatatttgtgaaactatgcaagttctgaagagaattaggaattgcgggcacctgacaacctataagtgtttctgaagaatctaagctatggtgatatgatgatgcaggcaaactagcggagtacttggcacagcttacccacttataatggcggccatattaggaattggtgatggaatattaaatactcaaatcagtgctcttctcgcattactcttcaaacatgacacggttaatattatcaaaatattattattgttattctctcagctgacaaatcctctaaacggtctcctatgtttgtacttgtgaaaacaggaaggagcatttgcgcagctaaaagtatggcagagcgcagcaatagcgatagtgttcttcctaagcccgtacatatcactgcaagcaatgctcatagtgatgctggttatggtctgtgtttcactcttctctttcctgtttttagctcttaaggtaga

SEQ ID NO: 28156 - DNA, 1503 bp, Arabidopsis thaliana landsberg
  unsure (1)..(1503): unsure at all n locations
agctctccggctagtcctctcgtttcgagtcagagttcgatcaatcagtgacgatagaacagagataaccagaggtgtctcggaattgttttggtaggagtatgagtaaagatcagaccggagtttcctcgtagagatatttaaagaattcgaaacnnnnnnnnnnnnnnnnnnnnnnnnnncttgataatgtttgatcaacgaggaagagaagacttgaagtgatgaagtgaaagggagaggttttgttgaggttttatatacaagccttctaatgtaacgattaggtaccttcatcgtcgtttcttttaatgattactttatttaaatgtttgttaatcttactaaccttcgtgtgtattatatcgttataaaaatagttctatatcatgttcatgtagtaacaatttaaatacagtttcatacgtacggtaggtcagagtattgattaggtataaatatttcagattcggatctcagtaatccatgttgaacaagattacaagtgtaagttaaaaggttatgacttatgaggaaatgatgttttaagatttggaattaattattgcatctaaaatcgtataattttagtttatttatgcaaaaggtaattaagctattttaatgattcaagaaaaagttttcaaatcatatacaatcaaaaggttatatgcctctttttgtatctttaatttttatcaatagtattgcttatttttagaaaaattattcatcgtcatcgcgttaattagtaggtgtatgcatgtatttaggacatcaaatatttatagtgatgaattgaattgtacagtttttacattgtccgaaatagatgcaatatcacaaaatacacaaacaaacaagttcaaatctttgaaacacggaaataaattagactcaacaaatatttaatatattacctataattatatatatacaactggaagaatttcaaatggaattttatggaaaaagagaaacgacatcgatttttggagtcttatggaaggtggaaagaagctactaaaacaagcatttctattattattttttttaataaaaactgctataggaaaataaaatagtttaaaagatttgggtgtctcctttttgtaagccaacgtacagatataacagctaagcatttttctttcatattgtagtttaattatgttaaataaccaaatccaaagtacttcaaataaacaaatcccaaactaagaatcgccgccgacagtttggtgaaggtgaagagaagtcagcgtagtgcaaagtctctttgacaaccagaagctttagcttcaggaaccacctgatgacacgtatactgtcattcacacgtgtgactctcgtcaactcatagtcgaaaagtttgaaataccagaaggagacccacacgtgcggttacttcatcatgtgaaaacttgtttttcatggttataatctaaaattttatggcttttctcttgttatgtgaataacagattttgggtattgccacaa

SEQ ID NO: 28157 - DNA, 1204 bp, Arabidopsis thaliana landsberg
gatccccattcgttatgcagttgattaattgtataccctttaccaatattctaagctaacaccaatgcgggaggacatttattctgatgatgtcctttcaacggatcggatttgagtaccatgtgtcacattatggtacattttgattcttgaaatttctctattacattaatattttaagtgtagacataccacacaaacataatttgtattaattaaattaatttcatgaagaatagctttaatggattaaaagtatataatgtaaaaaggccaatccaatcaaatttgtagtatctacccgaaaaatggatcatatgataatttgttttaatggatttaccttttatttatctaaaaaccaaatctgaatttgaacctaaccctaaaatataaaaagttattcaaaaattaaattattaaaaaggtatatattaataaaaaaggaaacaaataaatttaattctcattttgaaaaatcaatactattgaccagcttgcaaattcatagtaccatatttttctacaattttttgtcgacacaatacatgactctcttttatcatcctttcaaaaattattttttcaaaatatattactattatccttcttctctttattatccgagtcaaacgccgaattctcatattctacataagacatggctctctttattatccttcctgtatattttgttccttcataatatattactatccttctcgtttattaatacaaacttgaattcttcttcttcttaactttgtctgtcaattcacatatatatagtaccaccatcacataagtatctcacaacacatcatggtgaacgaagaaatggagtcatcacttaaagtcatcgacgtggcacgagtcacaccatcaaactccgactcgtccgagtcactcactctcccactcaccttcttcgacctcctctggtacaaacttcacgccgtcgaacgagtcatcttctacaaactcaccgacgtaactcgtcctttctttgactcagtcatcgtcccaaacctcaaaacatctctctcctcatccctctctcactacctcccactcgccggaaaactcgtgtgggaacacttgatccaaaccgaaaatcgtctacacccaaacgacgccgtttcattcacatcgccgagtcaacgcagacttctacgtttaccggaaagaccgttcccacacgagt

SEQ ID NO: 28158 - DNA, 1763 bp, Arabidopsis thaliana landsberg
cacttggtttgacgtagtacctcctctttcaactaaaaggtacttatatttttctcttaggattcttaatcttgccattagcagcaaccagctcgatattgttctttccagcccttgatatttcgattgcatatgcagatgctactttgcttgtgaaacgctggatggaaaaattattgcaattggtgggttaggattgaatccaaacgctaaacgaacttgggacatctatgatcctttgaccagaacaagcaaatcttgttctgatgtgaatattgtccctgaaatagaagattcatttgtaatggacggaaggatttatattcggggtggtgttggaggatcttccactgcagtctatagtgcatctagcgggacttgggaacgtatggatgatgatatggcatcaggatggcgaggtccagcagttgttgtggcagatgatctctatgttttggatcagacttttggagctaagctaacaatgtggtgcaaggaaacgagaatgtggattcgtatcgggaagctatctcaattggtgatgaagcagccttgtcggcttgtatctgttgggaatagtatctttgtgattggtaaggattgctctactgtggtaattgatgttgagaatgtgaggaagaagaagatgaatggagtaatggtgtgttcttctataccaaagacttagaatgatgatatagatgttattagctgtaaatctgtagccatataatgtctagctctctctacttttctctttgctcaaaaatcgtggtccttgtaaacaacatatactgtttctgttgttcatgtaaaatcacaagcttgtctaaaaccacacacaacactgtaatcctgattcataaacaacaaccccctattctttatctcaaaattgggtgacaaaaaaaggtatacgaatgaacataataatctcacaatgtggttggtctgcaaacaagagtgattacagtgaagctactttctaaattagctgtgtttcaggaggcaaaaagctatgcagtttttgtatctcccccttgagttcttctagtttcttcaactcgttgttgcttgataatgaggtctccaacatccgatagactggttcgctcacacaccttcctctctccactgtttgccatgagcactcaaatgcatcattggctcttcttcgagcacacaatgcagtggtaaggagttccaaagcgtggccatgagggcaataccctttctccaacatatacttccacaggtctaatcctaaatttacttcaccgttgtgacagaacagcttcatcagcatcactacggttggtgttttcggaaccagagatctttccttcattttctggtaatactcacatacgccattgaatccaaactcttttgatttcatcattccgataaacatcgagtggaaagttacactgtcaggctcaattcctttctcttccatctccttcatcaccttaattgcaccactcacatctccacacttcattagactactcatcaaagcattataagctccgcaatcaggtgttaaacctctcttggaaatttcatcgaacagttggcgtgctttgatcttgttcctagctacaccagacccatggatcaatgtagtgagtatctgtaccgtgatatcaaaatctagacgatccatatcttcaaagagcctcaaagcttccccaaagtttcgttttttgcagaacccatcaattctgataccgtaagtgacggaatttggtttaaatcct

SEQ ID NO: 28159 - DNA, 1970 bp, Arabidopsis thaliana landsberg
  unsure (1)..(1970): unsure at all n locations
taaatgatcaaaacgcaccaaaaccaacacccatatgtttacattcatagaatttaaatgtaattcatattatatactgattagcttctttttttttgcaactttttgttttcttatatagcacataaatttttgtaccattgcctcttcacttctatagcttgccgaaattaatataaatattattattggctatttattttgttgtcaatacttttcttgtaggtaataataattacatgaactttttatctatcacatgagactatgagaggtcccttcctagttatacggttatgcgaaaatagcggctttcaaaaataacggtacggccgaggcgtttactttaaacgggctccgtttacttcaagtctgtcacaacgttcgtcacgtgtcattgaacacactatcacctgactagcttaccacaccccagaccaataattattgctctgttactaaacattagccacgtaaaagtcttgagtttaagaaaattgtatagtaataagacaaacttttacttatagttcaataattttttttatgtaattccatatatannnnnnnnnnnnnnnnnnnnnnnnnnnnnnnnnnnnnnnatttaattatgtgatggtctccatctacaccagattttctttgcaatgacctaacaaaccaagaccaactttaaccatgtgttgaaagcacttgaaaccgtctatgttcacaggttagctactcaattataactgaagttagctaacgtaatagtatatgaatgatttagttggaatgcgaataataatttttgttgtaggagcactgacttccacatgccatgagtaggcctagagcttaagtctcagtctcattttcatgcgtctctctcactcaatgttccactagttccagtagtattaaatgaataatagagcctttgcatataaccagagagagtgagagacctttgggccaaaagctctaacaaaaattccttttgtttcagagaatagagagaaagagagagagctagagagagaaaatgacaattgaaaaaacttgggagttggagttaagagatacctgaaactttctgtttctgtgatgactgtgaccactggactttgcttttctctatcatctctgctctcaggggctttcttgtctattcatcatcttatatatatcattttcagttaactctacttatcaaaatttacactgtattattgcataaaataagatctggattagactaaaatcttgtattgacactaatcaaacatctcagtgttttctctttgtattttcctcggtcaaacatctcaagatttttttttttaattattttttttcattttacaaatttcgtatctttacattatttgtttgacaagacatatacttctctgatttgaaagcataacaagaaaacgtacttgtgtgattgatacctcagtaacagttttttttccgctcttcatattatctaccatatggaaaagacattcttatagatcaatatgttttttaaatgaaactatggtctaagacaaaatagctagacacaatggccatgatattttctgtatatataaaaacgaaaaaaaaaaatattgatcaaccagtaaatgaaatttaagatcatgtaaataacaaataaagacatttagtagcaaaaaaagaaggatagatcgcgtaataagatacatttatcatcgaacaaatcacatattcatatgccgacccacaaaaaatcacatattcatattacagtcataattcataacaacattcgtcttatttatttgagttgcagacccccaatttatatagtacgtatgtatagtagacgggtttaaggtctacaacaattattcgattttgataactttgaaccatatggttcacgtggacaagagtggtgttttttataccacaaatcatatatggtgttgagtgtcgatcaaattagaatccaagga

SEQ ID NO: 28160 - DNA, 1275 bp, Arabidopsis thaliana landsberg
tttccacaacatctttattataccattattagattaaagtgcgtgtgtggaaatttgaatatctctctctctcataattagctcatcaagctcctccttcattttcttattcgtactagatttctcttttgccttttttatttggtagagctctgctggttcatggatattgagccctgcttgaagttttgggggttggttttttcttctttaaaattgcatggcaactacaattgatcaaaccagcatcaagtcattgcatctccatcaactcatccgtttcatcatcacaatcatcttcttagctttcttatttctcattggccctacaagttccatgaatcatcaccttcatgaatcttcatctaagaacactatggctcctttcaagaggttccttctacaaccttccactccatcttcatctactatgaaaatgcgtccaacagctcaccctagacgcagtggcacttcttcttcttcggcgagaaagaggagaagagagtttggaaatgatgctcatgaggttcctagtggtccaaaccctatttccaactaggtgagttggcacatctggttttttaccggtgagtttgaaagataagttattatagatcaatattatatgtataatggagaagcttctgatcgatggagattagaaagaagcttgattattatggactttttttggatatgaattatcaagaatttggtatatatttctttggatcgatcaatttggtacccttccatctccctaaaatcttttgttcgttctaatatatattgttttctccatcttataagttttgaagttagaagtgtaaagaagagatatatactcttatttattcacatgagactgtgtgtatgtatgtagccacctctgcatttcattcacaaagtatttggggcatatagaatcttttataattgttagatttgtctaatgattgtttaattattagtataaaatttggaccattaattaaccaaaatactctatttgtaacactaagtgaataacattgaagatctcgagacatttcacaaataattgttcgatctcgttttgtccggacaaaactgtctcctttctgaatataattttgaaaagaaaatgcaaaccagctattatccgatatcaattatctaaagtagttttcttttctaccggaaaaagtagtaattatctttaaataatataattcatgttactatgtaccctctaatatattcatacccaaccataggttatacgattcgacacac

SEQ ID NO: 28161 - DNA, 1649 bp, Arabidopsis thaliana landsberg
gacatccacaaaggttcttgtacctacctctggatgagctagcctcagagcagctgctaaatctttctctgagatttctcgggattgaacatcaatcatcatagtcttatcccttgtgcaagcgtatatcaaattgagatcacttgagctaagctatacagagttcgaccacaacaaagatacaaaaaatcaaaacagaggctacaatttgtaaatgtagagaatataccaatataccactttttacctcatccatagttggattgacaacaaattgcccacatatccttcctatccggatgactccaatgggccctccccatggaacatctgatagcatgagcgcagctgatgatgcattagctgccagtatatctggatcctgcttcccatctgacgatagaacacttgccattatctgcatgtgacaaaatttacagatgaagataccaaaaaacaaactttcacatagatctatatcccaaagattttttagaaattttcatacctgaacttcatggtaaaaccctgtaggaaacaatggtctgattggtctatcaatgagccggccacataacagctcccgctcctttggtgcaccctctcttcgcatatacgtatttggaatcaatccctgagcgtattgcttctcttgatagtcaacctgacagtagtttccaagaagaatcataaacatcagtttaaacaaatcaccatcaaccattacagataaagcaatttcaatagcagattcctgagagaattctacaaatgtatacagcataaaggtaccaaacatctctagaccatttcttaattcctcacagatcatagattccttaagacaattcattcaaaatcggtaactaaaagggaaatggtggggagattagtaacatacagtgagaggtaagaagtcccgaggcgagtcggtcttagcacaagtaacagtagagagaactttggtctcgtccatgccgagaacaactgaaccattagcaaagcgagcgatttttccagtctcaaacgagaccacgcgggatccgacttcgaattcctccttaaatgattccaaaattttggttcctgcggaggccggcgagtctggaacagacggagcgaaaccaaggcggccggagcagatggtgcgaaaccccagagcacgccatgcgaggaaattaggaagagaagctgaactagctcgattcacaatcgatgacatcacacatacacagagagagtgagagatgcggagaagagagggaatgagaacggaaaagggtttaacgcaccggtgaagtgaggactgagccgacaacgaaaactaaaagaagggttttagcagtcccggtctggttcggtacggttctgctataaataatcgaatttacaaacattaaaccgacgcctatgatctctgttttagattttgattcttggacaaaatttcttcaagtataccgttcattttcaacaattttaacacctacttaacccagcaaaactgatattgcaaatcgccattgatcactttttagtgtatgtataaattagtgttggatacgaaactgaaaacagatattggcactcaaatttttaaaataaattggaaaaattaagcaaaaacgtttatttccaaccaaaatatt

SEQ ID NO: 28162 - DNA, 1668 bp, Arabidopsis thaliana landsberg
ttatttagctagcaaaaaataatgtgatataaatcaaagaaaatgtccttagaccattaaattaatttattttttaatctaaagagagaaaaaaggataaaatctgatatgaagtttaaatgacttttcatatgctatcataaagatttgttttttcttataaaaatgaaagttaataaatgaatcattaagtaaaattctacattatagtttgaaaatgatcccaactaaggataaatgatcccataatatttagttcaaacactttgaaacaagtacatggacaaaccatacttactaggtctaggtctagtgacattttcgtgcaaaccaaacttttgttttgctcaatatcaacttaacaataacaaaaaaagctacacggtatctaactccacaatggattttatatttggcattataatcttaagggcaaaccatactttaacatttaatttttaccattatagtattttaatcatataatagtttatttgaatatattgtaaagaaaatctaaaccttctcttgccgccaacacgcatgtcttgacgccatcattcactctcataaaagacaaaagatcttgttaaaagttaagtaatcttaatttaattctacttgataagttttattaatatataaccaaaaaaataaaaaaaagaatatgagattaaaataatggggtataaacaaacaattgtaaagattaaaagttaaatagatgttgaatgattaggtggaagaaaaagaacataatggggagtgttaaaaacaataaattaggatgttgaaaaaataagtcaatgtacatagtcttagaagatttatcttcaacaatgagactaagtttgaaagaaccatcaaatgtacacactcataaagacatatttatgtgtgacctaatcatatcgaatatcaataacaaatataatacctgatatttccaaaatgacatgactacatttgcttatcccaaaaagaaaaaaattattcaagtaacattcagtttcaggcagatggtttgtgaagtcaattagaataagcaaatctaaagctgcttttgttacatgctttttgcaacggctgcatcactacgtttccgttttagtccctaaaaatacaaagagatcaaatcagaaattcaccactaagtattttttcttacaaactcgtgaagaaaccattaattgagaaacatgtgtaagaaaaccattattatagagtgaaggaataagaaaaaccataagggtaagaagaagattaccttggcggcagattctgaagagggtaattataattgctttttgggccttgagtttagttctggcatggattctaaggcccatatggtcctaatcatccgagccgtcgacggactttttgtgtattccaagtatggtcgaatctaaacagataacaacaattaaaaatttacaagaatcttgtcaagtctctctttcacaagtctttgcctcaaaatcaataatatctctctcttcatcatcattgtgtttcctcctgatttttattcctcatcttcacaatattggtgtcttgtgagatcaagactgtgaaatttgagattcaggatttgtgttcttttttttttttgttagtgttgaggatgaaagaagaaaattccaattggtttggtaaaagggaaga

SEQ ID NO: 28163 - DNA, 2079 bp, Arabidopsis thaliana landsberg
cacacaaccggcagagcaccattctcactcaccaaggcctcaacacttacccctggagccgcgcccacgcgcttacggctcaacgcgtctgcaaccacattagccttactaggatggtaagctatctccagatcataatcagccaccagctccatccatcgcctctgcctcaggttcagctctggctgaatgaacacctgcactttcccgccataaagataagacctccaaatcttcaaggcaaagattaccgcagccatctccaaatcgtgagtaggatagttgccctcatacttcctcaactcccgtgatgcataagcaataacctccccacgctgcatcagaacacaacccaaacttactctcgaggcatcagtatacaccatgtaaggctctccatgctctggcaatgctaacactggtgtactcgtcaacatctccttcacgctcacgaaaccctcctcgcactttcaaatcccttgaagaagttatccggcgaagattctcgatggttgttaacgacgtgtttgttgagatttcatactcggctgatgacgttttggtgaggctcaatggtcaggaaacagctccgacggaaatcaaagatgattggtctttcagaatgttcaagtctcttctaaggtctgacagttctgtgaatctttttgtcacctttaagagactggtagacgataagcttgagttcctagatccccttgaaattgctgttccgccttacaacagaggcttcccactgatacaaggtgataacattgtgaagcattgcaaccctttattgttggtgttccagataaaacgagcgtacaccatgaaaatgggtttgacgtacaccaagaacttgaacattctgttcgagaaccaaatccagtttcagacatcagtagcccagctggagatgtccgagacctggtcatttgggatggtactgttgataactcactaatagctcacattgaagaaattgaagctcagttaaaagatgaaaatccacaagaagacgttgttgatgatagtgaaagcaatgatgattctaatgagttcagtgaagaagacgatgatccagactatcaatctggatcgaaagaggatgaggatgatgacgtctggactgagacagttttagacgagaatgtggcgttgaacaacgatgatttcacagatccccctctaagcaaggtacataactatacttatcttcttcgtgaaatggatgattttgttaaccctcctctgttggtagacaaccctcttctgtctcctgtccaagttaagaggagaaaagtctcactaaaagagttgtcctccaatcagaagaaaggacaggcggcagccttaaagagagggataacattgtgtgaaatatatggctttgaagacattgaaccaatgttcattgacagtgactcacccgatttcagaggtcataacattgatctttctaaagaagacaatgttatgtttaaaggaagggtttttgaaaccaaggacgagttcaaagtggcactgtctatttatgcaatcaatcaaatttttcagtttagtttgtgagatacatcaagtgttatcttgtagcacaatgtgttgacaagaaatgaaactggcgggtgtacgcgcataagttggtgatatcgatgagtacgaggttaggaaagtggagcttgagcatgtatgtgatgtggaaacccgaggtcaatttaccaaatacaccacttctaagataatcactgctttattacggtcgaagtatgtcaatgtcacaactggtcctagagcgagagatctaccccaagctgttttagacgagcataatgtgacagcttcttattggaaatgctggaaagcgaaggaattggcaaaatcttctactcaagggacagaggagacttcttacttacttttgcccctatatttgtatttattgcaacttgcaaatccagggacaatttaccatttagagacagaagatgatgatgtcggagatgaaaggtttaagtatgccaatgtttcactgggtgcaagtatatagggtctgaaattcatttggcgtgtagttgttgt

SEQ ID NO: 28164 - DNA, 1933 bp, Arabidopsis thaliana landsberg
tatggattggggtttaagatcatcaatcattgtgatctgtgtgtgaaataaatccctttggtatttgaagatttagaattcactcaaaatcaagaattcatgaacttaaatttatgttgatgtctggttacggtgaaaaaaaaaaaaaaaaaaaactcaaagaaactacagaatctaaagaaagcatcaaaagaaaacagagcatgttgtgtgaggaatatctaaaacgtaaaatgttattatgagatggaacaactacataggaccaggataactgaaaaaggcatcaaaacaaaacagagcatgttgcgaacttgcgatcaggaaataactgttacgaagggtaacaattcccagcgatgtcaagaaaagaagagaggacagagagaagttgacgtagaagaagttcaaatgattgacctatgaagcaataatggacattgaaaccggccgctaatctgatgtgtttaagaacactatgcttgagatcatcttttctcgtgaaaatatcacatctgttcaagagagattgtgtaatacttatccacttaattggtgtgctacattttagaagtatataactggaaattcagagttctagttcaggattttagtttcatgaatcggaaaatctatctatgatgtatatatatggttatggtatgatgatgaagtaacactagaatttcaagaaaggatcaacaaaaacagagaatgttatgaactcatgatcaccaacctgctccctagattcatcaaaggaagaaagtcttcaacgtcttgttggtaaactagagcacatgcttagaacgatagaaccaaacattcttggcaaatacttcttttacactcaagtatatcataatccaacatgttccatcaagtgataattcagcagagatattgagaagagttacgaaatcatcgacctgtatcctaaattcttcatctcccggtcgacttcatcatcgattccgcttgatctaacataacaaaagcttgatgaagagacggaagaggattcataagcataatctgcgttctcacattacttagtccattatccaaccccatcaaaaacgcataacgctgatccttctctctcgcctctttagctcgtttcgcaatctcgcaatcacaacactccggcagcacaggatcatactccaacaactccacccaagctctcataaacttcgcaaaatatctacctacagagtcaccatcttgcctcaacaccgcaagtctttgacgaagctcatagatcttaaaatcaacacttggtacaaattcaactcggagatcttcccaagctttatgtgctgtctccgagaacgttacatagcttcgaagctcttggcttaacgaactcatcatccaagatttgactctcgcgttacatgtttcccatgggcgatagcgcgtttaggaaggttcaggtttcgcgatggttccgtcgatgaaaccgatgttgctgtggcttggagggaagatgacaaaatcaatcttccacatgaagtatatatctggggacccgctaacaatccacatgggaagattctcgttggattgataatttggatcgagataatagggagattctggatcgagtgttggagattccgccattgttactgtgacttgctctgctctgagctctctcgttactgtttgaatttagggtttgctttttattcctttcaatttttataaacataaatagatgggctttagatatctccttctgagcccaaagttttaggacttattagatcttcccgcctcaactaatacttgtgtgttgcgtggtatgtacgtaacttcaaaaaatgaaagggctcatttgcttcaaacttaatattggatccaaaccttgattcatttttttttgtttgtttgttattcatctaaaattaaatttatcattcttgct

SEQ ID NO: 28165 - DNA, 1894 bp, Arabidopsis thaliana landsberg
  unsure (1)..(1894): unsure at all n locations
tggacagattcagtcgtctgtgaaatgctccatctttccctattttttccaatctttatacttcatcgaaaagagaggggggatgatggggtttgtacactacaaataagagagaaagagtcataagaaagaaacaacttcttttaatttacagaaaatatgagaacaggaaagtaaattggttcaatgatactcaatgtgagagaataaactaacaagcaatacttacactctcctnnnnnnnnnnnnnnnnnnnnngactctgttattgcctctctaattttgacataatcaaactgatccactattcgtaccccgagtctgaacttcctgctcctagtccagctagagttatctgtaaatgagatttcatccataacaccaatgccatcattaagaaccgcaaatacattcccattgagtagaggtttctttccttctctctctcttacaatgttattcctgatatcctcatcagtccaatcactaacactgttaaaatcaccctcaacgacaaaaacttcgagtttggcggatgatgcaggaccagaagagaaaatttggccagttgaagggtctattaatccaactcttatagcttggccttcatctccttctatccgagctgaagtaaacacgggaagcgatagattgttcaagaactttaactgtagattccttgattccaaaggatgagtctctttctcacaaatcctgaacaaagatgaacatgggaagaaattatttattacagaacagcctgaaaaataaaatgttgatcttgaaaaatagttttaccacttgatgcctgctagatgctttccaagagctaattcaacttcttctttgacctgttccaagggatactcataaattactgctaaaataaacacacaatactaggagagaagggtactatattatatcaacgagatacgtaccactttacgaattaagggctcgagaacaggttcgagaaaatgtttgacggtttgtaatctcattacctcctgaaccacactaaattttgatccaaagtcatatgtaggaattctcattaacactaaaaatcaatttagaaaatctgaacttcataaacattgttgatttgtcaacagtaagtgactgggaaaaacaaataaagcttcttattaaggaatccaaccatggtgactacgtggtgtcatactatctagtatgagtacttttgtgtgtcaatagaattttatcttcccaagaagtatcactctttgattataaacaaaactaaacctttttattaattccacgacaagacagtgatcatctaaagaactccgcaagctatagaaaatcgtgtcaaaacctaatcatagaagctcaattttatcctaacgaaacgatcacttcactatttatacttgttccaacatatagatcacaacttttagactcgaattcatccttattagctaatacataaacccaattgaatgaatcgaactatcgaagactgattcaagctacaacaacatcgtaaaccctagaagctgaaacaaaatttataccttttgaatcttctacgcttgtcttcggatgagccgccctcaattcgacctttcccttcttcaaactctctcttctgtgacatgataccacaagacccgttgaaattcccagagaatttcaaccatttacagaatattttttatgcgtttttttggagtttttgtacaacaagaaccgaaatttccgggaaagagatatatatatacacaataaagagtaacggaattatcgtaaaatgaatctgatcttcaaaacaaacaaagacccgtatcttggagttatctgtagcttaacgcttccccaccagttctttctttcaaaggctctgtcgtacgacttgaacaaa

SEQ ID NO: 28166 - DNA, 478 bp, Arabidopsis thaliana landsberg
cgagtatgcccgatgagatgatgcgtcgttagccaaaccatatcatgtaggcttgtaacataggaatgttaccgagtatgcgagttttgattgcctgaacttggatctgttccaagtcactcaagtcactcatgtctatggagacatttatagcttcaaattccattacaattgaagttttgatatttgtaaagctcttgttgatgttataagtacaatttgagtaatcaaatatttataaagttcagtcaccttaaacaaattgaagtaaatgctgatattttgcagtttccatgaaagactgagtggtacgtgaaaccgacgtcgttatcgttgtgtttaactaaaaagtcgttttaacttctttattcgcgagcttttcaacttttcgttagtggctgagcaaaaatggaggctacacggagcgacgaccccagtctgaaccctatacgcaatcggaatccgaatccgaatccga

SEQ ID NO: 28167 - DNA, 1473 bp, Arabidopsis thaliana landsberg
aggcacacacaaagcgacagagtggaggggagagaatgatagcaaacggtgagtgacggcggagggaaggtggcgaggcaagcaggaaagtgggtcggaagagagagacggaagggggtgtcagggacaggccaggtcggagagccaggggcacgggcccgcaaagccgcggcaggaggggcggcaaaccaggggcatcaacttacatagttggagttcaagaagacaaaggtttctaccttgatccgcatgatgttcaacaggttttcttgatcactccttataaatctttattttagaatcaaactagaattattgtagttccaagaaaaaacttaacacttcgatctgaagtttgagacatataaggtggtccatatatattttccttatattgtctccatcacattcatttatgtattgtctaattggtttggggactgatattactcagtccatgtgcttcatatcatatttcagtctcactgattgagccttatcggtaatggttggtaggtagtgacagtcaagaaagaaaatcaagatgttgacacatcgtcttaccattgcaagtgagtttgattgatctttttgcctcatttagttctctgtctctacatggttcatacttgttcttagtaatcctactaaatctgctacagtaccctccgttatgttccacttgagtcactcgacccgtcactagctctcggattctattgccagcacaaaggtattaccagtttataagagtggtggtcaatcctatttacgatttggctttggttttgggataaacaagttatcggtttgattcggttacttcttttttcataacgtggtcaatcctactttgtaacagatgattttgatgatttctgtatccgagcaacaaagctagccggagactctaatggtgctcctctcttcactgtgactcaatctcacagaagaaatgactgcgggattgcagaaaccagcagcagtacagagacatctacagagatctctggtgaggaacatgaagatgactggcaattactttgaacacttctcctagccattcttttcattgtgtgactttgttcaattatcaaaataccattctttttacatcgatactaagatttgatgttgtataaataaagaaaaccccagattaaagtatcacccactctcacttgatttatgtattaagtattaactattaacgttgacttaagtcaaagtgttctacaacagagattcttcaaacgtagattgaagaacacgagaaaggaagactcgaaaaaccagagggagtgttgacgtggctccacttcccgccattcttctccgccgtcgtcgtcaccatcatcgatccactttcttcaccaccaccgccaatcattgccaccgcttggccactcaaacttgcagcaaaaaccgaagtcatcgtcgtcaccggaagccgaatcgtatgcataattacct

SEQ ID NO: 28168 - DNA, 1146 bp, Arabidopsis thaliana landsberg
  unsure (1)..(1146): unsure at all n locations
ggcacatccttcatggctttttcttctatctggattgatcggattgctgatggagcatctatctctggtttgaaccagcgattagttccaggcgaatctgatggagatccttgcccggctgcgactgtgaagcctgatgtttttgtctttggactgtgggacagagactgttgcttcttcacctgcattagacaagacaaagacaccgaaagaaaaatgagctttaaaacataaactatgatgcaacaagataatcttgtctacggtatcagtattcttcaaacagaggacaacgtacctnnnnnnnnnnnnnnnnnnnnnnnnnnnnnnnnnnnnnnnnnnnnnnnntttcagaggaagcccaaggaggagttcctttttccacatcagattgctgcaaacttttggctggttccatcggaatcggcttcgaagtcaagaaggaactcagtaatatctttccttcacttttaccaggagaatcatcccctgactgatttttagtagtcctaacaggttcatgagagcgggtcttgctttgttcatcttgaatatcccgcagggaagataatcctttagaaatcttagccccaccccacacaggaccttcaatcttaggccttggtggaggagcaacaacaggtttagggacatcatcaagagcaccagtcaagaacatggaaagcccaccctttctgttcttcttcttgtttgctgccgttgcaagtttcttgcttctcggcgaatcgggtggattatctttcttttgcgagagtgagacaaagtctgattctttggggaacccactaatcatcgtcgtatccaacatggttttgccaccctagtagaataaatacaaagcaaaaataattcaactgacgcagatggataatatgatcaagtgttaacaaaggacatttcatcatgaaaaaccagtacccaaactaacctttggcttgatagcttcacagatttcttcaatttctttgtcttgcatcgtattctatttccactttaacttcaccaaattcagggaatgtcttcaacttgtacaaatctctgattactctttttcttcttttttcccttcttggtggcctttccttctagcggtaaagctgttgttgcttttgcctcttgaaactc

SEQ ID NO: 28169 - DNA, 2006 bp, Arabidopsis thaliana landsberg
tttgttactagagttttagccattatcatccctcacaataaggtgtaggaaaaaacattaatatatagtatgtatacatccaaaaaaaactttttggaaaaaacaaattttgggattataaaggacacgtagcccaatcgatgaacagaggacggcaccgaatcaatttgacttcaccttttttccccatatgataagagtctcatctctttcctatatatatttcgtacctctctttaaggaccctacgtctctctctttctctctactctctgtttcctcataactcaatcactatattttgttaaaaacatttgacttcatcgatcggttaacaattaatcaaaaagatgggacgatcaccatgttgtgagaagaagaatggtctcaagaaaggaccatggactcctgaggaggatcaaaagctcattgattatatcaatatacatggttatggaaattggagaactcttcccaagaatgctggttagtatacgtatcttcattattacattttaatcatactttttttattcgtgaattgttttttttaagttttgcttgaatcttgactatagggttacaaagatgtggtaagagttgtcgtctccggtggaccaactatctccgaccagatattaagcgtggaagattctcttttgaagaagaagaaaccattattcaacttcacagcatcatgggaaacaagtgagtttgaacttttcaataattttatatttttgccattacgtagtttatacgaaaactactaatcttgtagattagtcttagagtcatagctttgaatgatgttactagtgatttatgttaaatctacaatgcatcagattctaactttgtttgctttcgtataggtggtctgcgattgcggctcgtttgcctggaagaacagacaacgagatcaaaaactattggaacactcacatcagaaaaagacttctaaagatgggaatcgacccggttacacacactccacgtcttgatcttctcgatatctcctccattctcagctcatctatctacaactcttcgcatcatcatcatcatcaacaacaacatatgaacatgtcgaggctcatgatgagtgatggtaatcatcaaccattggttaaccccgagatactcaaactcgcaacctctctcttttcaaaccaaaaccaccccaacaacacacacgagaacaacacggttaaccaaaccgaagtaaaccaataccaaaccggttacaacatgcctggtaatgaagaattacaatcttggttccctatcatggatcaattcacgaatttccaagacctcatgccaatgaagacgacggtccaagattcattgccatacgatgatgattgttcgaagtccaattttgtattagaaccttattactccgactttgcttcagtcttgaccacaccttcttcaagcccgactccgttaaactcaagttcctcaacttacatcaatagtagcacttgcagcaccgaggatgaaaaagagagttattacagtgataatatcactaattattcgtttgatgttaatggttttctccaattccaataaacaaaacgccattggaatagagttatgtaaacatgcaatcattgtatttgttatatagattttgttacatatccaaaatccaaaatactatagttttaaaatatttattactaaagtatattcgtcaaggggaaagcaacatcccaccagtaaacaatataaagctcagctcataacattgttttaatgatggagtttctattattggtatctatctactcttttgtttaatatttgtggtcgggttttcttctacataaatgcatggagatcgtatcaacgatcatattaaaatatgattcgaagatatatactataattgatatcatacatggtgctgaaatgttatcgaaatataaaggtagataaataatcgattgtgaagaattatatcattgacttattatctcttggttctctgaaga

SEQ ID NO: 28170 - DNA, 896 bp, Arabidopsis thaliana landsberg
cattagtattaatcttctggagtattgtgtttactctatattaacaaccatcacagaagttcatcaagaaacgtcttccctttatatttctcgaccttaaatcccatctcctccatccgcaaccgctctgtctcgagctcagagagctctgctttcatctcctcgaccctcaacctcgcctccgctacttccttctcaatccgagccaaatcagcttcttgaatctccatttcttgtttcttagacctcaccaatccttcttgtctctccttctctgagtctgtgttctcttgatactgagcaaactcctcaagaaccgaacgcatccagccaacgtcgatgttcacagactccaagtccttgagaaccgcgaccatctcttttacttttagttcggttaactgacccaccggggttgatccaagttcttgcatcaatgagcatagacactctaggtatcgggatcgcattgatgctgattctagcttgcagtttgctgctatgtctccgtgtttatcaatgattgactgtaggattgtggaaacacttgagttcacacggtattttcccaccgaaacacatgagtctgacattactgatataaggtctaactccactccctcctggtaaccattgttttcatcatcatcatcatcatcatcattggcgcatgatcttggagggcttacaacattaaacaaactaatctcactggctgtgtcattcttgccacatgttttatgccctataggtcgtagtgataagggtttcccacaatcagcctgaacaacattgaaaacaaattcgatcattttaagatcaaacctactgcttgtaagaacattatataaaaccaatactctacaggattttaatatatatatcatacacactaa

SEQ ID NO: 28171 - DNA, 1760 bp, Arabidopsis thaliana landsberg
  unsure (1)..(1760): unsure at all n locations
atatagtggcgggagctagaatttgtaatcatctcttataaacttcatttgtaattgatgttttgatggaaattgttcttggaagctggtaatgtgtagtttagagaagagagaaactaaataggaatgatgtagttccttatcttttacttgcgattgacaggttgaatccatattagacaaggaagatttcactttggaagaactttcggatgaggaagacataatccatgaatgcagagctttgaacagccggctcataaatttgtaattcattttaggcgtcctctttttttaaccttgttgtagtttatgtgtagatttggtatgctttttagtttgtactatgacatgtgtcttctctctatattaaccattccttaaaaagattgaagaggatatgcaatccagcagatattgcacgaaaagtagttagattcatgttttctttgcaggatgaccctgttatgctatgcaagttttagtttctcatagtaggagcaaggattgcaatgttggccttttatgctgatattatatatgctcatttgcagtctgagagaaagagcccaagtggaacagttattacgttttattgttgaagaatctcctgaagatgctgacagcaagcgcgctttcaagtatgtgcctccttgcttttgctgattagctttatcaagacgtacagttgacctgattttttggaatatttctgggaactttcatgaactttaaagcatatttttctattaggtttcctttcatctcctctgaagtcttgacctgtgaaattgatgtaattnnnnnnnnnnnnnnnnnnnnggaggaggtattgtactagttttcttcttcctttattatgatgaatgcagaaccttgttattttgagttagatgtgtcttttactctggtctcacttaatggttcatacttcttgttgcagctaatgaacctacttttctcctttttggaacccaaccgttcccacagtgtaatgctagctgggtatttcagcaaggtaatgttttcattggtcactttcaatagttcattttagaattttagttcttactttttagatattatgtctccacatgtttgttacttaccaccaatgtatcttgtctcttctgggaataggttgtcatatgcctcatgttgaggaagacggtcccgctgatgaactatgtaaaagtgagttctctatttggatgttcatttgaaaatcttgcaaatagcacaacgatcatgcgaagctctgattgaaaataaaatttgtgttgcagaaagcatattaagtgggatgttcccagtccttgtaattttttgtgctcaataaatttttcttcgacctactgttaatgataattatactatgtcgatataaatgacgttgtggtttaggtagaaaatccttgaatagtttgacatattattgaggtgcaccttttttttttatacttgttactcagtgaattatgtggtgtgcagtcaatagaaaagaagcaaataatgtttttcaataccatatacaggcccatcagaatgttttccagcaactggttgatttgatagggatcacgtccattatggaggtaaaccttctctctcctcttatccttatatttgattctggtaatcacttgtaagcttacgcatgtgatttatataggttcttacccggttggttggtgcggatgatcatgtgtatcctaaaaacctagatgtgatgcaatggttatctcatagcaatctgcttg

SEQ ID NO: 28172 - DNA, 1349 bp, Arabidopsis thaliana landsberg
tttcaaaacacaacaacaaaaagaaccgtacgaaacttttgtctctttccgtgttgttgttgttagctaatgtctgaactcaacttccacctcctcccaataatctccgatcgcttcacgacgacgacgacaacatcaccgtcgttctcgtcacattcttcttcttcttcttctcttctctctttcaccaaacgaagacgaaaacaccaacctttagtatcatccatacgcatggaacagtcacggtcacggaatcggaaagacaaagtcgtcgtcattttaggagcaaccggcgccggaaaatcaagactttccgtcgatctcgctactcgtttcccttcagagatcataaactccgataaaatccaagtctacgaaggattagagatcacaacgaatcagattacgttacaagaccgtcgcggcgttcctcaccatctcctcggcgtcatcaaccccgaacacggcgaactaaccgccggagagtttcgctccgccgcttcaaacgtcgtcaaagagataacttctcgtcaaaaggttccgattatcgccggtggatctaactctttcgtccacgcactcttagctcaacgattcgacccaaagttcgatcctttttcatccgggtcgtgtttaatcagctccgatttgcgttacgagtgttgtttcatctgggtcgatgtatcggagactgttctctacgagtatcttctcagaagagtcgacgaaatgatggattcaggtatgttcgaagagctgtctagattctacgacccggttaaatccggtttagaaacccggtttgggattaggaaagctataggtgtaccggagtttgacggttacttcaaagagtatccaccggagaagaagatgataaagtgggacgctttaagaaaagcggcgtacgataaggcggttgatgatatcaaaaggaacacgtggacgttagcgaagagacaagtgaagaagattgagatgctaaaagacgctggttgggaaatagaaagagttgatgcaacggcgtcgtttaaagcagtgatgatgaagagttcgtcggagaagaagtggagagagaattgggaagagcaagtgttggagccaagcgtaaagattgtgaagcggcatttggtgcaaaattagtttttttttttgttttttccagctattttacagctcatttttgggaactatttttgaaataataattggaaaaaagagacatttttttgttgttgggttttgtttttgagtaacatagaatacatatgatcagacatttttggttcttaaaaacctaaatcgatgggaaattttttcaacaggggatcctcgtagagctgacctgc

SEQ ID NO: 28173 - DNA, 1069 bp, Arabidopsis thaliana landsberg
ctagaaagaacgatcgccgattggtatacgcttcatccttctctcggatacgccttctttttcattaaaataagctggaaatggctgccatgatgtagaccgtgaactttctggtgaagggactgtggcttgttcatcatatttgccgtggcggaagaagtcgcggactatcttgaagaagtagatgaagagagcgataaaacaagagatcccacacacaaggaataatccccagaagcttcggagtttaagctgttctgaatcttcatctgacactgaaccgttgaggttactgcagttagatcttgaaagccacttgtcatggatcttttgaagctgtccggtttctgatagacctaagatcgcggttgacatgtcgattgctaatggagagtctcttggaaatgcctacaaacaaaaccgcaaaaaagatgatcaagattaatgttcaaacaaaccgcagagacagttttaaatgaaggtactcacaaatccccagccacttctggtgaattcttggcctctaatggcaaatccgcagaattctgagaggaagagatcaacgtaaggacgctcatcaacaattgcagcaacagttccgttttgaagagctgcagcgtattctttaggagagccgagtggtacaagtctggatctggcaatgttaagctcatcaatcatgtagttttctgcataagaacctacctgaaacccaactcgtccactgctgctgatgagtgtgtctactcctctgattggtgagtttagctgttgcactgtaagaatcgatgtaagactcgctgtgtagcttgatgttatgattagtaccacaaatagccagatgagcagaacagcacgaccgagtgtactcactgtgttctctcctgcaagtttagtagcataaagatgttggagatatcatcacctatacagtagtaacttagctgcagtttttagatgtaacttactgtgggagaaaaacattgtggagaagctgaacctgcatacctagatcattgcttatgaggtctttaggtatgttatgtgccaacatattgataaaatggca

SEQ ID NO: 28174 - DNA, 3373 bp, Arabidopsis thaliana landsberg
ggcggagctcttgaagatgcaaggcaaatttttgagcgcatgtgtgatcgtgataatgtaacttggaacacaataattgggagttatgtccaagatgagaatgagagtgaagcttttgacttgttcaagaggatgaatttgtgtggtatagtgtctgatggagcatgtttggctagcacacttaaggcatgtacacatgttcatggtctttatcaaggaaaacaagttcactgcctctctgtcaaatgtggcctagacagagatcttcatactggtagctcgctcattgacatgtattccaagtgtggaatcatcaaagatgcacgtaaagttttctcttctctgcctgagtggagcgttgtgtcaatgaatgctctaattgcaggttattctcagaacaacttagaagaagctgtagttctctttcaagaaatgctgaccagaggtgttaacccatctgaaatcacttttgccaccattgttgaagcttgtcataaaccagaaagtttaactctaggaacgcaatttcatggtcagataacaaagaggggcttctcatctgaaggtgaatatctagggatttcccttttgggcatgtacatgaattcacgtggaatgacagaggcttgtgcactcttctcagagttatcaagccctaagagtattgttctttggacgggaatgatgtcaggtcacagtcagaatggattttatgaggaggccttgaagttttacaaagaaatgcgtcatgatggtgttctacctgaccaggcaacatttgtcactgttcttcgagtgtgttctgtcctttcctctttaagagaaggtagagctatccattctcttatttttcacttggcccatgacttggacgagttgacctctaacaccctaatagacatgtatgctaaatgtggggacatgaaaggttcgtcacaagttttcgatgaaatgaggcgtagaagcaacgttgtctcatggaactccttgatcaatggatatgcgaaaaatggttacgctgaagatgccctgaaaatctttgattctatgagacaatcccatatcatgccagatgaaatcactttcctaggtgttcttacagcttgtagccatgcagggaaagtgtcagatggacgaaagatttttgagatgatgattggtcaatatggtattgaagcgcgtgtagatcatgtagcttgtatggttgatcttcttgggagatggggatatcttcaagaagctgatgacttcatagaagcacaaaacctgaaaccagatgcaagactttggtcatctcttcttggtgcatgtaggattcatggagatgacattaggggagaaatttctgccgagaagctcattgaattagaaccacaaaactcgtcagcttatgttcttctttcgaacatatatgcctcacagggatgttgggaaaaggccaatgctttgaggaaagtcatgagagacagaggagtcaagaaggtacctggatatagctggattgatgtggaacagagaacacacatttttgctgcaggagacaaatctcattctgaaataggaaaaatcgagatgttcctcgaggatgtttataatttgatcccgcacaatgctgttgtcaatcatgatatagtggaacaaggttctcttgattgtgtgtaataaaacaaggaaacactaacggtgagcagcatctcgaccatatttgatttcgtacagagctgaagatcaccagatatgttcacaaaatcagatacaatggtaggagctcaaatttcatacgaacatgcgactatgtttctttcgcctttggtgatgtggactaagttttcatatagccaagaaaacaaggctttattctcgttccttgagtactatcagatcaggtaactgggtttgtttgcagccaaagctcaaggtcttataggaaatgagacgaaaatccaagtgaaggaagagagggatccatcgaaggagacccaattagcacagtacaaatatctgacatggcgagaacaaaaggtgatttaatttcctttgtgtaatttgtgcatgtttgaacagacactgtatctctatcgttacagtaaatcttgtttgttgctggcaggaatgtggacttagtgtgtttttacaaaactagttggtgtaagagagtatgatgattatttccattagcacgagtgacaaacgaagatggtcttttgaaacattatctttttagtatctgctttccttttgtttgtgtcccatgctgagtttagattcacattacatcagtctctatcttctggtggagacttacttacttataagcgacatagaagcaagtgacaactgatggacacatgtgaatgctgagttgtttctagacatttcaactctgttcacgagactttttttatgtactcatttcagatttcacattcctctgttgcaataaaacaccaaagtgagaagaagacaaagtgggtcctggttcttgactccgatccagaaacaaaaaattgataaatgcacagctcataatccaaatggatcaagaacaacatgaacaactaagttaatttgcaacatatcaataagcttacatcttctcacagtttagattttacatgtgaaaagtcatttcacaaaacctgcaactaagtaaacagacataagaatcactaaagagcgatcaagtaaacaagagggaagaagaagaagagaaagttcctaaatttacaccacaacacaagacaacttttcaacaccaaaaccgaactactcactacttcttgccttgttcaatagcacattcctctggaaccgcggccattgaccgcctaacacggcatatcgtccagagatacaaacccagcagtgcccctaaggctccacaagctgcaccaaagatcaaagcaccaagcattttccgcgtacactcacttctccctcgaccattttcctcctcctttgaaacttcattcggttcaagcggcactgaatgcatccacatcggaggaggatgtcttatttcaaatctccatgaatggagaaaatgtgccttggaagaagagttcccattggcagagcttaaacccacagtgacttcaccacctttccataacttggccaagtctaccgagaaagagaagaacggatcaaacagctttaccgaaccagattttctgaatcgaaccatcattctcttagaacttgcctcatactcaatcatacagctcagagtccttccattgtccatcatcaagtcacccacaaacgaaaggtttctaatttcagcagaatcaggtctaccaactaaaattcttgcactggttcctgtcctggagataccaaactcgacagcaacaactgttttgttctttga

SEQ ID NO: 28175 - DNA, 1552 bp, Arabidopsis thaliana landsberg
ctttaaaaagtggactcttgttctagacgattcaataattatcaaaatcttactacaaaaccctaaggaattcaacaaaatacccaaaagcctaacagttccaaaacccaccagagaagaagaagaaatcaaaatccacacacgaagaagaatcctaaaattgatgggagtcaaaaagagtccacgaaacagaaagacacaaatcaacagtaacaaaacaaaattagattacgaagaagagaaattaacacacttggagagaataatctatgtgccgcgtaaaggtaaaggaggaagcaaagacgcaattataagcaaagcagagaaagttggaggaaattacaaaggaagattccgcgaaattacctattagcaatttgataattaacgaaatattatgagctgtaagatcgtttgctctttattgttgggattttcctctttcgtctctcggcaatcagtaagtgttaatatttataccacgactggtactaaaatgggattcctgggatttagcttttatttctattaaaaagagattttagttgagagaatacaaatttatcagtacttatccaattcttttttaagaaattgccagagtcataatcgctgtttacaaaatttatttacgaaaaatttggacaaaaataattctagtttatatttatttcagcattaatattttatcataattttggatttttttttcaaaaacaatcaccttaaatcccttgtgagaaatttattctagctttgaaaaattgtttcagaaaaaaaaactgagtgattactttttcatcgttttttgtcgaaaaaaaacaaaacaaaaaaaagatttaaaaaaaaaataattactctttttctgaaacaaaattttcttagtaaagaaaattttgtttcagaaaaaaaaagagttttttttttattatcgtttctatatagtattttaagtgtttttttgtaaatatatagtattttaagtatcttaacctctactatcatgatatctgatgtttgtctagagagatttaaggaatccaaattaatcaattgtagtatgtttagaccaatgttttcacgcccgacccggacagtgaaccggactaccttctgggtcaccgggtcattgggtcaaccgggttagaccacgggtcaactgatttaatgcatttgatatatatagagattatatagtttatgttatataacttatatataaaaataataataataccatgtttaataacaataagaagtataacaatacataaagtttaaaaaatttaaatccataaaacctttaaaatactaaaataacaatagtctagtagatcaccaataagtcaataacagaaataaagtaataaaacatcgcaaattcaaaacaactaatctcgattgtcttcctcatcattccatacatcctcttcaggcggcaatgtgaagtcttcatcaaaatctaaaacatcaaagacatatcgtttagttagtcaacatattatctataactaaaagtcaattcgaaagtttaatcaataatttaagatac

SEQ ID NO: 28176 - DNA, 1763 bp, Arabidopsis thaliana landsberg
tggctgttttgtaggaaaagacgaaaaatattatagcaatttaaaaaaacaataagaaaaagtgtatgctctatattaattgaactaacctaaaacctgaacactttacaaaatgataaccatgtgagacatatatattgatgcaataacaagtagagtttatttttattacgctaatgattggttattttaggtatttattaagattatttagtatctaaacattgtatttcttatttagatatgtacaatatgtgctaggacaatatgttattatagttttgtaaatgatcaaattttaatgtccctacgtagcatttttcatactcgtctgaatttgacactaaaaattagatactttacaaaactataattttgtatttctggtttatccaacagctatttactttttcctataatatataaatcgcgaaagatgttactttttcgtaatgaaaaaatgacttgaaaagattaaaactttgcgacaagatttaactatcttttatataaaacatgaacttcatatgattttcatagataaaaagactttgacaaactatactatgcactcaacaaaaaaaaagaactatgaactcctatatatgtgtaatttaagaaaaatcctgttatttattgcgatggtacggaaaaaagaataatgattgagaaacggctaattattgttttgttctataaagaaacatgaatatcaggattaaaaagagctaaagtgaaaacggcataataatttgacatacaatgtcacgtgaactaatttgcttggtaacgtaaattaagtgagatcactttgcaaatctcactttctttaaatatcttattaaagcaaattccagaatgtcgtcatattttaatgatagagaactagtggaattctcaattcattacatcatatttatatggtgtatcgatttatattacttgtatatctatatataactaaacgcacaataacttaaaatataatttttcgctacacatgcaaattgattttgcaaagtatatagtcattcagattgatcatttgtagttacttggttggttttaaattagcaacgaaatcacgtaagcgtcaacataaggaaacatgtagaataaaagtgaatgaactaatcactaattaagaaaaaatattagtttaaaccgaagttggcaaatatacttattacgttgtgtaaataagttaaataataggattggtgaaaaccctcaaaatcgtaaaatgattaggtcataattatgtcattgtatatatagagaatattagagatgcatacgtagaatctagacataatctttaagaaaatagcttgcctaaacagctgagattgacaagcattattaacataactaattatgttttatttcttaagccaaaacctaaaaaaggttatttggtaacagaattgttatttgtacgtcaaaatgtatatgatttggtaatggtttagcgtgtgaattattgttgcgggtctttttttgttatacaactacaatgacattaacgctttttaaaataaataagaaattcaaacattattcaaaatattattgttcacacaaacatttctcctttttccatctcccacacaaaccccattcctccctttagccctaacccctatatataccgtgaagtccccgaaacactaagctcgtgccattagcttttacattaagagaaaacacttgcaaaactaagtgctatctctcttcttcttcttctcctacaaactatatac

SEQ ID NO: 28177 - DNA, 1974 bp, Arabidopsis thaliana landsberg
tttttaattcagattcaaagctataacttttgatggttgaactaattctataactttgaattctttaactaattctataacttttatttctgctttagtattattttgaggacagatatgatctagttaagttcatcaaggtggtacaacaagctggtctttacgttcatctcaggattggtccctatgtttgcgctgaatggaactttgggtaaactatatggtctaattaatacagattaaatttgttgaatctctttctttttgatataattattcattgaaatatgtttaaattaatggtttgcaggggatttccggtttggctcaaatatgttcctggtatggttttcagaacagataacgaacctttcaaggtacacaatggtagaaactaccaacttaagtttttcgttctttgtttattttttttttaagaattacaaagtgtaacttgatgtgatgattgaaaagattgcaatgcaaaaattcacaaagaagattgtggatatgatgaaagaagaaaagctgtttgagactcaaggaggacccatcattctctcacaggtttgtgtcttatttgcctagttgtttaaaattgatacaaaaattacaataatgtgaatgtataaaaatggacagatagagaatgagtatggaccaatgcaatgggagatgggagcagcaggaaaggcttactcaaaatggacagctgaaatggcattgggactgtccactggtgtcccatggattatgtgcaagcaagaggatgctccttaccctattgtatatttctcttttcctttttctctagcccttgattaggatgtctattttggttttggttaatcttggtttagatagcatcctagctaattaatttattgccaaaaatttgagtatggttggtagagtttctattttcgtttaaattctgctttttatcaacctatttatattgatatgaaaggttttttaaaatattaattttgcttatcagtttagttttttagttgttgcgaaaggttacatttatgttgggggttagatttatatgcttatccggatagaatcaatacattgttatcagatcaaattttgcttttgtcggcaattagatattctttaagcgaaagaagatatttgcttgttattattttgtcatttatgtattttataatttgaaaatcattacttctttccttggtgggttaacttttgaaactttttggcctttacttgaagtcaaaattctctttttcttgttagctattgttatcggtatgtagttacaataaaatatcgttttccgatttacttgcttgcaaaggccaaaaatcaaaaagaattcatggagacaatttttcttcacctttttttacctttaaatgtcttacaaaattaatttaccgtggaagtaaaaaatataacagatagacacatgcaatggattttattgtgagggtttcaaaccaaactcagacaataagccgaagttgtggacagagaactggactggttggtaagtcacaaagctattcatttatacagaatcatctttttgttttctttatatattaatctttaatagtaatgtgtgtgtgataatataattctcaggttcacggaatttggaggtgcgataccaaatagaccagtcgaagacattgcgttctccgtggctcgtttcatacagaacggtggttcttttatgaattattatatggtaaatttaagaaatttattaaatataaaatagattaatttacgatctcagagttaattaaataagagaatgctgtcacagtattatggagggaccaacttcgatagagcagccggtgttttcatcgccactagctatgactacgatgctcctattgacgaatatggtaattaattctgctcacatgtctagtccgattaattgactattctctaacgtttttgctttctatttgagtgtgaaaagga

SEQ ID NO: 28178 - DNA, 1131 bp, Arabidopsis thaliana landsberg
tccataaatcacctacaacgagatccaagacctgaaatcaacccattttttgaaataaaagaagaaatcaaacgccaatgacggagatagagagtagaaggaagcagggttcgacatacagcagctttgccagagccgcgagggccgagaagcaacatcgagttgttgcatccctccgtgatagaggttgatacaatgaacttcaatttactgtgtgttgacaaatttgtttgtactattaggttaaaagcaaattcgtttcgagaaattaagcgacaagtgagtgaagcaatcagacctgtaattgctatctgacgaagcggaaagaggtctgaagacataactaggatcacagagtctcccgcgaatcagatttagggatttctccgccggagtctctttgcccatcggactggcgggaaaactgacaagccaagcgagccctctgtgtgaactgtgaagtgaacacccatcatcactactagtataaacttactctatgggccgtagtaatgggccttataaagcaataaaaggcccaataaagctcctttgctttctcctaataacgacgtcgtttacattgtgttagcaagtttgtgatggaagaaggtttaacggagaaaaaaaaaaggattgggttgttttggaaaatatcaaatgtgggcaacgaaactcgaccggaaccaatcgttccttctctgaagctctctttgcaattgaaaatcaacaacatacgatacgagagaggattcttcgagagatgagcagcacaagcactagttctgctcttatccaccatttccgcctcaccactcgcaacttgggttcgcctacaaagcaacggtgtccttacgctgtaactttctgcaattcggggagggaagctggactccgatactccgtcacgcaacgccggagcaaaggctttgggccggtgtcagctctcaatgacgacgattcaccaacagagaccacccccggcgttggctctgctgtagaagacagaccaccaggtatttattattaggagaaactccactttcttgattgatttttattatcatctccacactgctttgggttgttgatatagttagttagttagttagtgatgaattacacactgct

SEQ ID NO: 28179 - DNA, 2438 bp, Arabidopsis thaliana landsberg
cgtaagatcttgatgccaacttaacttatatatagagacaagaggggatctggttaataaatattagtctttttttttggtcgtttataaatatacagtaatttcaattgatctctttttttttttttgtactttgtcattttatgtgttgtcaagattgttatgatatttcggggatattatttatttacaaatcacaataaaacaatgaattattcatatttttaagttcttacatttaataaatatccgaatttaacataattaaatttaataaattgtgtcaaatctcaaatttcttactttctttttcatatatgtcatggtattaaattcttcggccttcaatggtcatttcttatgatatatatgtcctatcttttgtcttaaagacaaaacccaaacattcaaatcttatctttatacattgaaaagcatgttttaacaagaaagaatgtaagcagtaagtatatgaaattatgaactgacaaaaaataaaaaagaatgagattgacaaaacttatactcggcccaagctcgtaaactcaaggggccaatattcaaactcaaaggcccaatagcattcaggaacaaaattaaaaattgaaaattgcgttcttccgccattgacgtattcgatgatgtaagcttaagggaagctccacaagattcttcttcttcttctgtaggtatctgaagtcactaaacacgtcaatcacaaattcctttacttttcctctctgacaatctttctacactccatctctctctctctatatatatatatatatcgaatcttgaaactgatttgaaagaagaagaagaagaaacctaacgaagaacatccgaaaaaacctaaactgtatttactttgagcttgaatctgtaaatggaaggcattgaatctgggtctaaacaaggaaagagagtggttgtgatcggcggcggaatcgccggctcactcgccgcgaaattgcttcagttcgatgctgatgtcacactcatcgatccgtaagttctttcaccagattcttaataaaaacaacaaattctttttgtaatgttcttcgttttgatcataaaagctcaaaacttgtgttgagatcaggaaggagtattttgagattacatgggcaagtttgagatccatggtggagcctaagtttgctgagagaacagtgattaaccacaagagttacttgaaacaaggccgtcttgtaacttctccggcgatcaatatcacagagagtgatgttatgactgaagatggatctgtgattggatatgattatcttgtgattgctacaggtcacaatgacttgttccctaaaactagacaagagaagctgtcacattatcaatctggtatgagatttctgtttgttttggttggtaatgagattgtaagtgaagatatttagtatgacttaacaacatttgatctatttggttgcagaatatgagaagataaaatcttctggatcagttttgattgttggtggaggtccatctggtgtggagcttgctgcggaaatcgcggttgatttcccggagaagaagattactctggtgcataaaggaccaagattgcttgagtttgttggacaaaaagctgctgatagagcatctgatcggttagaatcaaagaaagtggaaattatatggaaccaatccggggattggagttcagcttcggatggaaacaaaatatacccggacttcaggaggagaaactataccacgcagacattcaacttcctcctgtgttgggaaacctttgtcttctcaatggctcaatggaactgttctgaaagatagcttggatggtaaaggaagagtcatggtcgatgagtacttgcggattagaggtcgaagcaatgtattcgctgttggagatatcactaatatccctgtaagtacatgatatcatcgaaatatccatcttttaagaaagtttcttggttagtctcttgttttgattatatgattgctaatgacaggagatgaaacaaggatatatagcagagactcatgctaatgtggttgtgaagaacataaaggtaatgatgtcaggtgggaaaaagaagaagatgtcgacttacaagcccggtccagagttggccattgtatctttaggaagaaaggactcggtggctcagtttccgtttgtaacagttgttggttgcctccctggtttgatcaagtctaaggatctgtttgtggggaagactaggaaggcaagaggactaaatcctaaacttgtataagtttgattcctatttgtgttttcaggttacatcttgtgtgcagatgtaatcatgttgtttgtgtttgtgtttgtttttgtgttgatttcatctctttcagcgtggctgattttgcttatgttggtatctaatgtataaataatggaattatttgagtcgactaaaccggaa

SEQ ID NO: 28180 - DNA, 1543 bp, Arabidopsis thaliana landsberg
aagatgatcaagaaatatggttctgtcaatctgcacgagtgataccaaaaaaaaaagaaaagaaaaagcaaagttttgcagtaagattttgacttgaagttaattaaaaaaaattaaataatgaactctaatgttacttgtttctttattttgtaataagaatctaattgggttaaataatgaactctaatgttatctttttcattattttgtaataagagtctaattgggatgttgatcttactgccaaggtccgagaggcgttccacaaagaggaggcaaaccactactccccatccatgatcaacgagtggagcagttatgggtcaaatgaaataagctaaatggcgcaaacgaagatattttaaaatggatatttccgatgcattaaataatgcgggttccgatgagttgtaaaagaaatcggaaaactgattattgtaacatattttttttgtatcaaattgtaatgctttatgattcgatctacacaacataaaacatgataactaattctgaccaaacacatatataataatgtaggttacctcttcacgttgttatagtttaaacaaaacaataacgtagattgagtatctctacacgttgtcattcctgaagagtgtcgttgactttttagttttttgttcttttcctcatattttccaattttcgaatccgatcaaacaacttgtgaaaacttttctttccaaatttgtttccatggcgcagcagagccaacgtccaatctcaaaccgtcacatctctctcctcaaccgtaacggtctcatcctccttctccttctagctctctttgttatcctcggtgtattcttacctttgacaaaatcttccttgttcatgtttccaaacacaacatcttcttctctttctccttcttcttctttatcggtctccgactggcgcgactattcccttgctcaagccgttaagtttgttgctaagaacgagactgtgatcgtctgtgctgttagctaccctttcttgccttttcttaacaactggttgattagcatttctagacagaaacatcaagaaaaagttcttgtgatcgctgaagactatgctactttgtacaaagtcaacgaaaagtggcctggtcatgctgttctcattcctccggcgttggatcctcaatccgcacacaaatttggttcccaggtacagagagagttttcaccttttcgtatccgaagtctgaccctagcttgaaataatatccttaactttaaattcttaaaatctagcttagaaactcgggtttttatgtacatgtgtttttgataatttagatcaaatacttagttttctactttacatagatctttgatctttattagctagatttaacttacatttaagaatattattatatcgagctaaggacacacgtgggatataccgattgctcgggtcataaattgtaaaatgattctgcatcccctgttttatggtatagtcgcttatgggatatgtttgaagttataccacaaagacgctatccatgcatagaccaaactat

SEQ ID NO: 28181 - DNA, 1284 bp, Arabidopsis thaliana landsberg
agagttgcagtttacgcaactgtaaagagagtattgcttgcttcatctcctagtgtctcaggttccaacgtttctgcgattggagtggtttaccgtgatcagctgggacgtttccatcacgcattgatacgggacagaggagaggtgatactgtctgctggtgcactcggtagcccacagttgctttttcttagtgggattggtccaaggagttatctttcaacttgggggatccctgtggctcttgaccagcctcatgtgggggattttgtgtatgataacccgaggaatggtatctccattgttcctccggttccaatggagaactcactgatacaagtcgtgggtgttactgaggatggggcttttctggaggctgcttcgaatgtgattccgtttgcatcgcctttacattctgtgttcatcagagctccagcttctcctttgtacgtccctgtgacaactataatggaaaagatcctaggtccagtgtctattggtttactaaggttggcgtcaacggatgtgaggattaacccagttgttagattcaactacttcagtgatccacaggatctagagagatgtgtcaatgggactaggaagattggagaaatactcaggagccgagctatgcaggactttatgataagggaatggtttgggaaccgtaggttcaggtttgttggagctccattgcctgtggaccaatcaaatgatcttgtgatggcagatttctgcagacgaactgtgagcacaatctggcactaccatggaggcgctgttgtaggaaaagtagtggactctgatctcaaagtcattggtgttaattctcttagactcgtggatggatcaaccttcaatatctctccagggactaatcctcaggctaccttgatgatgcttggaaggtaagaagaaaccatcaaagtgtatactcttcgaaactgtatcagtcctttttgaccagacttaaaaacaaatttcattggctttaattgcaggtacatggggctgaagatgctgagagagagaggatgagatagaaatgatttccgcaagatgggctctttcgcattttctggattagtttgctgattctttttctgttatacgttcacctgtagctctctatcagatggttctacagttagtttgttcattttttctttctatcattggactcctcggttaattcatgtaataacggagtacaggagttcgtctatagttcatgtaaaaaaacaggattgagatataatgataaatgcctgatcttacttt

SEQ ID NO: 28182 - DNA, 1997 bp, Arabidopsis thaliana landsberg
  unsure (1)..(1997): unsure at all n locations
ggttgaataaaattggcttaggggtgttattaaaaacgctttgtatcctgttctgtttcttgcctatttgaagtatggagtcccggctttaggtagcggtttaccgagaggtgcatcgatcttggtgctgactattttgttgacgtatctgaactacaggggactaactatagttggttgggttgctgtgcttatgggggttttctcgatccttccatttactgtgatgggtttgatttcgattccgaagctaaagccttcgaggtggcttgtgatggacttagggaatgtgaactggaatttgtatcttaacacgcttttctggaatctaaactattgggactcgatcagtacactagctggtgaagttgaaaaccccaaccatacacttccaaaggctttgttttatggtgtgatcttagttgcttgttcttacatcttccctcttttggctggaatcggggcaatcccgctagagcgtgagaaatggacagatgggtatttttctgatgtggccaaagctcttggtggagcgtggttgagatggtgggttcaagcggctgcagctacatcaaacatgggaatgtttatagccgagatgagtagtgactcttttcagcttctcggaatggctgagcgcggtatgcttcccgaattctttgccaaaaggtcacgttacgggacacctttactagggattctgttttcagaatcaggtgttgttctcttgtcttggctaagctttcaagagattgtagctgcagagaatctgttatactgttttggaatggttttggaatttattacgtttgtgaggttaagnnnnnnnnnnnnnnnnnnntcaagaccgttcaagatacctgtaggggttttgggatcagtcctcatgtgcattcctccaacagtactgatcggtgtcatcatggcatttactaacctgaaagttgcgctggtgagccttgcagctatagtgattgggcttgtgttgcaaccttgtcttaagcaagtggagaaaaagggatggctcaagttctcaacaagttctcacctaccaaacctgatggagtaaagaccaccgaagatggtgatgcttttggttttacttttgatcttacaggtaatgatcattgcttctggattttggatcagaacttaaaagtttattctatgccttactagatgaagacttttcttttcaatggattttggatttctttgatttttcattatacagtaacttacaccgcatgggagacatttctgatcatagaaaaaggacaaaattacttgctatatttcgccatcttacacaatcctcttagagttttagtcgattcattgacaacaagggatagtctacgtacaagaaagaaaaggaaacaacaacaacaaaacaagaagaagaaacagtgaacacacaagcttatgttagtatgttacagatagtatatataatttttttcgtctatccaaaattctcctaattaataacactaatgtttatgacttatgagtctatcacttaacactaattacgtttttaaccctttgtaaccctaattggctcctgcttcatgttgtatataactgctctcagaaacctaagtcgtcactccctctcccttggttctttcttcctcttgaaagctagaaagaagaaaatggaagaagctcttagcgaagctcttagcgaagctcttagcagctttgacttcgatgaacttgtagcttcgcttgctgatgccatcgcagcaacatcgactcccaagcctttggtggaattttcactacatgctttgatggctgaattgtttaagagaactaaaaccttacccaaagctgaagtcaccaggacattcttcagagctgtttccattggcttgctgagaggtaacattaggaaagatcaactggagagcacctgtgatgctggtaaagcaattatcaaaaaagaagctgcaattctagggattgaaatcagagacaagggtcaaaga

SEQ ID NO: 28183 - DNA, 2521 bp, Arabidopsis thaliana landsberg
cagatctagtgggaagtatacgatttaggcgaaacagattgatttgattttataatactgaaagagacacacaggggtgggcaaaataaggagtcgtctctgctgaaaattcaaagagaattaataatgagatcggaaatctattgggtcccaatcgcaactcaaaagttaggaagacttttgataagattctgtccttttgatgtgattgccaagatatagcattctactttgtgtggctccgagacatgtactacttcgatactttctaccctatctatatccattcacacattacaaatttgattggtaactataattattcttttttgtatgtaacaaagttgtggtaaacagagatagtacggagttgttgatatctcactaaacaaaattttgtacctctagttttgtaccgccactattttgtgacggcaagaatacgacaattgtattttaatttttagttttaattttcaaaagtgtataaaactggaagtgaatatattgtatcataactattaaactatacttttttaatacattaaaaaaaaagtttattttatcgtaccacaatttttattcatactccatatatctcttaccctatcgtttagtgcctctaattgcaccatcatcgcttatccccaaaagaagattaacgtttcatgtcaccaatttgatccgacaagatttaatcttaaagtagcatctttcacctcaagagcatgtttgatggaactatatacatatatatattgaaaatgtaaagttggtccgagaacgacaagcacttcagacaatgaaaatgtttaatggaatggaagaaattcgttttggtcgatgcagaaccaagcccggcccgcatggtaatgtctcgttcactatttgctttgacgaaaaaagttatgaatggtccaaacgaaatgattgctgtaacctgtaaatttggtaatgcgtaatcattcaatttatggtttgtgaacaaacaatgtatacatatagtattggttttaaatttcatgtactaataaggaaaagaaggagagaaacgatgaaaatataaaaagaggctttttagggtttaagcctttaagagaataaagggacaaataacaataaggaagtgtcgttttctgtgtggaaggagaataatgaatagagtgtgggcattgtgtattgtgtcattctcctaattccaaattcattgcttcaaaactactcaagaatcatatttgcaagtagtggtgtttggctctacaacgttctctctttaccatgccatggaattattccttgaaacagaaaaaaagagaacaatcatcaatattccttttgttaagaccttgatcattgggtctacgaccgactctgactgaggtgtcaccaatcagctaaagatgaaatttcgataatcgtttttttaacgcttattaaaacccaagagagattcatgcatgttataatccttattcatataagttttcaatgtaatatgttttacacgtcactgaatttggtcgaagtttgtttatgaactttgttgctcagctaacatagactgtgtttttccccccttacaatatctacccaatcaatgttttcttatactagtcaggacgttttttaaccaaaacgattgaactttcagacatatcactctcttttgtttttgtgcagatagatatatcactctctaatccatattagttctgttttactttatattattttatttaagaacaatttagttttttattcatctttattccatgtcctaagaatcgaagtgaatagttaacagtttgttttaatacaataatattagttgccgtcgtttcttctttaaatcactgttttctttggactttttacggacaaccaatagaaagtgcaaagaagcatattcaaaagttcaaaatccattcggacatgtccacgtgtgatctgccactctgtaaaaattccacgttagcatgacggacacgtggatatagttatgttctgcgcacaccacgagctaaccacacctaggcagcacgacctccgtcagaatactaacggccgttctcttccactcgcgtagttctcaagcaaaacactcacggcgttggaaacgtggaacgttgcgtcctagtccagtgtcaaaaaaacgggaccacatgagacaagctttgatctggacagagttctgagtgtgtcagaccttcaacggcacgtgcgtctcacacgcgtggaaaatataggaaagcaaatccatttggaacctcccaatgtgtcttgcagatttcatcttcctttttctttttcctttttaccatactcctcttaataacattggtcaaagatcagtatataattagttgtaattatatgaaaaagatattttaacatgggtttgcgtgatagagcgacacgtggataaactaacgaataggagaaaaggggtaataatgtaattttggaacagcattcactttctgccagtagttccactgtcttgggctctggatatataaac

SEQ ID NO: 28184 - DNA, 1114 bp, Arabidopsis thaliana landsberg
aattataagacgtaaacaaaataaaattctgttcgcgtttacaatttcaaaatgattttgacaaaaaaaaaaattaactagtaaacgcattatattttttgcgtttaaaacaatcagactttcaatttatacgtaacctgtggaccggagtttacattatagctttgtgaacttgtttaagatggtcctgatggtagcttatcctaaatgtgtccttgagaattgtttcccgcgattttgtaccatcatcgtagtgatctattcctacaaaaataagttagcaaataatacttttagaaaaagaagaattattcaatttaaaaattatctaaagagacgtaaaaaatcatttgctttttttttttaccaaaaaataaaataaaatcatttgctgttgatactataaaaaaggtacagtatattatttcttgcttaccattctcttttacatagacgatagggttattgtatttatctttgatatagttaagaactcttcgcaaaccttctggatgcgagtgaattttgcctcgatcatcctgtaaggaaaaataaaatttcttgatatagtactgaataatttagtcaaaacatttcaaaattttggggataaaaatgattaaaatgttacatactcctggtccagtttcgtggttactgcgatttattactgctcacaagtgatgtataaaaaaagtagtttagtttacgagtttcacttgaatttattcatacaaaaaaatatataagaaaatggattttagcttggaaccttacatttcttctcaaaatggtgatcagttctgaatcgaggtcgagtaggatcgatatgagggagatgagcggtgaagtgtatgctataatagtttactccaatgaaatctgatgaatttattaacatctttgattgttctggtgtgaaagcaggtaatctatttccgacatgctttttcattgtttcaggataatctccgtaaatcacaggatttaaatgcctaacacaaaaacattcagaatattatgtaaataatttttatgatcccaaaacatatataattttcactttaattataaaagataacgtaccactctagttctaagggaaggcctcgtt

SEQ ID NO: 28185 - DNA, 1551 bp, Arabidopsis thaliana landsberg
ctattcacagattatggacctatatcacggtgagcatctgtaacgctgtttaacagaaacctaaagcagttgggaaatcacccttgtgcatcctcatcatacagatttctcaaccgattagcgtttgaccatgtcaccaacatttcactctacatattacactagcacccaaaaacatggaagcatttaaaatatattaccgtaataaaaaatttgcgtgcttctactatctcatcattgcttttacgttcttttaccatgagggccgagttagtatcctctagatcttgtaactcagaacacttttcctctagctcttccttcatcttcttcattttcttcttaatgccctcgtcatcttcatcctcatgcttcatgactttcagctttcctttcagctcctgaatctccatttgaagtttctgcttgctgtctaactccttctcaagctgaaggatcttgttcaacgtctcctcttttttcctctggagttcagaaagaagaatgttggaatctttaaacgcaaacaagacatctttttttggaactttttttttttttaaactgtgtggaatttgacacgcacagataaatctagtttgaccatttactgaaaacagaccttgtgttcatccacaagtcttaggacacgatcatctgtctttttatgctccagggaagccaactggagggagctgttcatgacatcgctctgccataacaaaggaaaacaaaaagatcatcagtacactggaaacatcaacgcataagtatactataatgacaaaatattacctttctcttgtcttcatcaagcttttgcctctccagttcagttagtgcttcatgtttttccaattgtttggcccgagactccaagtcccgcatcttacgatccagttcattgcttagcttctctttatcatataggattctctggatatggcgaagtgacatctgctgcatcttctttgtttctgaggagagaaaagtataaaaaatagtcagataccctaaatgctatatgagtcggaaacatatcagtgtgtgagtaaataccttcagcaaaagcttggtgcaagttttttttctcatctaggaccctttgcagtgacattgccgtcctgttgtaactgtgttgggccttgttcagatcttcgtttgtcatatcaatcatattcgaaagtacgtccagaagagtgtttctatcctgcacattgttttgcaaaatatctgaaactgttcttagctgtccctccttggagaggtactcacctattggaccttgagattcaaagtcgtctgcacgtgcacaccaaccataagcctttgactctgaatctccgctcctctcagtccagtcctttttgctggacccttgggtctcaaattccttttcaagctctgtggcagcagcaaacccactccagtcactgtcaaacttagcaataaccccaacaatcgaatcttgttcgacccaaaagcattcactttaacaggcttgaatttggaaaggggctgcagcccatttactgaatcaagtagaagctc

SEQ ID NO: 28186 - DNA, 3543 bp, Arabidopsis thaliana landsberg
  unsure (1)..(3543): unsure at all n locations
aatctgctaattttggatcagaggggaaaatattgaccaagaagagaagggtcatttaacaggtttgtaaaaagcttatatatcctcatgtgtggatgcaccaaatatcacattctcaaatttttaagttgtgcatactttcaagcgcccattcccaactcctaacctttgcttcaaaaatagaagccacctgagcataagaacgacgactatgaagcaaaacatttcccatagcatctctgaccaccgaagaagcacctgataaacattgtttctttgaccatgagaaaccaatgttacattttacttcagacaataaagggggagaccagtgattctgatgttgtattggagaaggagactctgtaatattcagtgactgagcagcaaaccatgctgcagaatcctcataggcctttctaactagcaagtcttgagggtaaagagacccatcaaagaacatcttgttccgattcttccaaagaagccaaacaatccatggaaaaactctcctaacttcagatagaagatgctcattccgtcctaaagagaaaatatacctaaaatttcccacaattgagtctccaaaaccaccagaaggagtaggaaaattagcaacagcccagacctttcttgcatagggacataaaaataaaagatgattaactgtctcctcctctgcatcacataacagacaaccatcataattnttaatgcctcttgttagtagcctagctgacactgcaatagcttctttaatactcttccacttaaaaacctgaattttaggtgctgttttaactttccaacactctgctaaaacggaaaataagaaaggagtattaactggttccacgaacttctccttattctccatattaaaaatcagatcataacaagatgtagcaaagtatatcccttgatcgattcccagcccaacagtaagaatccttctttgctaacaacggtttagtggaaaggatacgaaagacatcatcttggtggaaaagagatcgaagaagactgatgttccacaacccagatgaaggatcaattaagtcagacgcacgaagacagatgttcataagtgagtgaagaccaataggtcttcttaccatatcatcaaagatccatttgtcaatccaaccaaagtgtcttgtccatcaccaataacccgtttgagacctttaagaagcagatcctttccaaagagaatacttcgccaaccataagaaggtcgagaacctaatttactttgcaaaaaggatgttttgttgtaatatctggttctgaaaaaccttgagaagagacaatgaggattatataacaatctccaagcctgcttagcgagaagtgcttgattgaacaattctaaatccctaaaaccaaaaccaccattagacttttgtagtgtcatcttttcatgactaatccaatgaatcttgtgttgagattgagaattactccaccaatactccatcatcgcactcgtcagcttcttaatagtgatcttagggagtttaaaacatgacatagcatatacaggtaatgccatggccacagatttcagaagaacttcctttccaccctgcgataaagtcttagcataccaaccagttagcttcgattgtagtctgtcctttataaatccaagaagttgttgttttgatccactaagacattcaggaagtcccaaatatttccctgtaccaccttccagctgaatgtttgttctatttttaatccaatccttcaaatcttctgtgactttagacccaaatgtaatcgtagattttgccaaattaatctgttgaccagacatcaattcataagtatgaaggcaatgaagaacctcctcacactgaatctttgatgcttgacaaagaaacaaactatcatctacaaagagtaaatgattgatagatggaccagataagtgatattggatgccagtaatagaaccgtttatctcagcttggttaaacagatgaataagagcttcagtggaaattacaaaaagaaagggagagagaggatctccctgtcttatgcctctttcaggtttgataaatccataaggatgaccattgatgagaactgagaaagtcaatgaagttacacaacccattatccaagaaatccagagtggagcaaaacccataacctgtaaaatgccttcaaggaaaggccactctaaccgatcataagccttcgacatatccgtcttgagtaacactgaagattttgagatttctggatgagaatgtaaactatgaacaacctcatgagcaatcattatgttatctgtaattatcctttatgaaacaaaggcagcctgagttggagaaatgatgtttggcaaatgtctcttcaatcggttgatcagaattttggaaatgatcttatacaacaccgagcatagactgataggtctcaaatcagtcattctgtttggagatggaatcttgggaataaggcacaaattcgtatgattccaagtcgcagggagaataccagtagaaaaaaaaccttgaacttcagagatgatttgatgtttgacaaggtcccccaactcttggaagaaaaaccctgtgagacaatcagaatcctggagcattgtctccactaataaagaaaggcaggtttttggtatttcagttgtagtgcaaagttgacatagatctgcattcatagtcgaggaaactcgagggtgaaagtgacctaatagattcatcagatcagaggtaccgaggatttaaataggtcagtaaagaactgaacagcaacttcccctttttctttctcagaaaactgatcaactccactattatcaatgagactatgaagagtgtttgctgacctagtagagtttacacaagcatggaaaacccctgtatttttatctccatcatgaagccatttctctgtactcctttgtctccaataaatctcttcttccctaaaagcaatggcaagctcactcttaagatgacgaattctggaaaaacagggagaaggagattcatcctgtacttgcaaagcttttcttatactgcgaatacgacgtgctgaattagaccagaaatgagttttccaatctagaatcgcttgacgacaatgttcagctctaatattgaaggaagaggatgaaataggagaatcatgattccaagcctttgttaacatatgcaagaaggatggatcctcagcccaacgtttatcaaatctgaattgttctttgaaaaaacttttgtcttgagtaaattcaaccagaaccggctgatcatctgagcctagcttctccaaaaaccattgatgagcagttggaaacatagaaaaccaggctggattaccaaaacagcgatcaagcttacactgtatccattgattgtttctggtcccaccccacgtgaaaccattaccagagctcccaacttcatacatatcacaagttgccaaaagattcctaaaagggagaaaagagctttctacacgaagaggaccaccacgtttttcactatttgacgaaacttgaaagcacaa

SEQ ID NO: 28187 - DNA, 4322 bp, Arabidopsis thaliana landsberg
  unsure (1)..(4322): unsure at all n locations
acacttacaatggattgggtacccgagcctaagagcatgtatgggggatactcatatagtatcataagtattttttagtattatttataatatttgtttattatcagagattttttatgatactcctactaaatatgtttgataagtgtgtattttacatgttttgagcatccatttgtcatcactttaacatcatagcattcctgttttatacaatctcatcatttgtcatcactttacatgtttaggatagatttgcatgcatgttgcatatttgcgttgatttcaggtgatttggagctgttgacgagctatctggaagaagcggacctgatcatgacaaaaccactcgacccagaggtcgagtaggagcttcaagatctcaagagaccactcgacccccaggtcgagtagaagacatcacaacttcacctgaccactcgaccactcgacccccaggtcgagtagaagacatcacaacttcacctcaccactcgaccacgaggtcgagcgtcttcatctccatcacctgaccatcactcgatcacatcactcgaccacgaggtcgagtgtcttcaccttcattgccagaccactacacgacctcatcactctacctggaagtcgagtatcaccatcaccaccactcgactgcatagttactacctggcaacagactgtgcagtcgagtatcgctggtatactttctatctggtactcgacctatcactcaaataccatagttattgaaaataaaacttcaagttcttcatggatggttccatgttcatgtaggtacttacaaataccatagttattgtgtttatgcctgggattttactttggtggagatagattctatagaagaggggagaatagtattcaatatttttgagatatgctataattttggttaatttacaaatcaaaatttataattatattcagggagattttacaagattatataaagaccttacaagattttgaaaaactaatcatagaaattatacaaaactctttagtaatcatttaaaatctttgatttatctactttctatattttttaaaagtcattaaaagtctttcaaaatcacaaaccaataacaccccctaattgtcgaattttttgtcaaaagtcaaattgaagagagatgttagaaataaattagaaaacttggggttttgttcaaaaacaaaggggttttagtaataaaactcttcaactaaagataaattgcaagaaaacctctcgattatatatttagtggaaaaaccctcaacttcaaatatgttaatgaaaattctcttgtctacagtgtcgttaaaaatggacgccctatagttcaaattaaaacgtaatattttcagaatctctcttaatcaacttttaacaccacataaacttgagagaatatcattatgataaattagggttcatgaatttatagttttcactttgtgaaatttagagctaatgtttgaggatttataatcggatagaagaacatattgttgactattcgtgttgtttaagtgtatatatgtctgttttctgtgttcctcaaatactttcactctgttctcttgtttgaatgtttgtggattaggattatttagagcttgcacctgcacaaattgcaacaaactgttagtctcactctctctcatttctgagatagtgtccttattccttatggatagacttgaaagctctttttatggcatttatcttcatatatacaagtaggaaagtgataaaggtattttaggcccagacgtataaataaaactagggtgttttgtgagagaaattaaagaatttgaaaggctttgtcacacctttaagtaaagggacatatagatcaagaagagaagctgaatgatagaaaaaaacaggaggaaggaaacaagcttgactatgagaaaaagctgtaacaatctgttgtaaaataatttgtctaatttcttggcaaatggctcttcaggccttaaaagccagcatggtttaagcattctctaagttccgccatttgcaggtcaggttatgtccttactgaggagtgttcattcatatggagtatctgatttaaatttgctctagctatccatggatgggaatccgtagaataggtatggttattttgtgttagctcttcccataaagtgagtctttcatttggaagatcggaggcatatattgctgtgtgtagaaaaactttaatcccctagagatttgaatttgcatattgatagatttacttgattggtgcagaactaccactgatcctaccatccttggtttgagatatattgtttcagccaaggcaaactttagataaaataaggttcaggttagagactaaacacagatatgtgataatcttataagagaatctcatatatagtttgttacgagcaccaatctattttgccaccgaaactggaaaaaacttctgacgtgccactagttattcagagtgccacccaaggatgtgtaattacccttagctccttaatgaataattgtggagaagaaatgatttagtaaaaaaagaaattatttagtaaaaaagaaaaccgatgtcttcgcgggactcttttctccgatacgtgattttctccgatttcgtcgtcggcgacttgagcttcgatttcgccggcgatttgnnnnnnnnnnnnnnnnnnnnnnnnnnnnnnnnnnnnnccgtagcttccaaggcgataatctgctcccaaagttagcttcctcctcaccgacaaaagtaaatccgatatttttttgatttgtagattaatgtgaatttcttggttgagttagttgttaataacataaattttttgtattgttcgttatgggctgttgtatcgttttgaatcggagagttcaatcgaaattattgatttgagaaatctagaattgacgaactggaacaaatggtaaaactgagacataatagtacagggggtacaaatgttttattgagataaaatatgacaattggtataaatggtatcaatgagatataatataggtacaattatgtctcaatctgaataattacgtaattatgttttaataatttatttgtaattacatgaggcgatgaagaacacgaacacattcatacaatttgactatgggtactattcagaaaaccatgattgattttcaaacaattctttaaggggtgtgttgttgaagacgtcactgttagtagaaaacatatgcaagaagattggaatagatgaaacctcaaggaaattgaacttgagttacattctatgcacatctaagagagagatatctattgtagatgatgatgactttttagggtatctaatggtagtgaatgctaagggaataagaccagctttgcatgtggaggtagtaaataaagaatgtacttattgagcatgtggatagccagatggatagggaaaaagataatggtgtggttggtagaattgagtattatgatctttcatgtgctgctagtgaaggaagtgagagtagtgagaaaattcagagtgttacggaatgggaagatggaacggggattgaactacaccaagaattgttttctaaggagacggtgcaagatttggtttacagagctgcaaataagtattgttttgcgaccgcaactataaaattggatctaaagcgactcatgnnnnnnnnnnnnnnnnnnnnnnnnnnnnnnnnnnnntggtatttacgatgtgcaaaagtaacgagctcaaattgtttcagtgttagagttcacaggaagatgcatacaatcaagcggtctgataagaattcaagcgattgttaacatatcggcacaccacggttagccgcgtctcttttgcatgagaattatccaggtgagtttcaaactccaccacctaaaagcataatgagtattgttcggggaagagtgggtttgcattgttcgtatgctaccgcatggagaggaaaaaaacaacacattagtgacgtgcggggtagtcctgaaaaaaactacaccgacttgtactcttatttatacatgttaaaggaggtgaatctcgggacaatatcatatgtggaagtggatgcacaacaaaagtttaagtacgtattcgttgctttgggtgcttccattgaaaggtttaaagttatgaggaaagttgttattgtggatgccacttttcttaagaccgtatacgacggtatattagttttcgcaatagcccaagatcctaatcatgacaattatatcattgcgtttgcagtaattgatagggagaacgatgctagttggtcgttgtttttcaacaagctcaaatccgtt

SEQ ID NO: 28188 - DNA, 1359 bp, Arabidopsis thaliana landsberg
  unsure (1)..(1359): unsure at all n locations
tcgaattttggatggacagtgaaatggcacgtctcatgctgaagctaaaaatctatgagaagataagatattttactaacagccaatgaaagatgcaactcttgttccaaacacaaatcttcgaaaaaaatcttttacgtatttaacgttttcaagaggttaagaaactaaatcaggaacgatacaattcctaccaaaaagaaaacacagaatgatcatacaaacgcgtccttcaaaacaagtttcaaaaaaggatttatttggagaagataactgaagttgttgacttgacttgaaccaacaatgaaaggagaataacttaagaaagaatcactttgtcaagtttctatagagaaacattgttttgtttcttgattccttgtcccttcttgatcattctagaaagaacatcagcttgctttgtgttcccttcttggttcaagcttttgatcagttcatcagagctcttccaatctgttgaacttcctttctccatgatcttacaaagaactgagtacgcattcagagtcttcccagctcctaaaagcgcatccaacactttgtcgtagctcgaaaactctaagctgagatctctctccaacccgaaatctaacagcttcaatgctgcaatcgtcttccctttctcgcttaagacagataagaggctgtccagatcagctgtgtgtccgttttggttcagaagatctatacgccccagggcttcttctacgtgtcctctcattaagagggcttccaagatcttggcaatcaaatccatgttgtcttcgataccaacgtttttatctatcatgatcatcatcacacggcttgctgtctgcaccctaccatcctcgaacaaactctcaatcactgacctgaaaagcgatgagtctgggacatgcccgtcttcgaccatgctgtccagtgcggttttcgcgtctccaggctcacctttgctcatgtagctcttgatgagcagctcatatgcgtttgattctctagggacacctctcctcgacattatcttcagaatctcgtaactagagtctgggtttccttcctttgcatgaccacngattagattgtttaaggcatcttgggcttggacacctcttttcatcagctgcctgaaaagcacttctgtttttgccgcttggccattgttgcacaaatactcgattattgggttgggggcgcttggctccattttcagaggatcctgatgcctcaatatgatttctttctcaataagcgtatctaaaagcttgatagcacgactgtttgccctagccttgcattggttctcaatcacaaaccccaataatgcaccgtctctgctggaacattcagtgcagccat

SEQ ID NO: 28189 - DNA, 983 bp, Arabidopsis thaliana landsberg
tcgagctcgtaccccgcccggcctctgacgttcccaccctacttacaacagcagtacaaacacttagtagatgcagagcaaaatataaagtgattaaccaataaaattaatgattcgacaataacaacgaagaagcttttaccatgtgttctccagctgatggaattctcttggtcatgcgacgcccagccttgttgtccttttcaggtggtttgaactgtgcatcctgtacaagcggtggcagtgcatcatcaggctgatcaggaactggtttaatgaactccgcataagccttaccgaagaccttaactttgtaccattttccaactagagttggaatgtggacgtttgccttcgctgatgcaacaagagcatggcaacaaggtagttgtagcttctcaaactgcctgcaactacaagccttcttctcaagatccacataaaatgatcttccatcaaggtcattgacttgaaatgtccaggctgatacaggtaggacatccaaaccagcagatgacgcatggtgtcgcaaatcagtttgtgtgcatttggtgttataccatcgtcaagctttccagctttggctcggcagacatagaatcacttcattagtttcgttctaattgcctcaaccattgtaactattgggagttcaatgatttttgccaatgcagaatttagtgactccgcaatgttgctactcattaaattataccgtttagcatcacaataagcctgtgtccagtgaggttttggtatggcatccaaatatgcagcacaaccagggctacgcctctctatctctttgtataaaccaccgtaatttgtttcattgaacgctcgtgcagccttactgactaggttagatacccctttctttggaaacttcagtctgacattcctctctatgtgaacagcacaggctccatggaaagcttctagatatactttgccccattgcaacataatattgagccgaagtc

SEQ ID NO: 28190 - DNA, 1589 bp, Arabidopsis thaliana landsberg
  unsure (1)..(1589): unsure at all n locations
gtataaccttgtcccagattctcttatgtgttgttcggacgataaaatccatcgtctttgacaacgacgaaacatgagtttttacactccgtagcatctttgtccgaattgtacaaaacgtacggtgtctcgtgcatcccgaaatgtgcttctctgtaaaacgttcctatgcaagttgttggctgccacggtctagatccttgcgccttctcatcaacagcattgtcgccggtagtggttgggatnnnnnnnnnnnnnnnnnnnnnnnnnnntacgagtttggagagccaaggggttcggtggcacgtgacgaagacaggaacatcaccacgtctcttcagctcgttggacacgagaagagtggcggcacgtgtggttgcgaacgtagaaaataacatcatagtcatgatcgagaccattataagagtgtccatgattttgatttttgtgttgaaagtatattgtcgaatggaaatatatcttcgatttctcaagttaggagtatcaatattttcattacgtttttttttgttgtacgtttattgacagatatgattaatagcaaattcagttacgattagagattgtcttggtctactacagtagtagcgagttcagtatcggcctatcaaaagcccgattcaggcccaaaagcaaaacacttatttttcttatgtaactgttttttatcttaacttggaaacatattttgcaaacattacatcagccgcaccttcacggtttattttaatttcatatcatttctttcaagtagcactaagtcaaattcagaagttccattctttttataggtctttgattggtctacgtatgtttgacctcaaaaaaaatgctttccttagaactttctatgtttagtaaacttttcatgtgtaactaaataaacaaaacacaaatgttacaaacgacacagaaatcaatgcctctccccctactttttctcctcatctaataattccatcaaaccaaggaaaaaaaaccaaaacaaaacgatctaacaggaataaacaagatagaattataagatctccgacgatccttagcttcaatcaattattggtggcggagaaagaataaataataatactatgaaaagtaacactcctacggaggattcaacaaaatggatgttagagagtgtagagatcgattcgatgggtgaaagctcctcaaaagaacccgaaattaacctcaacaagaacgaaggtggtctgaagaagaacgcgtcaagaaatctcggcgtgggatcgataatccgaacattgagcgtttcaaactggagaaagagcgggaatctaggttctccgagcacaaggaagagtggaaacctggggcctccgaccaatgccgtgcccaagaagacaggtccacaaagagtggagaggacaacatctagcgcggctaggggacttcagagcttacggttccttgatcggacagtcaccggacgagaacgagatgcatggagatcgattgagaaccggttcaatcagttctctgttgatggcaagttgcctaaagagaaattcggcgtctcgattggtaactacnaaaacactaatatttat

SEQ ID NO: 28191 - DNA, 835 bp, Arabidopsis thaliana landsberg
ttcctttattcccactcacgtctccttcttctagaaccctactccggcgccgccgacaccgacggttgccggagggtgtggctcaagcttcctatttttccagaaacaagcttccggcgctagcttcgacgctgacttcctcggttccgatttgcaacgtggcagcactggtggctgtaccttattagctccggctaccctctgttccccaaccgccgcagctgccgttattatcggtggagctgctgggtatgaacacgatgaccgtggcggctgtaggtgaagtggtggtctatcgattgaccgccggcgagaggatgcgttggaatcaacggctgtgacgattcgcttcttgggttgatgatgatgatgattgtctccgacggcttctggtggtatcttcttcgccggaggtcttcctggtaaacatctgacgaaatctgtactgcaaacccaagtctccttagagacttccattgagagctttggttcacacatcataagcagcaaacaatccggtaacaccttatacggcgtcgccgtcgtcttctctttctccgttgtttcctcttgtagacttcttctcatcaccacttccggactcgggtcgggttcccggtttccttgttcggatctttcctcattttgaggtatacaatcaggaacaacctctttgctttcttctacctcctccgtctcagccaccgccacaaccgctaattcttccatctcagcaagtttctcctcttcttctatagcgtttctgatttcgtcttcaatttttttcatgatcgtagcttctatttcttcctcaaacgaatccagaattttcgaa

SEQ ID NO: 28192 - DNA, 2182 bp, Arabidopsis thaliana landsberg
  unsure (1)..(2182): unsure at all n locations
aatttggctcaggcgagaaagagaaggggatcgctgaagagactgagcaatttggtaactcgacattgggatttgctgtgaagtcatgtgttgttgctgcagaatctgttgctgttgcggcgataattgtggaatcggagatgaagagatttgctgcataatctgttgttgttgttgaggcaagtgctgagtttgttgaacgagttgctgagtctgtgtttgctgatctaaagatcaagaagggtgagagagaggagaaggcgacgggatctgagctccgattggtgggttagaagaagtagggttgggagagtagatgttaggttgcgaattgttgtgaattacaataccttcggtggtagttacagtcatcgccggagacgcagcggaattaacagaattggaaatcggagctgtcatgagttgttgttgttgagatgatgatgaaggtaaaggagtagaagatgcaggagaaggttccataggattaggagattgtagagatttcggtgacagagacgatgagggaatcggttccgccattagaagaaacccagctgtgaagaagaagaagaagaagaagaagaagaagaagaaggtgtattatttggttgagaggggttttgtcgattttctctcatgaaatcgtgttttatttttttcccagaagtttattgaccgataaaatatggtcttctatttttttttgttttgtttgttgaatcagttctggggaaaaaagaatctgagccgtacacgtcagtagatttagcggaagatgatcgaaaagatacttgtactgaactgtgtttcattattccagactctcgcacaactgctctaacactttttgtaggattatctcatagaccaatgcaatcaatattttacatttttttctcttcaccatttattacatcaaatacgtcaacaaaaagtcaaactgtttcgttactcaggtgatgaaactagtgtgcactttttcacgtnttggtgttcagaattatgtttttaatttattcagcacaatgtttnttctgcctcttgattctgtatgattcaaacctttattgattaactaagtaaactacactaactagatggaaacaacatcctgttgatcatttaattcattcttatttggagatttttccgtctacaaattaaatagaaatctttatttagttataacttgtaacttgtaggagaccttttagttgaataaaaaataagctctctttttaactgaataaaaccttccaaaactcacctataatagggatatgaatccaacactatgaatctataaagagaattaatcatcacacctacagctatacaaatacaagatcttgtggactttaaatcacaaaactataataatttcccacataaacattaataatttattgcatcgagttttggactgaactagagagactgagagagattttacagacattacaaggcaaagagtcccttggagttggcaaacaagtgtttccggctgataagttccgtttttctatgaccggtaaagagaagaccggttaacaaagacggaggaccgctaaatttggtttgcaccatttccctcaatttcatgtacccatctagtgtcatcaactccaaaagctttctacagctctgagattgaaaagttacataatgttatacgagagtaaacacagataatatatatgagcattaagagattatgatcagtttcactatatgagaaagattgtatattacctgaggatttagtacgtccatttggtttatgatttcttcctgccacaaaatgaaatgttttgattaatattttcttagagctacgagcttattgtgtggaattagaaagtatttacctctggtataccgggattttgcattacggtaccaagaacgcgacgaactagtccatcgaagacaactttatttactgatccatttgcgtttatccatggaaatatagccataggttgtgacttcacagaagttgattcctttgtttcaccttcgatactcgttccaaaagtaacagatggagctatggtagatccctcttgcagaccgcttgtttcagccatttcaggaatgataagaatcgtaaccttgtgaacgctgttctcagaaacatgcacatgcatgtcttgtgaagtactgtagtcgctggtga

SEQ ID NO: 28193 - DNA, 1979 bp, Arabidopsis thaliana landsberg
  unsure (1)..(1979): unsure at all n locations
ctacaggactctcctgatgatgatgtacaacaccatcctaatcctgaaaattgatcactttcttttccatgattcgtcaacaaaacaaagaaaacctgaatagttagtatgctgtgagatatccctcacccgagatcgagctcctagattcaaatgatcatggctttcaacatgaagctcaacttgtgcttcctgccataaatgtgcctcttttccgcttaacataataatcccaaacgataaggatattgttacaaaagaatagtataaaaatggtaggtttgcaaatactcctaatatttaagccatttaagttgacctaaacaccacattagacgaccaatataataagtacatatatatttcaaaactcaaaagtgattcttactctttcttttcacagttgtaagagcatcattacatggggaatttaagaggtttcttaggttaattaaagattgaaatttaatgttaaatgatcaataaaccttagagcagttcttagcttagatgcgctcttaggtttagtgcgggagcgacgtgacaacattttattagttgtattggtaaatattaaaggtaaaaaaaattaatcccatgatttttcttcctcctctctctctcacttcggcgacaacgccgagaaaaagcaaaatcagaacgatttgtaatccgtcaatgtttctaagatcaggttgtcgtcacactgttagcgcatcatctcaccaactctggttgtccatggtgtcggcggttcaccaaatcggcgttgtgggctgttttttttgtcaactattttcaccagattttcaaacttcgtattggaaataggatttaattctttagcaatgggtttttgaaggcaagaatgtctctctgttggtatgaattgatgtgattttactttttagaaataagggttcacttctctctgtttcttgcaacatctcttaatagatatatgtttgatccgcctgcagaaaatgcagacatcttggccagaaatttgtgaagctcgctttccttggaacaatgtcagtgttttcgcttttagtgaatattttttgtttggcgtttgctgttttctggtttatcaaatgacacacatcgtattttgggttggccaagacattttggtaacttccgtatctctctttttctcgtcactcaatgcatctagaagtcatttcctctcattatttctccgatcaccgcttttgctatttttgttaactataaaacanaaaaaaattgaagatacgtaacatcgaccacctacaagctctagcaaacaaaaannnnnnnnnnnnnnnnnaacactcaaattttatgtatccaattaaaaatacaaagaaacttaataaaacaacaataatattaattttggagatgttgttggacaaataatgtttgtccaatgaccaaaccttgctgatgagacttcaaaagcttgtttggtcgtacgatttaaggtggatacataagtgttgtaaaattttaaaaatatataacaaatattatttagttataaaattttaaaaatatataacaaatattatttagaaaaaatcttacacatcatcgaactatatctttataattagggatgttattatctacttacaactttgggacaaggcggcatcaactttccgctcacaactaatcacaaaacagggcaaagaaaatgtcatggtggtaagaactattaatacaaaactctttggaggtaacatattcatcattaaaaaaaacaatacacatcatactcacatatagattaataaaatttctgatttattttcataggtaacctatacttgaactcaacaacagccacaaggatatattttgattcaactcttgatgcaatccaaaaatttacaaaagagtaagatttacaaaatattgtcaaaaacaagcacatacgattccattgactaattttaaccaattcttttatgatccatataaatgag

SEQ ID NO: 28194 - DNA, 968 bp, Arabidopsis thaliana landsberg
ggtagtctatcaacctctgaagtgattctgacttctgaggtgattagtaacattagtttaggcctattagtgatctttagttaagctcttagtagagtctagtaattctcttcatacttgaattagcatcatcagctgatgtgggtttagcgttctagacttctagttggctttttacaacattagggttagccactgcatagacttacttgcattttgtgtctcagttatgaacacccatagaggcattagtttatgcaaccgttatattaagttttttttttttttaaatccgtcatattaagttaacaatatatagatatactattcccttgagttcatacgtttataaccgtttcatatcataacaaatttaacgggcacatgataatgattggaataaaattgtcaacaaagtaaaacctataatatctttttcttaaaaaattcagatgaatatgccagaagagatagtaatgcatggagattggaggattactaatgcatgttaagtaacgaaaacacgaaaaaaaaattatagtcatagtatatgacagtagaaactttttaaagtgccgacaaaaagcaatggaggcgtcgttggaatgtctcgaatccatttaaccacgtaactaattaagacacagtatacacttaatgcgttttgccttatttataaatttagtggtttaaaaactattttttttgtcagaaataaaagtataattattaaaaaaaatcgccacacaattggattacacaacttctttaacattttacagaaaaaaaaacacatgttggcttctaaaatccataaatactcttaaacatttgtttaataaagagttctgaaaaatttaggaagtcttcatgcgattttacaaaacttttcacatcagaatttggtggttaggaataatttgtaaaagtatgctattttcttttagaagaaaaacaaaagtagtttt

SEQ ID NO: 28195 - DNA, 863 bp, Arabidopsis thaliana landsberg
  unsure (1)..(863): unsure at all n locations
attatttcactttattgttgcattatgaagaagatcataaatctgcaagtggatcagtaagtgacgattacgtaaacattggcccattcgaaaaggtatattcgtataaagttttcatgcagaaaaaaaaataaaaataaagttttcatgcatgcatatatatgactagtccttaattgatcagtttttctttattaccccaaaacaataagaaacgcctttataataaaagtgtagtatataactataatctttgttgggaagacacgtttaaacaaaaaattttatatactacatatttccagaagcattatagtataatcttgcacatatatttaagataaaaatgtttatttcggaggtgacaaaagaatcacggactaatgttttgaagctaccacatgctaactgcatcatcttcgatgcacatagtaaacttagctatcaaattgcaaccgtgtccatcagtctatgattaatgaactgcagatttgtattatggtgactaatattgctatacannnnnnnnnnnnnnnnnnnnnnnnnnnattgcaaccgtgtctattatagtgatagtaaacctagcagcccggctcaatattttattgggccctgtgctacaaacaaaaataacccttaaatctaaacaaaataactttatgtgacatgtgtttactgtatttttattttaaacttattatcttttattttggtggttgttttttttgtagttttccccttaaaaaaaaaaactgcaaactagaagacttaaaattaagaaaaaaaaatgaggaccctgtgtactagcaactctggcactcccctagagcccggcctgcctagcgatcaatttgaatttatac

SEQ ID NO: 28196 - DNA, 1600 bp, Arabidopsis thaliana landsberg
atgttatcctaatttaaaatatatttgagatgaaattaggataaaatatctttgatcccgtgtgttaattgatgaaatttctgagcagtcttcgagcctcgatatatgactaagtcattgtcgagggaagctttaagtttactaagtactaacagatagttgtgatggctgtttcctcctccacctagttagaggagaagttgttaattttctttctagtggggaaaactaatttggatttggtttttgataatttaatttggatttgggccatttatattaatttatgaggtttatattgggcttgagaccaaagatagagttggcctaaaaatgtgaaggtttcatgctttttggtaagtctgcctcatacctagcattacatttccatcgatgcatattcttgaatatgtgttgtgtaacttgtgttgattgattggtgtacgtagcacttgatctgctgatgaggtcatgacacaccactcaactaaagggctcgagtcgtagtagtgttgtcacatcaaaacggatttgttaaacgtttgacaaatttagtgaacctaaatctgtagtttagtaaaatatttgaagaggaggttttcaagttgcaaatttctgcaaaaacctcatgaggtaaacttattgacaaaagatgaaaacttgtctcaagttgtttggtctcattgatactgtcaacaacttaacccattacagctaatttaacatgagcaaaagcataatgaagcatcattccaaatctttataggcatttaagaaaccaagatcatcagcttatttgtactgattgttgattatagctttggttacgaaatgcgaaacgattccaaccggacagaagagaaggcaaagtgaaaccgaatgcctcgtctcgatctggttctctaacccatcattataaacttgcctgcagagtaaacccaaaacacgctttataagaaacatgtaggataatttcagaacccattgagaagaagagaagtgtaatataccgtgcagcgaaaagatctacaacaagaagatgaatccaagcagaagcaagagtcatttcacttgagaacattttagctattccagacaactgcagatgaaaaaactaactttagaaactgcaatgatacaaatattgtggatggttaagggaaagcaaaacctctggcaacatgtatttactagaaaacatgtatttgagcgtctcgggtgtccaagaaatgtataacaaatacacatataatacgcctaagatgatatacggtacgctactctccatacacttcttggtctgcacaaagaaacatactcaattttgatcaacttcattaggtcatcaagttgtaaaacttgcaacaaaattaaacttacaatttcagcttttggtgctacaaccattagagtatagaagggtaaaaccgcggtagttccaaccgcaaatacactgcttgcaatctgagtagtagttaaccctacaacatgaacatataagagattctaatcacacatataatcttagatcaaagtcacaaagtgagtgacaaagtttaatctttaaatggttatgagacacagtacatgaagctcgtac

SEQ ID NO: 28197 - DNA, 2358 bp, Arabidopsis thaliana landsberg
agggaaagccccgatcgttggtttgccaccgtttatgattcccttcttgctaatttaaaaggaaatgtagggtcacatgcaaaacggggagaagaaaaaaagtttactctgccatttcaattacgctaattaggaattgtaatttgacttttcaccctaaacattcaacagttgcaccttttacttaagaatttttttccaaaacttgtcgactcactctttgaaaatatgactttcctgaaatatttaaaggtgacatggaatagtatcccatttggtatttcttgttacaaataattttctaaacaactatgatactttggccccaaaaaaacaaaaaaacaactatgatatttggtatatttgttttcagagattatatggtagttgttaatataagagtgtgggtgtttgagttgtgaaaattttcatttactctagttatgaattttttcttcatcgtatgccatattttttttaatcctagctcttacttcgtctttttactcttaaaattcaccagttgcaccatttattttgttttaagaagcatattccaaaacttgtctacttggaaaccatgactttcctgaaatagttaaaggtgacagcccacaagaaaaatttctgtctttttattaggactagaagagtaccccatttggtattttatttttatttttcatatgctatttgatatttgatgtgtctatgtggctgtgagcatcacaatggcacacatgggggatggaagaaattttccaaattctcaagaagttaaagtgatggaagtgagctaagtagcgttggacaaaaaacaccatcaaattatgtaaaactcaagtttaacgtcaaacactcaaacatgtgttttcagaaagaacttttacatatgtgatgcgtgtcccagttaattatatgattttgttgatagttgtatgtgtcccaattgaagaatatttagtttatatatcgatgcgttatgcaatgcaacaaaacgagagagagatatagttatacttttataattagatgtttttctagaaaacttacagaaaattatatttctacaagatatatatatatataatttaattttgtagaaaatgttattttaagataatttttgaactctcatttccttttgatattgtgagggcttttatatgatttttttttttgtaaatgtatatatatgaatgaaaattagtaataagattttggtaaccaaaaagaaaaaaattaactataagtaatttagagataatgttaatatggatgtcttatttagttttaaatctacaattctgaaaacaataattcatgcaaagtgctggtggttaaaacgtcacatatacatttaggaaagaaaaaagtattgcttacaaatttcattgtaaccacatacatacggtcacaagtgtcaaacaatttacctgaaatggtgatcataccttcttttttcttgttgttaaagacctacctaaagtgaacatgttttggctatataataccattttcaccttaattacatttgcaagcttatactttctttcttcttttttctggttcatttgcatagcttttgaagaagctacaatggcggacggagttagaaacgatattttcaatgtgttagctaggtttgataataatcttataaaaaaccttaggagtcacctaggcgaggtaagctccaaatgctgcgtgtctttctcactttcttctttggtatattactttttgttttttttaatattttcgtatatctagaagaattgaagaaatcaaattaaaattgatacttaaatatctaacttgattctttttactcaaatgagatggtcgacttggatcagctgcaacaaatccgagatctgctagaaaatttcataaaccatctggaggcaaacgagttgctgccacaaccgaatccaatgtatcatgatcctctggaagatctaggggattcaccagcaagctccgacgtgacggaaggatccaacagcgacgaggattgataagtaataactggtcgaataatactacttgctttcttaatatagtatattggaataaaatcgtatttgtaatagactttggtttaaactgcctcatatgcgtcccaccgtacttgtaatagatgattaaataataataataaaatattatatataaaacaactttgtttcaaaatgttaaaaaggcatttgtaatagacattgggagaaggaaattgagcatgagtcagtctcggagcgccgaattgattgcctcgatcgttggtttgccaccgctacatgattcccttcttgctaagaaaaaaggaaatctagggtcacatgcaaaacgaagaga

SEQ ID NO: 28198 - DNA, 1221 bp, Arabidopsis thaliana landsberg
taattatcataattaaattaatcgttactactttataatactcccaaaataatcgaaaacgaatttattttattgtaatttgtttaataataaagaattactgtttcctcccacttcccatctctcttttccttttgtgttcttcttcttctccgctttgtttccccaatctctctcttctctctctctgaagaaaaaaaaataaaagatctaactttgacggctctcttaatcttactcactccgtaagttccaaatctctctcctttactctcatatctctatcgtccgaacaaaacccaggagaattgcttcaccccctttttgggtttttaatcattttctcagattctcagtttctgtttccgtcttctagattctgggttcagtttctgttttgctcttattgaattttcttattcattttgtgtttcggagttattcatggtagctgaatttgttaattctgatgttgttttgcgttttcttcttttctagtttggctatgtcgtctttgatctgatgctgggttattctctttccctctgttttggtttcttttagggttttaagtcggaatagactgatgggagcttgatggttattgttagatcagatgtggatttaaagccttcgctgaactaacaagtctatggaagaagcaaagacccttgttttacactgtatgttgtgaggaatttgtctgattttgggtgataaaggtgaagtctttgagtttgtaattttgagataagattggatggtgggaagagaggatgcgatggggaatgatgaagctcctcctggttctaagaaaatgttttggcggtctgcctcttggtctgcttcacggactgcatcacaagttcctgagggtgatgagcaaagcctgaacattccgtgtgctattagttctgggccgagtcgaagatgtccagctgctcctttgacacctcgttcacatcataacagcaaggctagagcttgtttgccaccattgcagcctcttgccatttctaggaggagcttagacgagtggcctaaggcgggttcggatgatgtcggtgagtggcctcatccaccaacacctagcgggaacaaaaccggggagagattgaagctcgatttatcatcaacgcagcagcgggtaacagataagagctctggtctagctaagagggagaagattgctttctttgataaagaatgttcaaaggttgc

SEQ ID NO: 28199 - DNA, 1671 bp, Arabidopsis thaliana landsberg
aatactttggcaaacgtccgacatttctcttcctctctttttttctctctcttccttctttgggaggttatgatttatgaagattgtaaaaaaccaaatggctatttatagagaattcatgtggacgtggtggctatccactttctgtaagatatgtatacatgaaaacgtggagaaagaaagagagattcgtacgcttttgacccaacgtgatattgttttcaaaattttcaattatatattgtcaacattttcacctactttagatagtagatacacatccgagatagataaaggatatgtgacacatgaaaatgtgtgaacaatataactataatattaataacttttcaggaaaaaaatgataatgtttaatcgggcaagtcgtgggtggtttgattacggtatgtagaccgtaggctctcgtgaattaatctagcgtatatttctgaaattggtggccattttacgtaagaaattattgccctaagttttcttccacacaatctatcttttagttatacattttatatacaaatcataatatttttccgtggtgaagtctttcatctaaaaaaagtgtttcgatgtcatgcaggtcatatatatcttctgcctttttttgtattgaatatttttgtggaaagaaaaaaagacaaccattcatatatgaatagttcaagttgactttgttcgtcatagttctatcgacaaccgcatttgcattttcacattaaaacactccaaatgaagataagctgactctgaaactctaatttgaggatcaattaacttaaaaattgttatattattaaagaaattaaaacctatagagaaaaaaggattcatttgaaacgaagaggacgaaaactctctttacacaaatgttttttgctttccatctttatataataaacattacaatgcaatgccactccttaatcccaaacctcagtgtccgtttgatggcctgaagtccctatagccgttgattccagacaaattcgggtttgatgaatctaaatcaaagtaagagtaagtagctgttgctgatgctgatacatcgtcttggttcctcatagccggtaaagagaagtccatatttgccatctgccattgcgattgtgtttgcccattaccatatggcgaggaagaagcagaatgtggcatgtattcaccgtaagactggtgaaatccatcatcactgtaactcctagacctgccagagatcccgagatccgcaccgccatgatatgagtactggttgttgaactgttgtggtacacggtatacgctattatccattgtaccgtgttcgtctgcaagcagatcattgatgatatcaaggtgagggaactcatcggtcatcagactctgtgccgttctccctatctgaacattagtaggcctgatgctggtagttactacgggtgcgttgaagtgtttgttttgtgattcccgctaatggttgttgttgtatctctggttgaactcgaaccaccggtccacaatagcccaccagaagaaacatcccaagagccaacattgatagggaaaccagactgatttgatactgagataggagacggatgtgaataaggcggcaatgtgcttgttccactcgattgagagcttgggtgggtgaaaccagatgaacccactatggcatgt

SEQ ID NO: 28200 - DNA, 1286 bp, Arabidopsis thaliana landsberg
  unsure (1)..(1286): unsure at all n locations
ggaattcaactttcttccttcttactagcaacctctttatctgtccgccaaaaattcaatgatgtcagtgtagggcgaatgataaatcatggtctatccacatcatcaatgcaccttttctagtccctatccatgcggacacctagttgatcctagcgcgagtgctatacttacattgataaggttctgctcctaataaagggccgctcataatcagcgacggcgaaacatttatttctgctgatgatttgcgaattaatctttggtatctggaaattagcaatcaaagtttcaatactgctgatgtcaagcctgcgaaaatggaagatctatctggtaagccttggtctactgttatctcagtctaatatgttctcttatacggtacccatttatcatgcaattggatgcgatatccttcgaatttacgaccatattcgttcatgcagaggttatcacatcagcagaatttcatcctacccattgcaatatgttagcctatagcagttcgaaaggttcaattcgcctgattgatctgcgccagtcagctttatgtgattcacattcaaaattgtaagtcttgagactggcaattatgttaagtttttttagagtccagtatatcttgaaaggaggatctaaaaacttgtataatcatctcaattacttctttatttcatcaaaatttgattgctaaacattttattccaacatgagagataagtttatagcatcataccatgtaatactcaattaatattgagatggataaagctgcatgagagcaaattaatgacattactcttttgtaggatttgataacctgtggtagcagcaaaggctaatattgcttgtttctgcaggtttgaggaaccagagcaagcaggtcctaaatcgttctttactgagataattgcttcagtctcagacatcaaatttgcaaaagaaggaagatatctacttagccgtgactatatgacacttaaggtccatattttcactgttttcatcattcaatatgatatcccctcgaagttatcagtggctggtttcgatttgttcgtgtaaggtaaactgaccccatgttatnnnnnnnnnnnnnnnnnnnnnnnnncaacatggacgcaggtccagtagcaactttccaggttcatgaatatttgaaaccaaaggtcagtttcctaatattttgagagagatacatctggcgagctggtgctttgctgaatggtattaactttgaagtcattttcagctctgtgatttatatgaaaatgatgccatct

SEQ ID NO: 28201 - DNA, 1997 bp, Arabidopsis thaliana landsberg
gtaaacaaattttttagaataatagacagaaattaaggtggagttcatctttttgataattagcattaattcctactctaccatgtttataattgaaatcattatttcatattttgataattagaattaatccctactctaccatgtgtataattaaaatcacaatttcatgaaaaagatcaactaacttaaccaaaactatagtcaatgacttttactgaaaaatctcaagagtaaaacaatcttagttacgtcactatcaatctccattggaaagaatggtttaaaatcattagtttttaacaaactctaatcatgattattaaaaaaaccaaagaagcaaggaagacttttattcaaaagattaaattttcttccatttaaaaaaggaataaaaagagatgtcaaaataattactacaaaaaacattagaatttgttggatatgtaattgacctaagaccataacgagcactcagacctcgtcctttcaatttagtctgcgcttgacacggcactcttaaaaataaacacggtgacgtagacgccgtcaccgtccaatctcatcgtcccttttttaattagcagctcaacgatttaaaatcgactgtcatttacaaaggctgtcatttcaacactcttcagtccttcttccttataatcctctcatcttctttttctccaggtttttaccaaccagttttttttttttcaaccctcgagatctttctttgcacgaacaaacctcgaaaaactcattctttatcttgacccatctgaaaaagtttctctttttttgtcggaataccatagagtttcattattttcgttttagggttcttcttttgtaataaataattggaagcagaggagctatgctcaagttctcagatgaaattctcgcttttgatcatcagttcttgtttctctttctgatttacgctggatttgcaagggaaacactctgactttgtcaggactcttctgtgaaattctgcaagtttatgacttttctagtgctttttaactgtttgtgagtttgaagaaaacaaatttcaattgagttgctttggaatccgttgacataatagggtaagtcaattttcttactactaatatttatcccattaatgcttgagaattgttcctaatagaactctttttgctgtttgttaaatttgcagaatttagaaacttctcgtttagatcccgatcgcctacacagaacggatgcctcaatcatataaggtttgttgttttatcaaatatgtcttatgatggagttttggtgtcttaaggtttgttactgtaatgactgacatgttgtgttgttctgtttcagatgcactcttccatgtgcttagaattgaagaggctagttgatagaatcatgagaatctttcctgatatagaagatgctcgacctggatgctcttccgggatacagactctttgtttactccacaatgctttggataaaactaagcagcttcttcaatattgcagtgaatccagtaaactctacatggtatgtgttcaaaatctcaactttcaatacattttcatagttggttttggtactaatcccttggtttatctctatgtggtctaatgtgattaatactatgcttcaatctgcaggcagtaacaggagatgctatactcgcaagaggttctagagctaaaaaatcattagagcaatgcttaaacgacattagaagtatagtaccaactattttggagatcaaggtttgtaccaaatattatgtttcttctcgatgttttcataataatttgaatcactgatgtgaatcttgcttgcagatatctcagatagtccaagaccttagatcaacacagttgactctagaattctcggaagaagaagctgggaaagctattagagaattgatgcaaaagagcacgtcttcctctgcttctccggatgagataaaagattttcattatgctgcgttaaaactccaactttcaacacct

SEQ ID NO: 28202 - DNA, 3096 bp, Arabidopsis thaliana landsberg
  unsure (1)..(3096): unsure at all n locations
ttgaaattttgcaatttggttattaaaaaaattggcttcatttggtaaccttttaattaagctgaaaccaaatgtagataaattacagaagctgatccaattttttttaatttttttttaatattcttggacaattgtctgatttacgagcaacaagagagagtctctctacacaaaaaaaaaaatcattagctgctctaaatgatgctttctttagcgcgctaatataattagctaattccttaattgtaccaatgaagacgaagaaaacaaaaagccattaacgatttaacagctccacaattccgactttttttgaaaacacctgaattattttttatcgctgtagcgaaacggnaataggtcgcctgagaaatctctggtttctccgaatcgcctccttagcatcgttcctccgtcggaacaccgtcgcttctgccattgttctccatctcgcatttggtctcgtttctcagatttccatacctcattcgctgattcgcaggtgagaacaaattcgttgattgttcttgatccctttaccggattttatgattttgtggcattggttcgtcttaatgctttgcggttccggtttctagtagaactacgcacgatggttggattttggtagttttggttttgaattttgtgagattcgttgatttgaagttctagtgtgagtctgtgagccggtgaaaggaatttctgagctcctcgccgaaacttaggttcatgttccggcgaggcatgtcacactattgaaaggatttgaaatttgtttgggtgtaattgcgtcgtgttcgttattatattagtactttcttggatcttacggctaagtttgtgttggattttttgttctttgttgtttaccagagacatgtgtaagtagtcacaaactttgtttcctcactgtgcacatggagttaccaaagattcttggctccacattgaacattctgcagaaacggctgtgattattataatatcaaatctgttaaggtaactgatttcttttgtttaagtgttttcttgtggttttaggcaataaaatatgagcgtaggcttgaaacttatgcaacatgcaaggaagactttttgacagactgtttaggagggggaccattgcgaaaacacacaaaatcctctccataatattatatgaaacttgggtttctttatgtctcaaacaatgatgagaaaaaccatgttactgatttcgttgtcattttctgctgagatattttggatataaaacacgtggatagagacaatgttcttctgccaaagacatgaatatagacaagttgataagtagtctgatgatctttagtgattgatttgtcctcataattcctgttcgctctctctatatgtatgacattgctttgttcttgacctggtttcttttggggtaggatgcgggaagggaggtgacgggtgaagatgggtataggagaggatcagatgcaaggatcgagtggtagggaagagaagatttttgtttctgttcgtctgaggccattaaatgtgagagaaagggcaaggaatgatgtggcagattgggagtgtatcaatgatgaaacggtcatatacaggagtcatctctctatatcagagcgttccatgtaccccactgcatacacatttggtaagacttgctcacttttgaaacttcttgatcaaagttaatccttaaatttatcttgctgagctttcctatgcctctagacagagtgtttggccctgagtgttctaccagggaggtgtatgatcaaggcgcgaaggaagtggctctctctgatgtcagtggggttcatgggaaggcatgtctcctactgcttttaatttttttttcctctgtggctcatgttttaaacaattttcatctgttttcagctagggtcttggcatatgggcaaacaagcagtggaaagccatacactatgattggttttacggattatgcctgggctgatatatatgattactttgagaaggtaaagttaacaatatcagagtcttcatagtaatcttaccgcattatttccaattcattcagtaactgtcgccttttaaaaaaattatttgttttttgcagcacaatgaaagagaattcattctgaagttctcagccatggagatctataatgagtctgtaagagacctcttgagtacagacattagtccactcagagttctagatgatcctgaggtaaaagttggggctggcatcttatggaattggtatgcataatctcactttactggtcatttactttgggacagaaaggaacagttgtcgagaaactcacggaggaaactctgcgggactggaatcattttaaggagcttttatcaatctgtataggtacttattttcctaacatgtactcaattaatacttttagtgttttggtcacaagtttcactaagtatcatcccatcattgcagctcaacggcaaattggagagacagctttaaatgaagttagttcccgctctcatcagattctgagattggtaaggcattctgctgatttagtttaatgatacgacactgcagtcttcaggctgcgttttctacttatttctgactgatatgtttaacagacagttgaaagcacagcacgtgaaatatttggcgaaggataaatttagtacactcacagcgacagtggtatatacttttaaatcttccattgtgtactatcctaaaacaaaacatgaaatatattcatagattaactaattatcctgcagaatttcattgatcttgctggaagtgaacgtgcatctcaatcattatcagctggcacaaggttgaaagaaggtggtcatataaaccgaagtttactaacactaggaactgtcattcgaaagctaaggttagcctgtgacctatagcgtcaatgaaattctgtgatctgtgccaccttaggctgctctttattctttccctatattcaaagatggttaagcagctaatcattgtctttgagagttgagttccaagctgaaacataggactttcgcccagtaacgccagtttaccaagttattagcagattgctgttattaacatctaagtgt

SEQ ID NO: 28203 - DNA, 1915 bp, Arabidopsis thaliana landsberg
tttgttttactgttgtcaaattttgagtttatgaaaaaaatacaaaagattttgctaccaatctttctgcttaatctctatatgaagtattttagttcgttgcccgtgaatcagctaaagactggtgaaggaaagatccttttgaataacaaaaagttaaattttgtacttacatgtcattttacgagacataaagcatagtgagtgttggtgcttaaaagttaaaactctgcttcaatcttatacacacatttttcctgaagttgctattataatacacttcttacaaacctattttacatacaatagacatgaataaatgcaacacaagctctaccatctaacaaatccttgaagagaaaggactccagaaagcgtttcatgtttcttctgttgctgtgaaagtgtatatatttgtcgaaatagcgatgatacttgtggcaacagcaagaacaagcattactgaagctacaatcttctctcttaaagtcgagaaaccatttacattcctgccagtttccaaaaacaccaaatcaatggataagatttaaactttattcattcagaattacatgagagggattaaccaaaaagggtaacataccgtaggacaattgcagctggaaagatgaatgctatagagactgtagaagttgatcccaagaactgaaagaagtaccaaatgtctggtatggcaattgcacccaagaaacaagatatcagtaatggaaaagtgagtgcgaagaatcttttgttgtcttccactaaagaaagcttcatagggaacaagagttcgtcgaggttggctctaagcgagaagttgagcagaggaaacacgagcatgaggtgaatcgcgtagctgagtctaacaatatcatttagtaatgaaccaaccgaagaactggtgctttgatcaaagttcattagaacatctgtcatagtggaatccccatacagaaggtaacaaaagagaccagtagctgagtagatcgtagcacacagaatcacagagatccttgttgctgaaagcacatttaatggatctttgagttcgaatgctactggatggactgcaataaccataacttcaaaaatcagcaaaagagaacagtgtatgatttggagtaagagaacagttcttggttcttggtttcttaccattgaaatgaaaggtgaaggctgttacaatgacaggggaagcagtgaagagactgaaaaacgataatccaccatcattgagttcagggaagagtctcggaggctttgtcttcccttgcacgagagcaataatcgctaacaccgagcttatgacaacaaagagtaacgcaagcagaaacgaaattgcagaactaaatgccaatctttctacacaaaacataaacagacaaaatcatcaaaaccaatatgcattgatcgattcaagcaaagactaagtatttagtataagaaacgttacctacacgtctgcataagactaaaggaaggaagaggaagacaaagatgaacaacaaaccaaagaatctcgtattccaccaatgagaaccaaaccattcttgaagaagacctaaatgtatgattccatctttctcattacccgaaataacatcacctaagagaaacaaacaatcactgaatcaattcaaaggtttgtgaaaaagttcagatttttatttttgagacaaaatcaaattttaccaatgataatcgagaaaataatcatagacccaaaagtcacaaccattgtaacaaccgtaacagcaacggcaccagattttccgaacgattccttcatcacgccggcgtaagttgttgattcttcggcgagactggatttcattaaaaacccagcttgttccatggaagagcccagctatgattacgattaattgatagagatgggattacacctatgact

SEQ ID NO: 28204 - DNA, 1554 bp, Arabidopsis thaliana landsberg
cttttcagaaatgcagaacgaatttagagaaacagatgaggaacatctccatttcatctcctcatgcgtttttgtttgctgttgaggttttactaaaaatttcttttgtgcagatgaactcggacaaggtaacaaaagaaaggaaagagcggatacagatactggagaacatacagagaagaataatggctctgatttgggagaccaaaagaagccaaaacttctttttgcagatgacctacaaaacgaaactttagaagctgtcccaaatataggtgagattcactgatcgatctcctttttttttgtcacttatatccaccaatgtgcaaactcttatggtttattcagaagaagccaacaatgaaagaaaggcaccaacagagataaagaagaatggagaaagtagtgagaagaagagcccagaactggtttgtatggaggaggaacttcaaaagtggtcagctgaatcatttattgatttaactgcttctggtgagcctctcagatctcaaataatattggattgattgcaatatttttgaatttagatacatacatatatgcaaatgttttaggttacataagattccagttctgctttgtcataggtgatctttgagttatggtatcaattatgggaaacatgttgtttctaatcccattcttggtctattatggtattgtacttgatgaaataaccaaatttggtcttggacagtggaaaatgaatcccaagacccactggagagcgttggggattctgtgggacctcatgagattccattgagtccgccagagtcctcaaacaataatgttgctgctcagctacaaatgccgacacatgaagcattagatgaagaagtgatgcaggatggactcagcctctctgacctcgaagttgatctgcaggagggacatggctcaaataaggagcttttcgataagatattcaccgatctcgccaaagagcttaaaccttaaattacaaagctctgctctgcattgctctatctgtctccttaattatgaatataagatgtttgtctttggttttaagtttgtctttctctcgttagtgtttgaacttgaacttccgtttttttttttcagtgttgtcttttttatgtctcgagtcaaattggctttgttagtttcttactttcttgaaaatttccaataaaccatctttgttagttgttgcccttgttcgaaagactgctttgattctctggaatcaccgacagataagagagagcccaaaatggctgttaactttctgttaaggtctgtaacacacacaatgtttaacaacgatggctggagtacaagcttttaaaaacgctcacaaaagatgacaaaaaacacctaaagattctttaaaattaaaaccaaaaagaagaaataactgggaatagtagtaattcagtgactaaggctcagcctcatcttctgattcagcatactcgtcgtctgactcatcaggccaaacatagtcgacaacatcgagaggatgcctgtgcaacaaattcaagagctgttcaaggtttctca

SEQ ID NO: 28205 - DNA, 2045 bp, Arabidopsis thaliana landsberg
  unsure (1)..(2045): unsure at all n locations
tgcatttgcctttgaccacatgagaaggaaacaaagactagagaaaagacgtcagccttcttgacatttggtaaaatgaatgatcaagtattcaaacatcaatatgctaagataaaatcacaatggaacagaacttgttttataagtcttcagggatgtccttgaaacatatactataaagtgggcaaaagacttatgaaacctacttaaacatcagcacttcactgtttactttgtctcacacgtaaagcaaatgcaagtaaatcaatgcagtcaaaactctaagcaacacagccaatcccacagcattaaggtctacttcataagaaacttgtacctgtcagtatgtgtttcttattccatgaactgaagctataccaataatcagtgtgcaccatatcagttggacactttgtcaattcaacacatacacgctttagcctgaacttttctttgatctgaaatatactcacgaactctctgagttttacttcgcatgggctcaatcatattttctgtcttgtgaattatctcttttgacagatgaccctccacaaaactgaacaatgctcctaatgtcatctttcttagatctgtatcaagttcattgttcatatcttcttcaacatgacagcttaaaccctgctctcctgaatcagtaacctcatcattttcaaagctcttcaacggcttctgatccgctttcttgttcttccctttgttctttctggctcgatttagaaccatgtccaattccaaataagaatgtccaacaatatcaatcttcttgcttcttgtagccctagtaatcctcttctcctttaaagtctctaccttctctacattaaccactcccaaacaagcttttcctacactttcttcaatctttttgctcctcgtagccttactgctcgctcggttcttcaatcccctccctaaattttcctccaccattgcacaatcctgcattttaaccttaattaaacatacacatgaccccttgctactgtgaacattactaaccccttcatatgtctacaccatatccacttgcaatccatcatcaatccctaatttctccgaatcctcgattttcctaactttcctaaccctagaactcggcttattctcaaatttcacatccaaacccttttcttcctcagtgatatcccccaaattgatactttctaaaaccctaattcgcttcctcgcattagcctgacgcctattgttcctcgtaagcttcttctcctgaaaatcatcaatcacaaaattcaccacaatagatgtatactcacctagtttgataacatcgccatctccgagatttaccgacgtctctggatcaagagcattcgaattcaataaagtaccgttggaagatccaagatcttgtattacccaattcccagaatccgattcgatccgaagatgcttagtggagattccagcgtctttaattgcgatttcattaccacgaacgattcgaccaacacgaatcgtagatccaggcttgtaatctagagcatcgccttctcttggacccttgacgaatactaatctcnnnnnnnnnnnnnnnnnnnnnnnngtttctctcccaaatgcgaattttgaaattttgatttgtctgacgctccaattattaatgggccttaaatgggcttttatcgtttcgacgataaaacaatttcaaggctaaaagctactattggctaaacaactggcattattgattacccaaacttccagcaacacacgtgaatctctcagcaaacttatctctcccttatccactttttttccaacctttttcccctcacgctcctttaccctcgcgtgtatctcacctcatcatttggatatccactgttaaaattcccttttatattcgaaatcaaccaaatttaaccttactcctataaattaattaggctcttatctacaattgttgcaaatcaacaaaacgtgcttctaatgctaacacaaaaattgatttttgagtatattcctctacgtagtgaacacgacgcgctaagatctgacgc

SEQ ID NO: 28206 - DNA, 1633 bp, Arabidopsis thaliana landsberg
cgatcctgttccttgattaaatcatggttttttgatacatcaaagaagaaagctgacttacaaggggggacctctagaggagatggcggaggggcatgagtctctacctcacttttgaatagtgctctctccatgtttgtgatccaatttgatgcacgacccctgcaatggagatcattctcgacgagctgacttatgatggatactcgctgtcaaaatttcttcaggtaagagacataccacttctgaaactcactgtggactgtaaaattcttctctctgtggttcttgagtgaaaatttcttaatcaggttttcgatgatcctaaatggaagctagagattgttctccaataccttactaaatacattcctaaggtttgttgttaattctctgatctctcgctctctgattatcttctccaacaaatgatgtacaatatatagttatttctctgatttctctctctgaccaaatttctttcatgttgtagcctgttgtacgtacccgaagaacaactgttcctcaagcagaggattcgaaaacactaaatgggatcttgaagacgttttcaaatggcacaaatccaaagaacatcactaaaaagataggacctgacattgttcagatcctcatcggccatgcctttctggtaacacaataatacctttgtttcttctttcacgttctcagagctttttttggcctcctaatgtatttaactattcgtcaggctcggcttacattctctgaccctcacgaaggagactctatttcagagatatgcagtagtatcatctctgcatttactagtctaaagcgagtagatcagtaagctgcagtttctttcactctcagttttttttctctttgtgcaatcgagatactataccgctttcctttgtccaaccgaaagtttaatggttgttataggaaaatcgagattctaccgtttgggaaagaagtgttgtttactgcacgaatggtactcaaggcaaaagcttaaagcatctaggaatcaagaatttaacaaatctagagacttcaattggattagaagcaaagaagttacaatgtaatgtaggaattaagagttacagatcattgaattatgaatttatatattctatagttttgccaatacaaaatgagtgatcttatgattctgttgatgcctttttctcacttatggaacatatcaagacttgctttagtaacaaatccatgcctgataagtttatgcaaaacaatcttggcttacttggtggattgaggtgagtcgagctgcatcgtgaccggaccatcgtttacaagattgacctttgaatatgattagagaacatgttttaatcacacaagatactaatcaaaccttgctattgaaaggagttatctccttacctgcatcatagctccaaacacaccatctgtattttaaaaaagagaaccaatttagtcaagaagactagagaaaatgagaagttttgattaagaaaagatcaatgagagtgtgttttgacctttgacagcatcaggattatatgctttctggaatttcttaactaaagaggcgtaaaaaggtttcgctttatcaagtggcattgcgacatgaataatctggtttgtacctttc

SEQ ID NO: 28207 - DNA, 1814 bp, Arabidopsis thaliana landsberg
agcccatttcgtgatattttgataattctaggcccaataaacaccaaaacactagtttttctattcagcacttaagttagagccaatcaaactcattctctggaagctctttctcaacttgtttcactcctctctcaacaattacattgcctttgattgcatacagtctccaaagcaatgaatttgtataggctagtactgtatcattccagttgtttccacatctctgaaacctctcctcacaagaccaacttccatttctctttccacaagctctcttatagaatctatcatcttatgtgcaacggattcagctttacttgacttctctatcaattgtgaattgctaaacaaaagccacccataaacgccaagacccagctactgttatctctaggtgggtctagcctagcggttatctctaagaaaagattctccatcacatgaatcacaaaatcgtcatcaataagcggcgttgttaagcactggaagatataaaccgctctctgaaactttgttttgctttgtgatgcaatataatcgcgtagaccatcccatgcgacatcttggtgtttggacatctcatacacaacgtgattcaccaccttaccaaggactttgaacatactgtcagagattctttcttgcttaaggcaagagatgagcaatgcctggagttctctcatctctgacaattttatttccactttctttgaagtgtgatcagagagtacaacttcaagccgtctgattgctatctctctggacctatcttcaacaacatttgacacaaagattttcaagatatcaactgatgacaaagtcttcaaatggtcacacaagccacgaacatattctgctccatcatctttcgtttcctgaggtttcacgacaggtttgctcacagctttgtcctgtgttttaaccaaccgagtgatcttccttacaatctccttgctctctattacgaaatctttgatcttgaacatgaaagtcatcacaaaatgacgttgtaccttagtgtaattatatagattcttatctcgcaacacgaacttctcgagatgtttaagcccttgtaccaaaaactgttccattcccttttgcactagcatcttcactgagttcacaagaatgttcagaagaatccttatcaaatcaactctaatctctgtatccaaagtctgaatccccattttcacaacagtttctaaagccaagctccaatcgtcaactctatctttctcaggattaaacaaaaccttctcagctttctcaacaattaccttcataaacttgtcgataaaactctgatacaatgatggcaaatcgataaagacatgaaaagccttgacaggttctttgctattcactagcgttaagatacaatcaccaagctcgtcccatttgcctttatcgaaatcacaacattgtaagctacacaagacacgatttttctaaggatcttgatttcagattctttgggttcttccattgtcaagcatgaaatcaaaacccctttaatttcatagagagagtcgagagatagtttgaagttgcgatttctcaaatctgtgagagtttcggagagttgatagattgatcgtaatctgagaacggcattagaagaatattgatagagtttaagaagctttacggctaagcaacctgggttataagagacgcagtacttgtacagagctcgcgatgttttatattcttcggagtcttcacgcttaaagagattatcgacgatcatcgctagttcttcatggctttcactcacaagaatctctctccctttcactgaagat

SEQ ID NO: 28208 - DNA, 1446 bp, Arabidopsis thaliana landsberg
aaatgcatgtgggagatcttgtgatcatgaaaaaactatagaaattttatggtgaatcatttggactttattggttaggatcatacgtttccattaataccttttgggaaacatgacataagtcaatgatgtaataattaaaatactatgtctatatcaggaaatttctgcacctcatatcaattatatattgtacatatcaatttcagcacctcatatcattgagccaaatttttaataatattgacaggaactatgcatatgttgaagtaaagccggacaaatattaatatttaaatataaagtggatatcaataatggaaactccataattttaaaaatggtattagctataaactctagagaaatataacaaattaacaacaaaacgaaaacagtattttacaagtaaacaaatcggaaaaacaaaaaaaaaagtcttaagattacaacaaagaataaaaagaaaactgtatcccactcgagttttattttgtttcttggaattatataataaaaccattaacgtccaagaaatcgggaatatcaaacttcatgagattactgcaatagctttctatttcatcctcagtgctgcaactgctactattgatgtaactcgagtttaacgtagtcgggctcgggctcgaggatggcgtgtttaagaccgaatttgcgaagttgaagctctgatccgaataagaaggatccaagacaaaatttgaacttgaataatcgttgaatgacggattatagcaatcttggactgacgtagtagaagttgcaccaagattttgttctccaaaaccattgaagtgatgatccatgttgttaaactgatgagcttcattggggaatggtggcatggaagattggagttcttgagtaatcgtgttctagaaatattggtcggtttggtattggtttactccggtttggctataaactgtttgcttctcttgagttctcaagtcatgatccaccacaaggttttggttttgattttgagagaacagagaggtagcgagcttgagtatctcggggttatccaatggatgttgctggtgatgtcgacgattagtatccatcatgagtcttgacatgttcatgtgatgtgaagatgaattgtatagagatgaagctaagatggatgagatatcgaggagatcgagtcgtggcctgtgagtcactggatcaatccccattgtaagtagcttctttatgatatgagtgttccaaaagttcttgatctcattatatgttcgtcctggcaaacgcacagcaatcgcagaccacctataacaagataaaccttacacgtaagaatcttgaactattttcatagtagatattgtcggaggagaaaaaaaaagcgaccttacttgtctcctaagaagctatgaagctgaatgaggtttctcttctcaaaagagatcttcctgcgtt

SEQ ID NO: 28209 - DNA, 1366 bp, Arabidopsis thaliana landsberg
ctaaaataaatttctaacccaacatatatgtatatctacattataaggatttgaatttatatggtaattttaactatactaacaaaaattattatattacttatcttggttaaattagtaaaatagatttatttagtgtttttcgtttgtcgcttgtcacactttttgagttccttcaatttgagtatcataagatttttaggaaacttaatcttgatgttataagtgatattaatcgcttatttataacatctacttatttatccatcatcgatcattttttaacggttcaaaagatttcacgtatattaatgatcaaaattctaaaaaaaaaacatttaatcaaaacatttttttctaagtatttaagtaatttttccggataatatttgtttggcaacgatcaacatatatcatgactcaaataaattttgatgtttctaattagtaaaatgtggagttggaaaaaagttcttgcaaaaggtgaaaagaacaaaaatcagagatggaaacacttcccacatgcttatgttagtcccaccatttagtggtagaaatgtaatttatccaaagaaggaggtcaaagctgcttcgtctctaatccaagtctagccagtattgttgcctgcataggagcaaacggtaaaagtgacggactcttaacgatgacgggtgttactgtttaatgtctcttgatcgacttttgttaccgtaacgacaacggcacgcgccctcacgctccgtaccagccttaaaagccaacacatttatgatttatccagtaactaatactaattccttcatccactaacgcaattgcatttaattgtttagtacgtatataaaaaaagtaaaaagctatttataattataacttacaaagtctctttcaattagtacagtgtaaaacaaccaattattttctatattatacagtataaaggtgtttatcatagacccattatttatttgtttttgactaaaatatcaaagtgtattaaaacataaaccaaataaatttgaaattaaagtttttttttttttgtaaaattaaaactgatttttggtttaaatagagaagcaaagctacgcttttctttttgctagctcttttttatttaatcaaacaaaaattgaggaaaataattattgttgtgctaagcatttctatcatatatttttttataaacaatacatttaatttcaaaataactttctactttcttcaaatcaagctatttcctagaaatttggtactgtctggataacaacatgtcttataaagtatagtaaggaatttacaattggttatacaattaatgtatagcgtatttattatataccaaaaagggtgtcccaaattttt

SEQ ID NO: 28210 - DNA, 1144 bp, Arabidopsis thaliana landsberg
tctctccgtcctcacctagcttcgtcgtttttgaatatgtcaatcggtgacaaagaacgtctcgccgccgattcgtcggccgggcttgtcccccaaaaactattgcttctattttttaattcaaagcttcttcccaaatccaaacaaaatctttttctttttcttttatatgtaatgagattaatctacaaagaggttgttatggtaggatttacaatttaagtaccatattatgtaaaacgtcaaacattatagggtctaaaatgaaaaaacgtaaagtcgggaaagaacttgggttaaattattcaaaataaaacataaggggtcaaattcgaattagtcacaaaatcttacataccctaaaacatttcgcctttcttattctgtaccacatcataagctggaggttctctgactccgtcgtctctttctccgtcgccaccgttcctaaaacgtctcccgtcttcttctaatggcgatcaatcgtagctccgatcatgaatccgacgaaaacacccgtctttaccatccttaccagaactaccaggtcccgatcaaatctcagtatctatacaagcttccgacttctccggaatttctattcacggaagagtctctcaagcagcgtcgatcatggggagaaaatctcactttctacacagggacgggttatctagccggctctgtagccggtgcttcagctgggatcttctctggtatcaagagtttcgaaaatggagacacgacgaagctgaaaatcaacaggattttgaattcgtctggtcaggcaggtcgtacttggggtaatagggttgggattgttgggttgatctacgcagggattgagagtggtgtggtggcggtaactgataaggacgatgtttggaccagtgttgtcgctggtctgggaactggagcggtctttagggcagcacgaggagtgagatctgcggctgtggctggtgcttttggcggaattgcggctggtgcagttgtggcggggaagcaggttttcaagcggtatgctcacatatgaagaaccggagtgatctttagagcccacctatatgggaaaatcataaacatcaaagctttttcgggtttctagggtaaaattctggtttacatgttagcgtatgaaacc

SEQ ID NO: 28211 - DNA, 961 bp, Arabidopsis thaliana landsberg
  unsure (1)..(961): unsure at all n locations
atagtccatgtatgattctcttcttgagcatcaatctctgtacccatcgctttaacccatcttgtatccatcatggcttgcttataagatcgtggttctgttgcagaagtaatagcagcaacataagcgatatgagtagcagagaaacgacgagtatcatctcgctctttcaatggatatagaattgaatgaagtttagacttcggttcctgaccgactgtagtattgacaacaaaatccttaagagacacaggttgtgttcgttttctttcactctgtcgtcgcggaggaggtaccgccggtggagccaccacgtgagaagttgttgtcttagctcgagacagaggcaacagctgcagattcgtcggagcagaggtagacggagccgacgtcgnnnnnnnnnnnnnnnnngggttgattacaggaggcgcctgaggcgtcggaacttgttccgtgggtaacggagctgacggcgactcttgtgactgcaattctgttacaaacgggccaatttgatctgtttcacaaagtggagtagttgggcctgcgtttgggcccaaattattttcttcttcaagaaatccatcagctattggggtcacaaagcttcttcttcatcgattatactctgttcgtgagtcatttgaaatggaaattcttgttctgagaacactacgtctcgtgacacaaagaattcatgttgctccatatcaaatagtctccatcgtttttgaccatgcgggtacccagctaacacacaatgcctactccgttctgcaaatttgtcgccaccacgatgacgattgtgtgcataacacaaacttccgacaacacgcagatgatccaatcgaggctgcttcatatgcaaacgttcgtatggcgtgcttttgttttgcagtaggctaaaagtcgccttaatcagatacgccgctgtcaacacacattccccccaaaattcaat

SEQ ID NO: 28212 - DNA, 1416 bp, Arabidopsis thaliana landsberg
tagaatttgctcccactctaatgtggaaaggatggcaatggaggtggctcttttgggaggaactcaaaaggattatactttttgaagcaatacttgttgtttgtaactaagctacatgataaatcaaagtttaattagtcattagtctctctagacaattgttcttatatattatgtgttctaacttctatcaaaactataaggacaattgacaagttattaaacataacgactacaaagtacaaaccattaaactacatagtacaaatctgatcaaaaatatgtttgctttattgttgttaattatttacttttatgtatctatatatttaacacttgaactcagagaatgcatcctttggaagaccaccacgaccacacgcattgttaacgttgcgagcagctatctttagcttgggggacttgagaaacaaacacatacatttttttttcattatcatattataacaacaacgctcataaatgtaaccgtgagtaaagaattcagttttgtctatgcaccattgcatgtccttttcacaattacccacaccaccggctactttgatgggagccggaaatgatgtcatgaatatgaccaaggcaatggacatcaatgggatgatcttcatgtctgatttattaacctaccagctgatgacaaaatatctcaaatcaggaacaattagttttgcaaaaatgttgtatattttttgtttgtttgagatctttaaataggaaacttggaatcaacgatttatacaacatatgggtatcctatagattagggaggaaagtgattctatttttatatggttgttcatattgaacatttgacttgttctttatgtatatcggtgtatggttgttaggatgttgtatatcttacaaatcgaacaatcgaagtattacaattgctttccggtgctcaaagactgggctatgggtttaggcttggccctttaacggagaaaagcaaggatttggtgggcttctttaaatttggttcgatggacgattctaaattatgtaaattaatttgatatacagtaacattttttgttttttaaatgttttctgctgaagtcaatttatcaataagtgtttcgtatgggctaatgtatcctttggatgataaacttaaagtatccaaagccgacaaaataaaattttaaaaatcattcaaattacgaatgtttttttctttctccaatttatatatgattttgggatctgttaccgtatatacttacacgtacgggacaagggcacacggtttcgctttcaacttcaccttcccttctccgccaatgttactttctcagaagcttcctagtcaaccaaaaaagactaacatgtttgacttcttcctctcttacctcataatcctccttttggacttttcaataaacccgc

SEQ ID NO: 28213 - DNA, 1731 bp, Arabidopsis thaliana landsberg
  unsure (1)..(1731): unsure at all n locations
gtggcttaatgtaacggtgacacactccaaccacttgatgcagataattcatagcacggcatatctggtttcaacaaacaaatgtttctcagaaccccaaaagtcaaaaatagagctgaatgcagaaaagagtacacggtcttaatacctgataggtgtagagctgaatataaatcaaaggcatatgctgattcatcttggtgtaagatctggaagcgcggtaaatagtctcgggtacatactcaagaacaaggttaagataaagctcgtctttctcagtcgtggaaaagaaagaatgcttgagctcaacgacattaggatgatcaagcattcgcatgatctgaagttctctgtttttgtatctcttgtcctgtaacactttctttattgctactttttcttccgtctctaagcacttagcctacatcaaaaccaggaatcaacttcaaaatcaaatttttaaaacaactaaataaaatatctcgagtctaaattttatttacctgaaagacaacaccgaatgagccagtgccaattacatgttcagctctgtaagagattgtctgcataataacaaacaatatataaaaaaacagattttcatggagaacaattttagaaatgtgtcattacaaagaacacaagccaaaactgaaaagtcaccttgtctttttgatcattcaaacccttctttttggtggtaataatccgtccagattctgttccatttcccttgatgattccacagtccatatcctatcaaatccatttgaaccattagctcaaagatcagagaaacaaagcaaatcagaaactcaaaaggctaaaaaaatctcaaaaatggaaaccttgtcatctccaagtcccacctcacggatttcctttggtaaatgatcagagttctctgaggaagagacagaatctttctcgtacgacgtagtttccgtagactctgtttcttcacgattctgattaggctttgatctcggcgtctcagtttctcctacctacgcaagttacaaaaacaaagagtccaactttaaacaaaccccaaatcaagaaaataaatacaaacaaacaaaaaaaactcaaaaaagtttcaatattctttacgttatcagaagaaacgaaattacgtccagaggcaatactcgttaatctccgcaccacattcatcgtttttttcttcttaaaaaagcagaaaacaattccaaggaaacagaggaattaacaaaaaaaaaagtggtttcaagaacaccaaaagattacacacacgagaagagaaagagagaaagagagagaatcgcttagctgccaattcgtctctccttcttctctcttctaccagaaaaacgaaacaaagataacaaaaaaaaaatgatctaaggatttttcttccttaatcaaaactctctgtgtatatgnnnnagggcatatttatagaaatatctatatatatctctgcggcggagcggatatagcttaaactaaaaaagaacagatggcatttctcgccattggtctattacacaattccaagaccaatcaatcattctcatacccttaatttctgttcagagatcatcaccccacaagaaaaaaatggaattaaataatctgtattagatacgatcgtgaccgtttgttcattcaacggtgccgatccaacgttaagcgcgcggattattcgaaagtaaaactcttccttttgactcttttctttcggcccgt

SEQ ID NO: 28214 - DNA, 1574 bp, Arabidopsis thaliana landsberg
  unsure (1)..(1574): unsure at all n locations
aaagtaaagtaaaaagtggagtttaggtcaacaagaaacataaagatccaacaatatttgcataataaagattggttgacccgaaattgataacacgggaaccattcattaccattggatagcattattagataactaagttggtgcatatatagcctaaaagctttatcctttaatggctaatgtgatttggatatccatccatttatctttcttataggatatggtccactagagatattatagtgggaaaggatattgtagaaaacctaacagtataaagttgtggaatgtattacagtttgaattgttattggattgtattttgatatcaaccaatcaaattctaatctatacccactatgtcaatgtctataactagtcacaatcagttcatttggtaacaccttttcttaacaattggttcaatgtttgacacgaacacaaaataaagtagatgaatatagctatgaaggttttaaacacaaagatgacttacaaaatctccagcgacgatgacagatataactgttgcttgcataggaagtttttttacgaggattgagtaagcttccattagggctaacgtcacgctccaaggtgtcactaaacccatgactgtgactagataactgttccataacattcatagttaagtctcttgtttcgacacttggtttctaatttttaaatgaatgatttgatttattaccagaaggtggtgtaagcgtagaaatcttcgtcatcgttaaagcacatgaaaagaagcgaagcagaggaaaacagagtttgtccgagacgaagaacaaagcttgagctggttccaaacgacgccgttgttcttaccatctccttgaaaaagagcccttgttaacgtctctagttctcctcattttcacctgctttgatcttccattactgggtttcgcaaaagatttgaactttgagtaggagataaaacagggttaagaaacagagcaagggtcctctgttttttgagacagggaaggtgaaaagacaaagtggatgtgacaacaatggggtcataaggcaaatggtttgcttaattataaatctcttcttacttcttaaccagaaatcatctttgctgttacaagcaattatacagatctacaaatatgttatcttaatccgcaataattagtcttttaatcacaataattagtatcttattaaagccaaaagtgcaaagtgttaccaaatggagtaccacatgtactatgaactggaatcaatattccttaatcataacaacatttacagaaaaagaaaacaaacagattctctatgttttattcatcaagttggcaataccagattccttgaatcttgacatccttaggagtcgtagcacccaaatcagtgtctgaaggttgaatactctcgaaagcaccaatcacttcaccgctctcgggattactctttgttacactaagtgtgatcttgttgttctccttagctagctcctcattggttcctctagcaggtaatgcaaccgcattgtcatagccttgatattcttataaggtacctngtaatactcctcggatttg

SEQ ID NO: 28215 - DNA, 3507 bp, Arabidopsis thaliana landsberg
  unsure (1)..(3507): unsure at all n locations
acctccttcagcacacgaccacggaccgacggaagggattctctcgaagatctcccaaattccgcaagatcttatccttaatgcccaaaattcaatactcttctaccattaaggctccaatgtttcgactatatatataatagacaattttcatacaagatcgtcatagactcatagtatcatacattacttaaacctaaatattttcttatatataattaattatagtccgcgtagatcatgaagctcgtgtgctttgcggctatagatgtcaaaagtttggatacgttacgggcaagcaacaaaagtttgccaacgtataatacacatactatatagtttctcaaaattcaaaaatgaacaaaaaaggttaatcgtagtattatactattatagaagcatgatgtaaaaatgattaacttagtaaaataataaataatcgattaaatacaattaatatagtctttggtattattcttgcttctaccaaggtaagagttgcaccaatggaaaatacagaagccaaaagaatatataactaatgatgcaaagaatcatatgtaacgtacgcatatatatttgggaagtgattatcataggatttgaatagtatcgtaatgttatacactgtgaccatgacatgcgatacaagcaaaagttgaatttataacagtaactcattgtgagatatgagtggtaagagatggtaatcatagtacaccaagttgactgcacagtgataacatatatatattctcttttcaatatgatcaatgataggttatagttcatatcatatgatgtgtcctatcatcactcatgatatatataatgaaacataaggcacaaatatagttttacatatattccttgaccaatcataaatccattaaaatgtaagttcataggtcattttgtttttaatatacaatgtccttttcgccttaagctaaagtatatttagtttcaaactagaaaccaacttttctttaacgaaaaggaaaaataaacttgaaatggttgaattttggtaaagtagttataatttgaccggtttctctttattagccaaaaataaatgatagtaaggctataaaaggagaaacaaaagtattgaccactcttggagtttacaattggatgttacaacttgaaatgcgcaccagtggaaatgtaactttgaaggagctgtagaacatcttaattgcagctttgattttatagacgacgacactcgagaaatgcaaaatccatcagtggcaaaagattctccaaactttgtgggggcacacgaaaacacttttagtttcatgttctccatcatgtctcacaatactttgttgtagttgtttcctcattgtggtgattctgaggatattcgttttcagcttggtttcttttgatcattgtaccttactttgatccgtcctaattaacttccatttccaaaatagcatgttccacaactatccaactaaaacgtgaccctgcatgattttcatgtaatcattttactgattagctaattcttggatcataccgagaatatcacactaatgctcatgactagttgaacatcttaaaaggccgccaggagctataacatctttaaaatagatttcatatagtcctcggtgtttaaaagacaaaagttcaactagctatacacgcgaggactttatgaaatctatttttttttcttcttcaagttggattctttagtgggttcattgttttcaaatattttctaacatgggactttttgtatcaatcgggttggctaaatttggtctcttttgataatactgcaaaaaaaaagaatatataaaaataggtgagatatttttatacctaaaatggaaagaaaagtataatcgtttagttaatggttcgttatcaaatcccaatagccataattacgatataaagtatagtaattaaatagaattaaacataacatgcccatcccactacctatccacctatatatatatatatatatatatgtatagatacaaatagagacatgtatctctccccaattatgtcatgtgtccatcgccatctcatcttttttttccaactcttataaagagttgcttctctctccccaagtatttgtttcaaaaccgcaaaacctcttcttcaaaatccgaaatctttgtttcaaatctcaattcttgagagattttcttataacaaatactacaaaaatcttttgagtttgaaaaaataatatttcatcattagatttaccctggtttatagggaatatccgatctttcttcttatctatttgggttattttcttcttaggtctttttgtagataagatcaatgaaactcattctgtcttttcacctctattctcgggacataattatgcacgagtcacaaaagatagttttatctttgtttaccacacgggtttaaaaacctaatctgatatcagtcccctacttcacttcttgcatatttttagatctatttctctcttttttcttctctttctctctttcatggagtttgttacagaaacgttaggcaagagaatccatgatccgtacgtggaggaaactaggtgcttaatgattcccggaccaatcattgtcggttccgggccgtcgggactggccacagcggcatgtttaaagtcgagagacatccctagtttgattctagaacgttccacttgcatagcgtcactatggcagcacaaaacatatgatcgtcttcgacttcatctccctaaacatttctgtgagcttccattgatgccttttccttcaagctaccctacttaccctacaaagcaacagttcgtccaataccttgagtcttacgccgaacattttgacctaaagcccgtttttaaccagaccgtggaggaagccaagttcgataggcggtgtgggttatggagggtgaggacaaccggagggaagaaggatgagacaatggagtatgtatcacggtggcttgttgtggcgaccggggagaatgccgaggaggtgatgccggagattgatggaatcccggattttggtggacctatcctccacacaagctcctataagagcggtgaaatatttagtgagaagaagattttggttgtaggatgtggaaactccgggatggaagtttgtttagacctttgcaacttcaatgctcttccttctcttgtggttcgtgactcggtgaggatgaacaaaactcttctcgttaatatatgcaagaacaatgatagatgtttaattagtatagttcttgcattttctcgctctacgtaatttgtcactcttaaaggtttaacactaacatcattggtctctttgtgatcaagtaaccaaatgtttactcttttcttctttcgctttcaaaaaaatccacgcatgtgattatattgattcaggtatcttgtacttttatggattatatnttccnattaacaattacagttttggataattaaagtttatgtctaatgctataggtacaggtattcct

SEQ ID NO: 28216 - DNA, 1525 bp, Arabidopsis thaliana landsberg
  unsure (1)..(1525): unsure at all n locations
tagactgcacaacactgtccgtatctgctatgttttctcaatacgttgaaggttgagtttgagcatccaatttggaatcatatatctagatgtcggaaaactctgaaattcctctgcagattggatccagatgctgttccaattcctatgctgtcctccaaattgattgatgtagccgcatcaaatgaccagtccaaaccttacagtaaatccctctttgagtctctcaactctgggggcgttcttcgtcgttcgtatcagcagtggcttgtagagagcaacgacaaccacacagatgtatccacttttactcggtttttggattcgcttcgcgtattggagaagaaaattctttgcgaaattgttggagcaccatctttcagtgtgttgattcagttgtacaccgaagttattgacaaccattcattcttttggtctggtttggtctcttcttcagatgagtatctattgttttccttttggtcactgataaaatctatcaaaaagatgcacagttttttccctggagaagttcaggtggttctggtaagggtacctttcagttatgccagtttcttttctcaaattatcatactggttactcaataacatcattgcctttcttctgtaggaggaaagcaaaaatattaacaacatagttttgcatggtcaccctgaaaagtctatgctgtgggcttatgggggacatccttccttgccggtatctgcagagctgttccacaagcagcaagagtttctacagctgtgcagcacagtttggccattgaaatcagaatcagatgaacacggtttgatatctaaagcgttcagtactacatgtctgattgtttattagagaaaattaaactgtcttctgatagctgtttttgttggcaggaaatgatcatcttaccaaagccattccattttctggccctgaattatgtttgcttgccttggaaggtaactctaccttatcaatattgctcatttttggtttcattttaagtatatatatttttgtcttcaaccaaggcataattgattgtcatggttaaacttagaagtatatgaaactgaatcataattctttgactgtatagaataccgagaatactgatcgtttgttatcctcttgggatttttttccttatcccaaaaacctcttctgtgaacaacaggcttaacaattttttttatgggaaacctaataacaatttcgtagttgttgagattgtatgattgtgatgtgattcaaattgctgtatttctctgcaggtctttgcatttnnnnnnnnnnnnnnnnnnnnnnnnnnnnnnnnnatgtagctgctgttcagctggatgagatctaccaggtttgttatcttttttttctgctgtgtgtaatgaatgagtctctatctgctactcacaatttcaccatcatcaccagacttttttggagaggctgaaactagagaagaagagactggaggataaaatgggcttcagtgagattgacactactgaaaatataactgct

SEQ ID NO: 28217 - DNA, 1679 bp, Arabidopsis thaliana landsberg
  unsure (1)..(1679): unsure at all n locations
ttgatctgtctgtctgccattgcttacacttggaaccagaagggcggtccaacctgtgcaccaccgaccgtaactctctagcgtaggctcggtcaacgatcataagaaaacacacgagaccatacccacaaagcatcatgttctttaggtttcgtgccatttcgatttcgtaagctaaataacagagattttagaaaggtgaaggtgaatctagtgtggtatagggtatgatatgagatgatgaaaggcaaatgggtttatataaaggtgacgctttttaattttgaggaaatgttgcagagaagctttttattgtctttttttcaaattctaagcaaagcataaatgccagaagtgtttcagttttggaatctcatgtgacttgcttcttctgtcaatggcttttgttctttgcttcagaatctttgtgttatattttattattacttttcggataaagattttcaagaacgaagagagatatcacaaaaacatcaaattaaaagactaagatcttcttcatgccaaaaaaaaaggccaacactaatctgagattttgggattactagagaacaacatacactttaatacttttatagaccaaacaaaagtattaatacaacaattttaatattttcccaaattagatcaatcatataacaatctgctccttttgatccttcctctgttcagcaacatcatcaaaacaccaatcttaagaatttgaagatcaaaaaactgatcaagaatggtaagtttagttatctccacaataattaatccatcattagtgcaaaagccgcgatggttgcgaaaacaaaggacatcgagacactgataccgcgtctatgccctgagctcttcttggggaaatgtttaggaagcgcacannnnnnnnnnnnnnnnnnnagctttgttgggaaaccgtcgccttcgggaatattcagtcctttgatgtttttcttggtgaaggagatgacagattgttgctttccgggcacgggagggtctcttaatggatttgttccattaacttgacctacaagatagttcataccaggcaagccttggaagataacggttcgattgcttggtggaacacgtgttccattaaaggagtaaacgttttcatatcctggacctgcctttcccatatcaatcgccacaaaccaatcctcaaacgcgaaatctctccaattaaaaacggttaaccttgcggtccaaccatttttgtaatccgtgctaacgtgccagttaatgctgactccgcagttatctggacaaggaagtttctttggtactggcatgtgattttgtttagcccaagatttagcttttaaggttcggttatcgaacggaacaaggagagcgtcaggagggaggaggagcgggttactgttagcattgcaagtgtcggtatcgatgtcattgcatccgcaagcacaagtgttgcaaggaactgcagagttgttgtaaaatgcagagaaagagacacaacatcttgaggcttgggctttgggcttggttatgttgcagaccacctgccagctggagatggcgtaggttacagccagtagaccgctaggatcagggaattgagacgggtcaacacgaaccggtggcccgcatttgtactgaggattgagaacaccgtcgattttccaatgttgaggtgggta

SEQ ID NO: 28218 - DNA, 1696 bp, Arabidopsis thaliana landsberg
  unsure (1)..(1696): unsure at all n locations
cggcttgttatctgaagctgttcacacttatgtgttttaaccaataaaacatatacacgtgtcaaaacacttgcatcgtcatcgagcttcgtctacacaatcgaggaagaagcaaaaggaagacgaagagagattcgatttctctggatttttcaaaaatgtttctccaatcgcaaaaactatggacgatgcttctaattctagcgatttggtcaccaatttcacactcgcttcacttcgatctacactcaggtcgcacaaagtgtatcgccgaagacatcaaaagcaattcaatgactgttggtaaatacaacatcgataatcctcacgaaggtcaagctttaccacaaactcacaaaatttccgtcaaggtaaacacagatctttctaattttgacctaatttgttaaaattttgtccatagatctgagttttggttatgtgtgaaggtgacgtctaattccgggaacaattaccatcacgcggaacaagtagattcaggacaattcgcattctcggctgttgaagcaggtgattacatggcttgtttcactgctgttgatcataagcctgaggtttcgttgagtattgactttgagtggaagactggtgttcaatctaaaagctgggctaatgttgctaagaagagccaagtcgaagtaagttcaatttctcttctctttgtgttgatgtgtgattcattctctcattgtggtttagttttaaacggtttagattaagaaattttcgannnnnnnnnnnnnnnnnnnnnnnnnnnnnnnnnnnntgttaggctggttacaatgttgatcctccatgtgtgttcttgtgatcagttttaagaaagtgagttcaatttctcttctctttgtgtggattatgagaagctggtctgattataagaatagataaacgaaattttcacagcttgagtcttgagacatgtagtagcgaaattgttgaagctagtggctggttactatgttgatcctccatgtgtgttgttgttaacttgctatgcatttttgtggcaggttatggaatttgaagtaaagagtcttcttgatactgttaactcgattcatgaagagatgtattatcttagagataggtaaaaagtctttgtcttttgctactctattgtttggtattatgaagatttgttcatatcagttgagttggtgtggtctcagggaagaagagatgcaagatctgaacaggtccactaacacgaaaatggcgtggttgagtgtgctctcgtttttcgtctgcataggagtggcagggatgcagtttttgcacttgaagacgtttttcgagaagaagaaggttatctgaaactctactacggggttggttacgctctttctgttttcttagcccaaacaatcaatcttctcttcttttgggtgttgtacattagatcaatggctatgactctgttctctgagacttgggaattttatttgtgtggctttatttgcttttttccaagataagtttagtttttgcttagatttgttgctcctttatgatactttgatggattaaagtcaaataaattgtgtgtggctgaggttgtagattttacagcttatttcaatcagaaccaattattggactcactgtcatctttctactatatatggaaccatgttattgcatattgtgcaaatataaatttggatgccggcac

SEQ ID NO: 28219 - DNA, 1581 bp, Arabidopsis thaliana landsberg
  unsure (1)..(1581): unsure at all n locations
catcctgataaagttgataatgtagatctgtcacctaacgaagagacaacaaaagacaatagttcccagataaaaaactgtttttggttaggtgtacagttattgtttggtgtactagcttagtaattggtgtacaactgaatgtgtgatctcattgtgttctatactagcagggaatagaatatgataacgaatttgaatctggttatgattcaccctttgctgaacataatgcacttgccattgttccctccggtttagagattggacatgaagaaacatgtaagggtttagagaatagaaatgaagaggtaagtccacagctacattattcagtgagtattaaaaggtaccattgtctcttagattaaaatgattttggacatgaaaatttggctcctgaagagttggttaatgactgtaagactcctgaagagatggtaaatgactgtaagagagtgtcttgtgcttcggagtttgtcaagggaggggagtatacaagtgatcccaagttaaaagctctgtttgcaagcaaagaaaaaaaacccagtataccaccccatgtccagtgtaaacttgaaggagtttgacgagctcagataactgatggtggacaatgaggagctgtaagttctatgattaaaagtgtagctattttttttaaggctatctaacaaaacgttcgtttttacaggatttttaagattgtaactgaattcatcttctgctatcggctgttcctggacatagctgaggccaacaaacctttggaaactgaggtaaagaacgtgtacactaaaacctcttgaatacttatgatgaacaccatacatgatagtatcgcacatggtgcaattggtaaacagcatgtgcaggtaataatggctatgttgtggcgcagaaggcatggtttgtacaacacggcatgagctgttttcattgatacatggtttctgacccttctaaatgagaagtacacagatttcaaagcctgcaagaataagaggaagtctcaattggggagtgaacataaaagcgtttgttacaggcagggcaaaaggacgggcaccaacaacttttctacaatatgctcacctggtgtacatccctatgaaatggtacacctcacactgggtaagtctggtaattaacttgaggctgcatacggttcaggtctttgaccctttaattgaagcaacgtcggacgaggaagtacaaggtttgatggcgcctgttttagagatgattccatggttggttaaagaggttgtaggtaagaagtatacaaagaacttctcaacaaagccactaacattggagagggttataggagtataccataaccagagaggaggtgacgatggaccccttgcaacaaaatacattgaaatgcactcgtttgggcttgacatagatgatatgggtgagtatacgaaggaggtgtcgacgagttaaggaaatgttacgcgctggatgcatacgctgagttcattgagagtgcttaagctacaaaaacttgactggagttgcaaatgaatctaaagttctttngtttaccttctttaaaatgtaatcgagaca

SEQ ID NO: 28220 - DNA, 1802 bp, Arabidopsis thaliana landsberg
atgtatggaaccatcaatatgaattgatccataaaactttttattatgttttatcatatgagcatgtgattttgcatgtaactttaatctctctccctttttttcttctttttttcttttaagtggttgaggagttttaattttgtttggttttatatgtgtttttattcatataaatttattgcatttcaaatttgtcacaattgtttttagaaatattaatggtatttacgatctcagcttggatgagtgaaacaactacgtgacttgatacatgcaaatttggatcctgttaaaactgatcgacaaaatttctatctttaatgctttaattctgtttttgttatgcgttgaccattttaccactaattaggtgtggaatccgaaagttttgttcggacggaagcattattgctattgatggaaaaaaaactgttgggtttaattatgtttacctataatatattattttgttaaattcatgctgtttttgtttcaaaatattaaaaataaagataatgattactgaattttgctcagaatgactctaattttgaaagaaataactattttaactcatgtcctagatgatttactacaatgactcacattttaagttaaatgactaattaaccttgtttagttataattctttgtttttattttaataataatattaaaaaactctcaatcccaaataacaaaaataaggaactcgtcgctttaggttctccacttgccgcattaggctttgcatgtctcttcttcaccgatttttaatcaaaattccagcaaacctgtaattgaattcgccgttttagaaggcagctttccgagtagtaatcatctcttctccggtggtggcgttgctgcttcttctcactcaatcgagggatacttcttctccggtggtgattgcgttgtgggttccggctacacaaacggctgtgaggagttcgcctcttctccggtttcacctgcggcggtgaacagcggtgggcattcgtgtccgacggtttagggttcttcccattcatcgttaataactgttgggttctttttttaattggattcgatataggtaaattcagagtcaatcagatgtgaaatcagctttagattcatcccttttccaattgaagattgtgaaatcgactctcgactaatgaaaattggttttggtttgttgtatatctacatgttcttcttctccggccacacaaccgtcggcgaattggtgtttctctcaatcaggtaggccggtttctctccactagtggtggcagtttctctccactagtggaggcagtttctcttctcgacattggttataggtaaacacaattagattttgattgatgtgaaagtggatttacattcactacaaaaactgtgtttacattcgttataggtaaacgcagtttctctcaatcaggtctgacttggtctttttctaaagtttactgaaagtggatttatatgggctgcccagaaagttcatttcttcctcacgaatcagttgcgagtcgacaacatgcatgagatgtggtgtttgattgatcgcaggccaataagattttcgctctacgagtttgagaacataacgggcctcaattgcaatatgtttgaaaattctgacactggtgaaactgattacaaagagttctggaatgaaatgggggtagcaacgtctgttggtccattgtttacagagttggaacgtgtatttgagattagcaagacatggcgtttggagaagagaatgatggttggtagattatgtttaatatctgttggagtcc

SEQ ID NO: 28221 - DNA, 901 bp, Arabidopsis thaliana landsberg
tgaacgagcatccatatgaataaatgtcgcaaaactatacattacataattgtataataattaaacattggtaagtgtaggcatgtattgcttacatttaaccctcttaagatcagtataatactttcttttcccaacaaaattgctagaaaaaacttaacccaaaagatttcagcgctttatccagtcaatgaaagtagtatccactaaaacactcttataaagcttgcataaaggtttaatgtcattttctgccttttgttttacacctgaagtagtcgatccaattttaaactcgctctcattcgcattgcttgcacgtctcgaattggtaaatgttattaacaaattattaacattctcctcatcattcgaagtaataatattatggagattcatgaacttagagtagaatcccttcatggctttatcatcatatatcaactctccaaggcattcatagccacaactggagtccccaaccaacatgcctaatgactcagggtaacttgattcggagaactctgaggggacatcgcattgatcctgatgatatcagtgttggtccgtttattagactttctcggcagtatagtgttatagatggagttagacctagtgaccagaacccaatgagccaatggagagcggattttgttaaaacccataggaagagtctatgttctccacatgtgctgatggagaagtgtacttcaatgggatagaattatgacggactaacgatggagatgagctcactggaaaaatagagtaatagacatggacggttgagtcattgatcatggtttgtatttggagtgcagaaatgaatcacgaaagatgagtaaagatcaacagagccattgagttatggaacgacgatgatgaaagtaagctctac

SEQ ID NO: 28222 - DNA, 1799 bp, Arabidopsis thaliana landsberg
aaattatgtattaaaaacactcccgtctgcgagctgcattaagaaaaaacagagcaaaacttactcattttgtttttgtgtatagtccattggattggatgagccgttaaaagaaattatacctgtcatgtgtatttccttaatttgcgttttgcctgaaacttgccaagcttgtctctccactcagctacaaaagcaaaaccaaacaagatattcaacattggttcttcttgacacaagaacctaagaaaattctagtagttgatcaggaccaagatcactaccaaatagggagggtgagagagactaagcttaccggcttcatcataccgttcttcatcaacagcttgcatcatgttccttactagatcgaactcttttgtatcaaaacaaggctgaccatttggcctacacaaggaaaacataatgtttttaagttttgtaattttcaaattcgccagcaaagggtttcagatgactaaattcacaagcgttaccggtctagttcagtaaacaataaaccatcagaagcaggtgtttgctttgatagctttccggaatcgatgactctcattccatcactataagctagatacttgttgacttgaataggtacctaaagagtgaggattaaaaccatttttcatagtgatcacgtagtttgtatccggttaagatgatctcatggagaggcctctgtgtgactgtgcccctacaaaagaaagaattgagcatatggtaatataactataccttgcatctaacagctatattaattgcatcagaaggacgaagatcgaagctgacacaatccgacttatcccccacctgcaattccattcatagcagatttagtaaaagtttaaaacagatggaagtgagatactagtaatggataacgagtttcgggacaactttttgaaaaaatgaatggaagatgcatttctatgccagaagttacaaacctttgaaaggtataactctgcgaaatatgcctcgtgaactcttgtggtaactctaacaagcctaacctgcagaaaaagttggtgtttggtaacgttactcacataagaatttgtattgctaaagggaaaataacaggatagagaaaacagaaaaaccgaaaggcgtacctcataacccattttgtctaccatgtccttcaccacttgatacatagtgggccttgcctacaagcagtaaccaaaaaaaatccataaaccctctcttcacaactcttgactgattcaaacagaagcataacgcaaagaataacagaagccctactatttgaacatttgactctgctgccataagtaacacactaggcatttgcactgctttaaacaaaaaacaaagaaaggagattcaaaacacaaggcaaattggaaatctcaacacacataaacaaaagaatgagttttgatatcacatacagacgataatggggagaagaagaccagttccatcttccattttcagcacaattgcagaatgtggagcataatttggaagattccctccttgaggattattgtggacacatcgaagttgcctcccatccttcatcttcaccatgaaaccatctggtccactttttacctcaacttatatacaaaaccaacaagagaacatcgatgattagaatcaaaacacaagaagaatagagagaactaatggtataaatacagatttaaccaggattaccagcttccaatacactagacttgacataatcctcatcgttctcgttgaaattctctgctgtgcttcccgtaccatcagagtgcgagctgaaa

SEQ ID NO: 28223 - DNA, 469 bp, Arabidopsis thaliana landsberg
atgattgctttggttcgtctctctggttcgaaagggaatgctacgagaggcctagaaatcctcgccgctatggaaaagcttaagtatgacattcgtcaagcttggctcattcttgttggtattctctcttactactaagactatgtgttagaatcaaatggttgttgcttgtgtctaccaggattgaggttactgagtaatcgtttataatttgattgtggtcttttatagaggagctcatgaggatcaatcacttggaagatgcgaataaagttttcttgaagggtgcaagaggtgggatgagagcaacagatcagctttatgatttgatgattgaagaagattgcaaagctggagatcattctaatgccttagacatctcttacgaaatggaggcagctggtagaatggccacaacatttcatctcaactgtttttttagtgtgcaggtttgttatgttttttttta

SEQ ID NO: 28224 - DNA, 2080 bp, Arabidopsis thaliana landsberg
  unsure (1)..(2080): unsure at all n locations
atagtatatcctctccttctttgagattatatattttttttttttacatgaaaaagtatgtttctgtttcgggcctgtttcctttttgtagtcttatgatttacaatttaaaaaaaaaattatgatacagatcttgataactagatatcatgaatctgtaatctgttttactctctagtctctagctacagattctgtaaattagaacctctttttttatccaatatctttcaataactggtatgtctaagacttgcnnnnnnnnnnnnnnnnnnnnnnnnnnnaataactttgaactgtatagtgatgaaattaacgttttgagatactaacatgttgggatcatagttttggttcaagctttcgggttaaggctctgaatcggatcgatgaaattaacgttttgagatactaacatgtttcttatatacagactgatgttgggggagttcctgcagaagtaatacttgaaaaatcatccatggaagtacaaaaggtaaacctgagtactgttcttgatgatgagatcacaagtggcgccgatcgtggaaacaatattattacgggagaagcagatgttgcagaggttgtaaatggttcaggtaatggagcaagaaactgccacacattcaaaatgtttcagattctttaaaagcatggaaatttgtactcaatactgttttatacgatcaggggataaagaaaccgaagaattaaaacgcgaaaatggagaagcgacaaagactatctcggttctagatggcagtaagatcgttaaagatgatcaagaatctattgtcgttcgtgaacctcaaagcctcaacgaaaaaaaagaagatgagaagataatcttaagtgatgtgactttagagaataagaaagaagaggatactaccggaaagccagaagaggtatttgtttaagttccttgaagtttaagcaatagagatgtactgagatagagagtataatttaatgacttttttggtttacgcaggttagtgtcgaaaagccggtaatagaagaagatcaaacagaagcaaaacactcactagaacaagaagaggatattggtaacatctctaaggtattgactgataccacacctgttaaagtcgatgaatacgatatagagaagagcttgaactcggtatgtttttcaatttatgttgctcctattaaatgaactaagaaatggtactctattgcaggtatgtgaagagataccgataaagactgatgaagtaagagaagaaacagattcaagaactgttgagacctctgtaaatggaacagaggctgagcacaatgcaacggtttcagtagaagaaatctcgaggaacggtgacaacactgtgaatgaaacagtttcagaagatcaaaccgcgacagatggtgaaccactacatgatgttgaaactataaaaagagaagcagaaccgttttataagacagttgttgaagatgcttaagatcgtgaatactgaagaaactacagctcatgaatctaaaatctttgaggaagataatcatcaagaggagtatgcagaatcggtagaagcaaccaaaaactcagacgcagcagagcaaagctcacgtgaagtgactgtagacaaagaaaaggaagaggacataatccaaaacatagaagaggtcttgtcttagtttctcgaagctaaagattatatttgagcaaaacatgtttcagactaccttgttgacacaatttgattctttactttgcaggtgcaagaaagtcctagtgtaatggaatcaccgacaatacaaggagaggacattgaatcaaaggcttcattagaccatgaggaagagatggataaaatcacaaaggatactgaggaacaagaacatgtgttagtgagagacgtaccagtaccacaaagtgagacacttgtaacggaagctaagactgcagagactttttcagtccaagaagctgagatcttgaagaccaatattaatgaatcagaggcacatagtgccataggtggagaagaagacggtcaagagacaaaggaaaacacagaaccgagtaaagatctgaaagacgataaagagc

SEQ ID NO: 28225 - DNA, 3043 bp, Arabidopsis thaliana landsberg
tgccgatggcaccttaaacaagttcaaggctcgaatagtggttaaaggttttctccaagaagaaggaatcgaggatctcgagacctatagtccagtagttcacacacctactatgaggctagttctgcacttagcaacagctctaaatagggccattaagcagatggatgtgaagaacgcattcctgcatggagatctcaaggaaactgtttacatgactcagccagctggttttgttgaccctagcaaaccggatcatgtctgcttgcttcacaaatcaatatatggtctcaagcagtccctaagagcttggtttgacaagtttagtacctttctgctggaatttggctttttctgcagtaagtctgatccatctctgttcatatacgctcacaacaacaacctgattctacttctcctgtatgttgatgacatggtgatcactggtaacagctcacagaccctaacaagccttcttgcagcactcaacaaagagttcagaatgactgacatgggccagcttcactactttttgggaatccaggttcaaagacaacaacatggcttgttcatgtctcagcagaaatatgctgaggacctcctgattgcagcgtctatggaacactgcactcctctgccaacccctcttcctgttcaacttgacagagtgccacatcaagaagaactcttcagtgatccgacttacttcaggagtattgcaggaaagctccagtatctcacattgacaagacctgatatacaattcgcagtcaactttgtgtgccaaaagatgcaccagacaactatatcagactttcatcttctcaagcggattctcagatacattaaaggcaccattgcaatggaatctcctacagtagtgactctcctactctcttgcaggcttacagtgacagcgattggggaaactgtaagcaaacgcgacgatcagttggtggtctctgtacattcatgggcacaaatcttgtctcatggtcctcaaagaagcatccgactgtatcacgcagctcaactgaagcagaatacagaaccttgagtgatgccgcatcagaaattctttggctaagcacacttctccgcgagcttggaatacctcttcccgacacactggagctgttctgtgacaatttgtctgtcgtttatctcactgctaatccgacattccatgccagaacaaagcactttgacattgattttcattttgtcacggaacgagtggctctgaaagctttggtggtgaaacatattcctggctctgagcaaattgcagatatcttcacgaagtcacttccttatgaagcgttcatacatttgcgaggcaaactcggtgttactcttccgcccagaccaagtttgagggggactatcaacaccattcaagtgaagcctcgacaaaactttgtcgtttcatcaaactcagcaaagaagcaaatgaaagcccaatgcaagcccaagaagcccacaactcaagtttggaagcaacggtcttctgcgacaaagacagaaactccagaagcttcaccaagtcacgacaagaacagagctggcacaacttcacctaatgcttgtacggaaaaggcattcaacatcaagttggagaatcggtttctgacccttgattcagagatcccagcttgatgtctgccacctgtcttgtctccctagggttttagcaagtctcagacattgtatataaacaagtttatcatgtcttgtaaccttcaagctttatcaatgaaaacagagtattgattttgccttcaaactgcatattttttgtaagaaataagaaaaaaaattcatttcttaagagttaagaacaagaagacaatatttggagaaatattctgtttatatattctgtttttaattgttaaccttgtaacctatttacgacaaaaatagagaagatctattggttttaatcagcagaatctagcaagaaactagattgattaccattatacgagattacaagaattgacttcaatgcaaaacttaatttgtaaatttgtaattcagctaaaggtagttggtcggtaggtttgacacagaacatataacctaatttttatatgactatggttttgcctatgcgatctctacagcttcattgattaacttgaaaactagttctaaactttttcacaaaataccaacactgagactaatcaatcacatcaaatctagagcagcataagtattgaatatcggtttaatttaaacaaatttctctaaatatacaagttaaatgtctgaaaataaactttgtttaaactttaagaaaaataaataaatggcttcttaattaatctatgcgaaaaatcgcctttaaatttccttggaaacataagtatatattgtgcatcggtttaatttaaaaaaattaccaaaagaggaaagctgaaaaccaaaaccctaaaattagattaagagccacgttatcctaaaagatcaaatgataacataacattgagagccacctgctgccgttttcttcggcgaccaacgatgacgatgccgaatcttccaaaggagttggtagaggagattctcagctttgttccggccacatatctgaaacgtttgagcgctacttgcaaaccatggaaccgtttgatccacaacgacaagagattcgcgagaaagcactacgataacgccgcaaaggagtttctggttttcatgatgaggaagaacttcaggattattcggagaggcgtcaatctccatggagctgatccatctgcagaggtgaaaggtgaacttaccctaccagatccgtattttaagaactcagctgatgaattccatatagatagagtctttcactgtgacggcctattgttatgcacctccaaactcgaacgtagaatggttgtttggaacccgttaactggtgaaaccaagtggatccaaacccacgaagaaggcgacaatttttttcccggatactcccaagaagacaagaacatatcaagcaaaaagagctacaaaatcatggggttttatcgtagtggta

SEQ ID NO: 28226 - DNA, 1477 bp, Arabidopsis thaliana landsberg
tttatatctagtcaaaaattaagaatggaatagtcatctctaaaacacttatgagtgtaaaatgaattatgaagtcaagattttgagtatttcatataagtacgattgaattaattatgtacgaatgtagagtgcatttatagactatgcttttaaaaagcataataccttttgttattgttttagctctttttctttttggtaaaccttagtggtcacggtatctcttttaaagcttataaccaccatgtaacttggcagagaaaaacatactttagaaaagaccatatataatatacgtttagaactcattaaatagaagtctgcctatttattctctaaacaaatattaaaatgatttaaacgtcaccaacgatatttatcgcaaaagtggtaaatttctgtcaattaaaatgtatttttgaaaaaaaagtagaaaaatgttattaaaataaaataaattcattgaagaattttttgaacaagtttagattatggcaatctgttctttacctcattgtcatcaaaaccatatctcttaatttatttttttgtcaggatcataagagcattatacgctaattgaatagcgattgatgagtttcttatcaacacattttgcagttatgcgaatcgttgaaccaaacttgtcgtatctttgctgatattcagaaattattatcttacaaaagaaatgggtgggcatgtccatctctctgtgaacaagaattctccacgttcactaaaatctaaaaatccgaaaagcaattgaaaacgatttgtagagaataataataattaagaacaaaaaaaaaagaattatcaagaagaagaagaatcgagttctttgaatcgcgtcacatgtttatatataaaaaggcttctctgacctgttcagcatggtccaaatattcacttgtcaacttcttaggccatttctagtatttcttgagtgaacgaaaccctaattaacctctttttgtttaaatataaactaaaatatatgaaataagtcttttatgagataatcattgaaatatatataaaaatcgaatttagttgttctgacaaaacttgaaatttatcctttaatcaaaaacaaagagactacttgctacatttgtgagataatcttaatggtataatacaaacgatcatatattctcaaatgttattatctttaactaaaaaatattaaaatcatactattagtgttctgtatatacgtgtcttatgttaacgtatcttttcaatttattttagttagaactttgtagtttgtacacttgttcaatattttctgctgtttttattattactttttcttcttttttgtctcttttgattcttttatattgaagtcttgcctaactctcccaacacgtgtacaattcacacggacgggaaaatgcattccacgcgttgtctgattaatactcttttgttcataaaaacttttaatgccatttgttttact

SEQ ID NO: 28227 - DNA, 1368 bp, Arabidopsis thaliana landsberg
agatgtaccggccgattacacctcgtacccgatccaaaaattatgtgatatattatcatcattgatgatataatttactattgattgtttcacactttcactgtatgacactatttattctattacccggtttaatgcattatgcatggatcccaacgttactagaaatatccaaaaaataacaaaagaaagaagaaaaaaaaatccaatccaagatacccaacatacatggccctaacatttctttacacaaaatggacaactcctctttaagatatttaagtacccaaagaaccctaaccaaaagaagaaaacttggacaataatttggactcgtaggccatagtactcaaatacaatttactgtattgactttctgtttgttccaaacttccaattatcaacattttctctgaatgttccgaatttttagctgtgtatagagagatgaaaaaaaatcaattatggcattccctttcagattgaatacttaagaattcattaaaaatgtcgatctatattacttctagactctgtagaaatgatataacgtatcaataacaataacaataacaacaataatggtaaaacagacctctccctcttttatctctgtatctctctcacacacacgcacacaaaactgctgagtcttgatcatcttcaatttcaagatgaagatgattcttcttctgcgcttccttgtgctgtggcttcttctccttcagcttcaaggggcttttctggtccaggtccagctgatactttcaccattgaaggacgtaaaagcctttcacctagcaagaaacctttcctgtattcttctagtactataccctcttcgtattccgcagagtcttctctcattattgcctcatgtagcttttttcacacaacaacgagaaaagcaaaaggataaaaaagagatgtcagctgttagggacttgaaaagaccaacaaacaaaaggatatctaccaactcattgtcatttaaacccaacttgcaaaagtaacaaccacatcttacatctaaagtctccaaaactttagcagattcatgcttaggactagacgcataagtggttatgtatttcaagctttgcgataaccaaaaggcatctaactgagataagtgatcctaaacctcaaagatttattgatcatttgcatcacaaaagtatcattcagcataatttgttccatccatctgatgtagctaactttcaaagtaacaaccatatctacgttctgctcaagattattccggcagccctatagcaacgaattatcctaacttccaaaacaactttgattttaaagatcacgtccatagttaaaaattaaaaccaccagcaagctgagcaacaa

SEQ ID NO: 28228 - DNA, 1756 bp, Arabidopsis thaliana landsberg
tcgtttattattgtcttgtattccaaaaatcaaaatattttggacacttagattattatattattactatgtatttaaattgtgggtatgtttggatacaagtttgggtttgagtttggattcaatttagattcaatcgggttttggacgggtgatcggattcggatattatgcccaccctagcctggttgccttccatatatccgttggcacatgtatcacagtatcaatacttgtagccattattttatttttttccatttgtgatattattacatattatattctcacctgatgaattttaatctttaaaactggaaacaccacaatcgaaacctttaattattggaaacattacaatcgacaacttaaattaagttaaacgtactatcacatggaatgccttttagcaatatagatctttaccaggattcaccccaaaccacttgcagatctccaagtattggttaatcctgttctgcatagcctcagcattccaactcataccaccacactctatgccattgatcctcatcgtggtcgctccaaatcctagtcttagtgatggaccaacttcggtcttccaaaaccacattgcaaatttgaaagccacttccggactacgagccaccatatctggatctttcaatagagggaggccaaggtactttcccgcctcaccatagaactcgttccatttgattgactgcaagagaccgcgaccatagtacttctttcccgattgacaagggtatgtcttgcttgacgagcaatatgtctcactcgttacttcttctttgtaacaaaaatctgtacatgaaaaaaatggattagtccaatggcattggctcagctactcgaatgtgtcacattaattaattaagataacacaatttcttaacattattatacattttaagaaaaaataaattaatggttagtatagtaactaacttacttccagattcgtaagagaactgagccaatatggccgcaatctcgcgtttagctaccgttcccttgtagccttcgaaagatttgactgctgtgatgaaagcctcacgggtgtagaaaccttttcccgtgcaattacttccgactttacgcatgagtctgtggaataatgcaggtgtaacaatgctttcgatcttcccgcgtgggccatcattgagcctgtaagagctggaactcttagaaagttggcaaggggccgctgaggcaccaaaagccgcagtgctctacattggtgccgcagtaacccgtatggctacaacactctttaatgccaggacaaccaatggtgaggcagttctgagaggtagcggtctgggcgatgacgactaaggtgaagaggaaaatgatgagagagtttttctgaatcttgttttgtgttgccatattttctatatttgaaggaagggggtgaagagatgatgatggtttgtgaacgtctttgtagtgaaacattggtcagtttgaagtcgctttggtcaaatatgtaattagtcttaatttactattactatagtctatagtcctttaattaaacacgtatagaatttttttgaacaaatttgaaaatacaatttaaaatacttggtttcattgtgctatttgatggagaccagagaggccacagtagatattcattgttaacaaaaaatgtaagactctaggatactatgccaactgacaccttcaccgaaaaaacgagaatggacagtcgtctctgttatgtgacgatccagagcatctt

SEQ ID NO: 28229 - DNA, 3633 bp, Arabidopsis thaliana landsberg
tcatatagtattgagatatatacaagtgatcaccatcgcaatacatgtgattacagtaaaggttttaaactttcaagtaactaatcgtatttcgaacaaaatggatattgaatctaggctttctgactatctctacaatatcagataaaattttctctgtttttacgttccacgattaaaaagtgatcgtatttttcattaccgatatagtttactcgtccatcgagattaaccggttatgttttgttcaatatattattagttaagtgtttgattagtttgtaatccgtaaacactaaacatttgtcgttccatcaaatcagaactaaacttcatataacagttaacatgtaatgatcctcaacaatacaaattaattttacatttttttttttgtcgaaatcaatacaaattaattacaatcaaatgatttcctatagaaggcgagaagaggaggaattctggtggcagatgttccaaccacatattatattgtatgatgaaatggagaacaaccacataaaaaaagaggataaggactaaaataagatcttatgatcctttaggatgagaacttaaagccaaactagcaatgttgcatctagctcaagtatttttttgggagcaaattttgcatctcaagtttaagtacttaaatgcttaaaaaagcttcacgttctctacatggtttagaaacatgcgaaaatacttaaacgcttctaatcctcggattccaactcttttgatcgtgtttctatcgatattgtagtagataaacgcaaagaggctcatctgggcggaacaacacaatttcacttgtaccaatcatctcctgcaaagtataacctggtatttgcaactgcatccttccacaaaggaggcaataagtatacatgcttcgaccattcatgttttacggtgtcttcgagaacccacaactcaaaacttctacatattccactgatagttttgtgagcctcttgtcccatcagcatacctaatttaccattattgtaatttatcagagtagttgtataagatagttctctatagacttccataaaattgaacatctcagacctaatatcaaaacaaacaactgccctagtaggccatgaagagccgttgaccatagctaggtaatacaaaacaccattgatgcatatctcactatttttaagaggatgttggtagtttaagcaacatttgatcattctccatgacagctttccagttcctagtgttagaacttgatacccctcacacttgggatgtttctcatatgacatgttcatggaaagtactttgtattgtttctcaatcggatcataccccaaaaagctcgtcaccgtatagatcttcttcctgttcatattcgttttgggtaaagttaaggattctcccgtgctagggttatatataatcgacacatcgactggccttatccttccttttaagatccgctcacctctaagagagaccaagccgttgattggaggacccaagtcacgggatttagggacatgtgtaagaggataagcagctataggagacgagttctcatcaagattctgaggctgatttgaggagaagaagaagtacccattgtcgtttgcgcatgcgaacaagagctgcgggcgagaagaagattttgtcaagaacaactctgtgaaatcttgacggccaagtacgtaagtccagaacttggatacgctacggcatgttgctatggatttcacaggtaacttcaagaatatctcgataaggagatctattgggatgtggccattgagtgaggtctttgatcgcttattgcgtcgagacagggttactcgatcctccgaaacgttatgcagctgccgtgatctcatggtggaaagagacactccaataaaccctagagtctcccctacgttagaacaaattaaagtaaaacaaaaagatggtgactttttataactttagttatttagttaaggaaaaacacatctagcccaatagggcccgtacgtattagagcctttattaaagctgatattttgtggtgatgacgactatggaaaatcagaagatatcaaacaaacaaaaagacaactaaggaaaaactgaaacatgaattcacatcacaatactatatatgattcatatgtaaaaatatagtgatatgttgtggagacacaaaccaaaccaggagaaagggttctaggatggatcatgaagatgttaccaggagagccgtcgaaaagaagaacaagctagcttcgttcgttaatacatgcaccatttgccatttggtagtaaaacctttctattcaatcgaaacagcattttattatgtattgggcccataggcttcttaacaaaatatcaaattttacccagatttagtgggctttgttgggcttttgtgtatcagaagctcatttataaacaaacatacactgatacacacgcgagaaactacaaggttccagcaaggttccagttaccagatcctttgttaactcagattcttaatcatcttcccacagaggaagctgtgaagacaagcgttttatccaccagatggagaactctctggctttgggttcataatttggaattgtcattttcgaagttctcaagtttcaatgcctttttgagttttggtaactggtttttcgattccgatagagtttcatgcatagagagcctcaagttatctttagatggaaatgatgcatcctatctcaaaccatggattgatgcctttgttaagcgtaagatccaacgtctacatgttcgtcttactcaagggtgtgagatgccactaagcctttacgtttgtgagacattggtatctctcaaactctataggctgaacttggttgatcctgagtttgtttcattaccttgtctaaagatcttgctgttggatatgggcttcgccccaccaacatgattaaaggcccaacatatcacgactagcaacgttggacgagagaagagaggatcggcccgtctgaagaagtaatggcccagcaccaaacgaagcccaccttcagggagttattgatcaggaaagagtcccacatcgggaagaaaactgtactatgtactgtccttgcagtactataaatacggacatgagaatgtcagaaaaagacacctgaaatctgcagaaaaaagcaatagaaacttctcattcggattcagaaacataagtccaactttgacttgtgaagttcatattttcgttgtaccaccttaatcgaggctcggctgtagagataatcctgtagacagccggacatcgagttatattaataaagatcttcctttaggctcatttttcccttctttaatttggaggttcggttttgtacaccaacaacttttgagagacttgtctcgtcctgccctgtcctggaggagttaaagattgatgtagtatggatggatggacgagtctatcgggtgcactctcggtcactgaagaggttctgtttccgacgaacttgttttctccagtttgaatctgttcctggagttgtgattgatgctcctctactgatgattgtgaatcaaaaagctttatactaactgatttggagtccgatgccaagtgggttcgatatttctccaccgttttca

SEQ ID NO: 28230 - DNA, 1673 bp, Arabidopsis thaliana landsberg
taaaattacattggtcttataaacgttttgtattttttctgcgtcttataactatgatatgtgtagacatatatttctgcggaaaacatccaaattcctgctgaaacattacgaaattttgtgacatacattctgttgaaatttctcaaccaacttgtgacaaatttatgacaaaactttaaatctgttgaaaattccagacaaaaataaatagtcaaaatgtatgtcgcaaatttttcgatgaacaaaagatgtcaagaaagaatcgtcaactgggcttctccaagaacatatctacttgggcctataactctttaaaaggtccatctgttaacttagcccacatacgaaattgagtcttatgactcattaaggtatataatatacctttgttttttgggcaaaggtatataatattaccaaattctaaaaccgatcggatatttagaattatatttcaagtaatccaaatacataacggttcccgtatcgattccaattctataaagtttcatttgtcaccactagttactatctcttctcaattggagtttgactctatagatgtagaaaacggactaccggagtttggacccagtccttgtggcccggccgacaaaaaaaaaaaaaactcactttagaatacacagacacattttccttcagtctttcattttttccgccaatcctccaatacaaaccatggcaggtggtccgaatacggacatttgcttgtctaaataaaactataaagtacagataaaaaataaaaaagtaattgtattacgtcattacgtgatctagtgtgtgtcctaattgcatcatcaatgataacatcatacgcaatcactcgtcgtcttggcatttctcataaaacaaaaattcgagacctcctctccacttcgaaattgcattttttttttctcaacagagaaaatttggctcttatgcacctgtcgtgtgaatcctgatctcgctttagattgtggaagcctgcgacacatttcccatttttaattcggcttattcttcttcttcctttagcttttggggatatttcaccatcctcgttgaaatcagtgtgatcttcttcgtatacaatgaggaaaatgagatcgaaatggttaggtttaagatctgtaaccatcttcttaatcaatttctctctagcttttgctttcgtttccgctgagagaagaggaaaatctctgaggttaagtacagacgaaacgcgggaaaatgaatcaagtttcttccttaaagctatcaattttctatgggaatctgatcaaataggttatcgtcatgtttggcctgtaagtatcattctccttctaagtttcattcatctattgtgtcagaattatatgtttatgtttttttttttgtcaatcaaaagagcgaatgttgtttacatacgtgatatgacgccgaattatgtgtattttgttatttgtataaacaggaatttgagtttaattggcaaattgtattgggaacacttgttggtttctttggagctgcgtttggtagtgtaggaggtgttggtggtggtgggattttcgtacctatgcttagtttgatcattgggtttgatcctaaatcagctacagctatttcaaaatgtaagattatattattttctcttggtgtttttttgtctgattaataat

SEQ ID NO: 28231 - DNA, 1035 bp, Arabidopsis thaliana landsberg
ctctcagctcctggtcatagtacgctctgcccaaaattgtagcaactgtttggcctgaaatgacaaagaatgtatataaagtcaccctgagccaccgtttgtatgtgttagagtgagatacttctgcttggctgctactgactgaatttctttcatcttgaactgttggatttggttcttttccctgccgaactggtaagtgagtgaaaataacgcaaaaattagtttatttgttgtcgatcgtttcatatattgaatcataaaatatcataaccatcttttttttttttgaagatgaaagaataggacgttcaccacaaactggtttatgcttactcaccaatgatttgtagttcttgatccgccgtcatggtggatgtggaatcaccaccttggagatggacaaggaggaactaacgtatcttattatcaattctcttggttgataatgctaccaagtgattgctcctttgatatgggtgagatatgctaagttatatattctgggattaggaatcggtcaccgtctaagttttctttgttcttggccccacattcagtaaatgccaaccatatctcttctctttccatgaatttagtatctgtagtctttctacatgcaaagatgcctctattgttgaccaagagatgagttaagtctaggaggaaattatgtgtaggcaatattcattcagactttcttctgcaactatgtggaggacatgaaccccatacgcatagacaaatagaaacttaacacgcatacgcatatgtatgaacgtgtacacaagttgtagtattctgtgatcttgatgaggacgacatttctaaaagttatttgtctttttaaatttatttggattgggtacacacttcggtttccatggctagtcatgaagtttttgccatcaagatgatgctgacgttagctaaagattatgtctcgcctatcttttcaagagaagacattcgcaacaacttaatactggacggcagaggaagtcgctatataaaatggtataatttctggtcatt

SEQ ID NO: 28232 - DNA, 3893 bp, Arabidopsis thaliana landsberg
  unsure (1)..(3893): unsure at all n locations
ctattaaatacttttgtctgtagtaattgaaggctcgaagtatgttatcttgtgatcttgtcatgtgactcatattgaatttttccaattgttgataataggaactctttataataatgcatattcgagttgcaaattatattcttaatcaaattatatttttttttagtcaaagttgcatatctacttggaaatccaaattaatataatataaaactttttgtcacagaaaaaatatagttgatatattttctacaaaactaggtgtgatctcacgtatgtattaacatttcgcaaacacgttttcaggattggtccgaagaaaaaatttaatttttcaagttttaactttttcactcaatcaagagactttacacttcatatagtcttgtagtgtagaagacaattaattgcagtaatactttgagttttagcaaattctcttagaaaaaagtgtcatcgcaaccggattaactcgtttatgtgaagtttcgactatcttgcttggcttagtggtagagctaagaccttcctccacgacaccactttggtggtttcatcaatcttatttgtcactcacatctcagtttcggatgaatgacggcgctgtagtaacactcatgaaagtttgttatctcttacttgtagcttcaaaaccagtgataggaccggaagaggcacatctctacactctactttgaactatgaacgatggaaaatacatttttacttcttttttctcatgcgctgtttggctgcgtgttactgtacaaagtggacttttacaaaaataaacatgtttactcgtcatcttgaagaactataaaaaaaaattcatgtacaagtgagtattggttattacattcaaatgcttatagtcaagtctatatatacatgcacaacacaacaaatatgcaaatcaattaaaacataaaataatgggaaaaggtcatttgagatttcgtaagtaagtgacgaagatgaagattgaaatgatacgtatcggttatgggataatgaagagggtttttcacacgattttctaaaaacaagaatcattttttcttaatattttttgtcaaacattctttccaaataatatcaaatcttttgtgatcccattatcaccaactaagaaaacaatgtataaaagtgtgttactatcaaaactagcttatagtaaaattattcaacataacccaaggttattttattcacaatacaaagattacactttttatttacttatatatacatattataaagattacacatatttaacacatcaaaataacccatttgattgagagcaaacgtcagtcttcaggcgccgcctggacaacgacatgggcagcaagaatcaggtggagccggtgcacaacatacacactgtggacacatgcgaattggtggtgacggcgccatcagcttacgccctccaccttttcagtgaaaaataaaatcattaatccctctaaaaaactgaaagagagagagagtcatacatacagtatagtggaggatattcatagataactagcttacctcctagaagcacactagcggcttgacatggaagtattggagacaagacaagtgagagaacaaaaacatataggaggatgttggattttgctgacccggttttcattgcagctttaagatgtgtgaatgtgaaaatcttattgaactaaaccaatttgctgttgaaacttggaaccatggtgagaggatgattatatagccgggacgtttggtcaagaagaggacttagcaataaaatatttaagagattaaatctagttactattgaccaaaataagccattagttttgatgatgcagctatattttgatttcacacggtaattgatatacactatcttctgatatcaccatctacctgatagatattgcaataaatacatgttgcaactattgcgattagttgaccttgaggtagtttgcatgagatgactttgtgtaacgagttcatattaaacgatgatagaagagcctttgctagcacctaaaaattctgtacaagcatagatgaagaaacaatcttgatgagcttagaacttcattcttttagcaggaccttgatcgataattggatcaacttgaggcggttgtgactctcctccctgtgttccaagctcttccttttctcctaatgcttcttggctaacataaccttcaggaaagggtgggggtggaggtgctggcgctaactgcacaacgcaacacaaaaaagcaagtctcacaatcagaagagaagtataagaagtagagtcagtaacattcgtcatgccaacaagagatctttagtgatacagtaagtagattttttcacaaatacaaatgtaccttgcgatataatgaggtaagaatgacatcgactcgcttcatttcctttagatcaactgtctcactagcaggcttcgactcagcaggttcgttctggttttcagtatcaactagaacatatagataaaaaatcacaatactgatgaagtaatttatctacctcaagttgcagcaaagggcaactgttacacaagaacttgttaaagccataaacttgttcaccattggccatgagcttgaaaatcaacaaaaagtagcttcctaagttaactgataaacttaagactattgcaactaagcacacttgcaagtctacaaatagttcatacaaacaacatatatatttcgtccagtttcatacaaagccatcgatcttttggaagagaacgaaaccttaccttgtctaatggtctccaatttcgatgcagcatcagtgaaagccttggatatattataaatagtccgactctaattcaaacatacaaaatgagaaagagaagaaaacaaaacgtttcagaaactaaaacagacaactatcatcagcaacacacaaatcaaaagaggaagaaacttacaactcgagctgcgaagacactacaaagctgaggagcttggtaaatagaaccatccaagatataatatgttagcatcggtgtgactttctcaggaccatctctcttttgcttacgaaagacgaacaggtttggttcagtagcatcagttaacatatattctagacctgtcatcttcctacataatataatcacaatggtttcaatcaaacattgtcactaaattctccacctaaatctatctccatttctctaacagtatcccaggtgagaccaaaccctaattcgacctaaagttgaaacctttatgagtttcaacataaccctatctgtagagcagtgaggaggagcttacgagaggtgagagagatcgagagggtgaatggatcttctccgaagaatctcattgttgcaagttgtatcgtagaaaggagacaaagcgaagtaatcgaagatgtagttacgatcaagagggtatgaattgatccagagctgatccctgaaggaaattccagtcatatccgttcccggaggctgtaacggaggaggaatttgatccgccgcattgccgttgaaggtatcggccgtagccgccgagagcagagaggaatccatggaagtgagtcacttcgccgtgaaggagaagagcacagagaaagaaagagagcgagagagagaataatatggttcggcccattatgtaatttgggctttcgaatttcattggcccaaaattgaaggaattagacaaatgtgttatcaactgattctgacaacattttttttttgttacaaacttataataactatagaacctttttttttaataactagtaattgaactttgtccgatgataacttaattaataagaagaaaacataacaaaggcngatcaatcttttttatagaaatgaaataaaaacacagggttttgtccaaaaaccacagggg

SEQ ID NO: 28233 - DNA, 1407 bp, Arabidopsis thaliana landsberg
tcacaaacagttctagtcctttcacaatggtgatacacttgcgtttgatgcgtttaatcttttcaaagataacttcctgtcgatcctatatagcatccataaacattagaaaattagacaaccggacaaacatgtccacgtcaaagacgaaggaatggaaaccagaaagcaaaacgtagatatgtgagtcagggaatgtccaagcatgttgttttgtacgtttccatggaaacttggtaatgcattaagacattccagtaaggtgggacgaaatttacacgatattacttactttctttttaactttccccccaggtaggcgcttcacttcctccttcttggatgtccctcctatatattggaagatcctttgattactgagtagaaattcaactaaaagccaaatcctttcaacataggcatcatcaccaatcagtgactctagcaatatttatcgttcatgcttaacagttcgattgcagattccccagaaaaacaaatacattaaagatgtttccagccattcagtttggaatttttcatagcgatgtacagtaccaaatacgtgtatgcaatagtatgaacaagaaaaagcacacacatagacacggttccttaccagtctgagctgaagatggtgccccatcagcaccacctgaagagattcccaccgactggagtttgtcagaaacattatctgctgaaatctcaattgcttctggacaaatttaaaattcgtatgcaaactcaaatattagtaagtcttaaatcaaattaaactcattgtcataaccagtaaaacagaagtgtaaagggtaccaaaaaatcgtaaaactctacacaacagcattgacaatccaacataacataatcaccaaattgaacagacccataaatttataattcaagttaaaacaaaaatcttcatcttttcgattgtgtgaatcgcttagcccttggaagaataaaaaatttgaggcactacaaacctaaaatcaaacgagttctgaagaacggtcgaaaattataagattagggtttgaaggtacctttgaggagatcaggatagagatctggggcgttttcgacgagccagggcttacatctagcgaaatcgggaccgaattcgcagtattccgctggaagagagcaaactccgcagtacaaaaccttcaccggctcaagcttctctgccatagataataatccgaagaagttgttccctttggaaaagcgaaaaatgagactcttgtttatcaaagtgatgagggagagaatatggattctacggcggaataatccttttcgcttttttcttctgttagtcgcttgcccccgcgaagttaatgatgtcggaaaaccaaacagtgaagaaaagtgaaaaaggcttatgacatgtgttgggct

SEQ ID NO: 28234 - DNA, 1334 bp, Arabidopsis thaliana landsberg
aactttctcttcgatctttggagatattttgtattgacccgattcttgaccaaaattttattttagttttttggtattgaccgtcggtccaaagtatatatgaaactataatttctcagcaagtttttaactttataacgagtaaaaaaaaagctttattgaaattggcaacaaattttaaccaatgtaaaaaaacattttgaatttatcagaagagttaaaaaatgtctatcgaaatgaaaaaccacaaaggtacgtttccatgacagaatgaattcaactttaaaacttggagtgcgaggacttttcaaaatacgactgaactcttagtatttttttctctcaaatatttaaatatgcttaaacaatcatagagacgacaaaattataaagaaacaattggcaaactagcacacgaattgaaaattcgaggaaggtaaggtagagaggtacaacacaaaagtagtcgtatttgaactagattaaattaaagcaacaacttggtcactcaaacactggacttggacatatcgatatccattataccaaggaaaaatctaaggtacaaagaaagagataagctattttcttttttcgtacaactaatttccacttttctagttagacagaacccattaattagtcaacattgtgtttttttttctctctaatatgatatgaaagtacatacggttatgaagaaagctaaccagcttggtttacatcaacccaactctaaattcaatgattcatgctaaaagtatgacaactaaattacagtagttctttagtacaaatactaaaaaataatctcacctatgttgttgaattttttctaaacctccggcagaattatcagcggccacggtggcagctaactccattagtcgttcatagtcaatctcactacacttgtacttcagtttcataccagcttcaatccatgatctgatacaaataacagattgtgtgctatcatgaggcatgcaatacttctgcttatcaatctcttctcctttaccacaaaagatctcttccggtgcagcagaagtcgcctgaaccgcaaggaaatcccgagccatgttggaaagtcgcgggtatcttccactgtttaccttccaccaatcaagcacatcagtctgcattggaactatagactctgataagtactgagtcagttcatcaacaacattgttactcatacttcctcttcttttccttctagcgatttcctctgcaaatgagatatttcctcctccttcatctacctcctgaggacgatacccgctagtcattgaagatgtgaaatgagaggaagaatagttacgaatgaa

SEQ ID NO: 28235 - DNA, 2703 bp, Arabidopsis thaliana landsberg
  unsure (1)..(2703): unsure at all n locations
ggggatcaatttcgacgagggggcgagaactgccctcgcttttgtccctttgcgttctgacggagaaccagagtttatgttttccgggaatcccagcgccgatatgcttttcgggccagatgaactgaatcttgaacttatcagatccgtacgtaaaatctttctctttgttttcaagattgttactcgttctatctttttatttattacatttttctcttacaaggtttttaaatttctaaaacacgcaattttataaatttccttcggtaataatatgccatgtgtaattttaaccctaattttactcttataatttgaaacgtaaatcaaagaaaggtgataattaaatcaatacaaggcgttaattaataaaattttgtaaattgcaaaccaatctttccttttacggttaacaaatgaatattaaaaaaaaaagatgttgaaggttatgaagctatgactttatttgaataaaaatacgatttgatataaattttatttgtttgtgcaggcgaaagtgttccactatggatcaataagtttgataacagagccatgtagatcagctcacatgaaggcaatggaagtggcgaaagaagctggagctcttctttcctacgatccaaacctcagggaacctctttggccatcacctgaagaagctaggacacagatcatgagtatctgggacaaggctgacatcattaaggtcagtgacgtggagcttgaattcttgaccgaaaacaaaaccatggatgataagacagcaatgtctctatggcatcccaaccttaagctcttgcttgttactctcggcgaaaagggatgtacttatttcacaaaggtaaacatctttttcgattacttgttaataaagaaactacttttgcaagtcttgattgggacaaaaacacttgtgtagaaattccatggatcggtagaaacattccatgtggacgccgtggatactaccggagctggagattcgtttgttggtgcacttctacaacagattgttgatgaccagtccgtactcgaggtgggtactcaactgaatgaatcttccttagttgatcaaaatgcgatttactgatgatatctttttttctttaggatgaagcgaggttgagaaaagtgctgagatttgcaaacgcttgtggagccatcacaacaactaaaaaaggagccattccagctcttcctacagacattgaagctctcagttttcttaaagaccaaaagaaacgtcaaaccaatcttaaattctcaaaatggtgttgtacggcttctccttgttaattttgattttgtgtgagtttagatccaagctgataagtcttatttgaaataaaagatcccacagttttttttttaaatcagatttaagagacctaagtttatgcgaaagtggaattgaaccaatgccgaatgtaaaagtcaaagaactgttatttcatatttgctgctccaccaaattttcctttttgttagtcatagatatatagacgaatccatctaatccattatatcaaaaatttgttggtgtattcatagatatatagacgaatccatataatttgaattaaatttaagagtgttgtgctcatcaactatccaaatgttttaattgccatgatcaaccatataggaatgtttcataaccatatagaaacgttgaattcattgaaccttttaaaatttcttgtttcaaaaggtagtccatacattaattattaagaattttatcaactacaattatggaaaaaatgatattcagatagaatttttttttgctcaaatgttaatatatctgaaatcaggatatagtataactggaatttctaaataaacttatatattccactgttcaaaccttcaaggatttaattatttatgatttgtcatttttctttataaaaagccattaatgtgaagaaatatgacctcaaaacaagatttaaaccctgtcttcactctcctagagccttatataaactactcaaaacttcgttcactcttcattctctctatcgttttcattcttcgatctctggaacacaaaatcgatcttgttcaaatgacgtcatccaacggcgataataaaggtctcgtcgttannnnnnnnnnnnnnnnnnnnnnnntcgtgcccacggaatccggcgtctccctctctgaatcctctggatttctcaaagctcctggtggtgctccagcaaacgtcgctatcgctgtttcccgtctcggaggtcgcgccgccttcgtcggaaaactcggggacgatgagtttggccatatgcttgccggaatcttgagaaagaacgatgtcgacgatcaggggatcaatttcgataaaggagcaagaaccgcactcgcttttgtgactctgcgttctgacggagaacgagagtttatgttttaccggaatcccagcgccgatatgcttctccggccagatgaactcaacctcgaactaatcagatccgtacgtaaaatctttatgatctctgttttcaagatttcaagattttacttgttttggagatttgatgaatatttttctttatttggcaggcgaaagtgtttcactatggatcaataagtttgattacagagccatgtagatcagctcacatgaaggcgatggaggtggcgaaagaagctggagctcttctttcctacgatccaaacctcagggaacct

SEQ ID NO: 28236 - DNA, 1724 bp, Arabidopsis thaliana landsberg
  unsure (1)..(1724): unsure at all n locations
acgaagaaatatttgaagcctttcaaagtctcctttatgttagagatctggagttttcactttgtggggaaatgctaggagagggagagctgattagctttcaggtaagcaatctctcagatgagctaaagatcgcatctcaagaacttgctttcgtgaaagaagaaaaaattgctttggagaaagatctagagcgatcagaggagaaatctgctttgctcagagacaaactttctatggctatcaagaaaggcaagggactagtccaagatagggaaaagtttaaaactcagttggatgagaaaaaatctgaaatcgaaaagctgatgctcgagttgcagcagctaggtggtacggttgatggctacaagaatcagatagatatgttatcgagagacttagagcgcacgaaagagctagagactgagcttgttgctactaaagaagaaagagatcaacttcagcaatccttatctctaattgacacgttgttgcagaaagtgatgaaatcagttgaaattatagctctccctgttgatctagcatctgaagatccttcagaaaagattgaccgacttgctgggtacatccaagaagtgcagctggctagagtagaggaacaagaagaaatagaaaaagtaaagtcagaagttgatgcgttaaccagtaaattagcagaaacccaaacagccctgaagttggttgaggatgccttgtctactgcagaggataacatcagtcggcttactgaggagaatagaaatgtccaagctgccaaggaaaatgctgaccttgagctgcaaaaagcagttgcagatgcctcctctgtagctagcgaactggatgaagttcttgcaaccaaaagcacacttgaagctgcactcatgcaggctgaaagaaatatatctgatattattagtgaaaaggaagaggctcaaggcagaactgctactgcagagatggagcaagagatgctgcaaaaagaagcttcaattcagaagaacaaattaacagaagcacatagcaccataaattcacttgaagaaacacttgctcagacagaaagcaacatggattcgttgtccaaacaannnnnnnnnnnnnnnnnnnnnnnnnnnngtttaaagaatgagttagagaagcttaaaattgaggcggaatttgagcgtaacaagatggccgaagcttccttgacaatagtatcccatgaggaggcactaatgaaggcagagaatagtctttctgctttacaaggagaaatggtgaaagctgaaggcgagatatcaactctcagtagtaaacttaatgtatgcatggaagagttagctggatcaagcggaaactcacagagtaaatctttggagattattactcatcttgataatctccagatgctactgaaggatggaggtctaatttccaaggtgaatgaattccttcaaaggaagttcaagagccttagagacgtggatgtcattgctagagatatcacacgaaatattggtgagaatggattattggcaggggaaaagggcagcgctgaggtaacagcaacactcttacctttgacagatcgatctatattccgtaagctcacttttatctactgaaatttacagctggactgcatcatgcctgtgggcttatttgtaggatcccaagatgccttaacctgtaacgatcttctatttgttaggtgccaaggatgccacattgagcagaat

SEQ ID NO: 28237 - DNA, 1157 bp, Arabidopsis thaliana landsberg
tcgatatcatcggaaagagatactaaaagttactttttttagttaggccatacccaaaaagtagcagaagatgtgtaaagcacaaacctttatcaccaaaagctaattactcagaaccacaactatcttcgataatctacagcgaggcacaagacaatcctgagttcagaagtaacaaaggcttcaactttggaagcatcgacaatcttcgatagagaatcaaccaaagaaaaataatcgaaaattgatactattattaattaattccctccggaaacagacctagaagacgaatctatgtctcactcataagagttcagtgagaaaaacccctagttaaagttgtaaactttgaatcagattcggattagtaagacagagaaaaaaacgaaaagcaaaacccataagtttgcaaaataaaaaaaccagagatcaatgaccaatcacctgaaaagagaagcggaggaccacaagtagaatcaagaacaagtgatggagggagaagaagaagaagctatcatcttccccaaagtagtagaacaagagagacagagagagagagagaattggagataaagatggggaaaagcaacgggaacaagacaggcgccaatgtctttgttactaattaattatgtatgtaatggtgagtcttcccactcaggaatgtccacgacaatacttcaccttccttattccaatgttcttatgctttaatcttctttagaagatgctcggtcgttctcctccttaatatgtttttttatttaacgatccatgttttttcaccaacatactgtacatactttagcttcataatataaaatcgaaaatgttaaatatatactccagaaagtttctttattaatctcatcgattgaaaatgggaacttatatataatcggaacatgaaatattagttcaatattctttgtacatttataaaaccataaatttgtgtaggaaatgaatccaaactttcttttttagtatttcatgtattgaaaaatgatattttagaacaaacttagagaaaatcattgcttaaaactgagtttttttttttatatcagcttacatataaattaaaaagccataatctttttaatcaatcaataatgaattgtgttattattttaaaattttaatatcaaaat

SEQ ID NO: 28238 - DNA, 1586 bp, Arabidopsis thaliana landsberg
gaagatcttcaagaagaagaacttaatattcctgaagcccccagagaaacggtaagattggcatattgggttgcttttttgaggtcatcgtttaaagttagcaaatttgttaataggttttgcttgtaattttttaatcaggttggtgagatggaggcgcaaaatgcttctggcggatgggaacaagaagtacagggtgtatcgccttgcattaacaatacagttacaggagaagaagaccattgtatgggcaattcagtagaagaacagtctaaaagagaaagcacaactggaaaatcgaagcgagctacttctcgagagcggaagaagacgagtgaagatccatataagtctagcgaaaaaacagagcagaagaagttcaagcattcaagtcgtcgacaaaaaagaacacgtaactaactaactaaataactgatattgtcatctagactatgatcaactattttctgcatattgattcatgtttattccctgtcctagtggagaaggaattgcttgaaaccccggatcatgaaatcagatctctgcctcttagagatatgcttcgccttgtcgaatataaagaatggatgcaggtaagaacactattcatctgacctcaacatgttctttggaaatttagctggatcctaactgttccttgatgttaattattatacagaaaaaggaagcaaagggagctggggggcaacctagccaagaaaggtattttcattagaaaaaaaattgaaagtgcgagatgataaaagcagattgttttcttttttcgacttatgggagtgtgttgttatgtgcagtaataatatgaacggatcagggagccagtatcattctcaaggttttgacgaagaagatgaatttggtgactttggtatagagtcgagcgaatatcaagaaaataatgtagttaaaccggattcaccggttaactatcaaacctacatgaacaagacttcaagaactcgatggtcaaaggaagatacagaactcttctatgaggtaaacttgacagcctctgattcttaaaagacgggttttactgtttcggaccattgtcacaagtctacttaagatagaaatgaaactctaggagacaataaatcacctttgttggtaagtatttatagatcggattgcctttttttattttcgtagggtattcaagagtttgggagcaatctctcgatgatacaacagctgtttcctgagagaacgcgtgaacagatgaagctcaaattcaaattggaggaacgccgaaatccattgaagcttaatgatgcattatcaagtcgctcaaaacgtgagagaaatccgttcactctctctcgctcttttctctgtatatagaaacctgaaagttttgttgtttttgcagattttactcatttcaagaacgtgattaagaagcttcaacaagaagccgcggctgcaaaagaaggcgaagaagaataagaagctggagcagaagcagagacaactgatgttcccgagaatgtagaatcccccaactttttgtgtgcgccataatctgttagttctgttaaaaagttaacaaaacattaaaa

SEQ ID NO: 28239 - DNA, 1674 bp, Arabidopsis thaliana landsberg
aatgaaaaatgcttgaatgttgagagtttttaaaagatccaaacacacgttgtagatagtgttccaacgggttttttctttcctatagctgttgagaagcaaaataaaaacaatcaatgtggttctcataaaagcaggcagagagatagagagaagaattgcagtaatgacaagaaacaagctagagcttcttacctaggatcatctccttgaagccctgaagtttcagtatcgttggagcttttggacaggcttccaaggcatgcattttcggttcttgaaccttgcttgggagtttggtattcaagattcacagaagagcattcttcagcattgtcaatagtatttgccatacttttatcttcatgtttctgttgtggaggcaataaagatgcccaatatcagaagaactaaaagccttagctgaaattttgggtctcacaaagcatttcataaagatacactctatcctgattcctaaaatcagaaagcaggcaacttttttggggttgtacctggtttgaaatggaatcttgacaattggtagcaatatcagatgtttccactttagcttgagcccatttaggaagccgagaaacgctgaacttaaatgaggatgtccatggggagcgttgctgcatctgatctgcgttctcctctactggcttatagtttgcagaacatgatgcatcatttggattgtcttcctccaaatcaaccgcaatttgcttgaacttttccagttgggccacagttaacctgccattttcatttactgcccgtataatacgagtagccattcgcaaaggaagtttccagacaaaaatacagccgtcacttgcaacctgacaataaacaccaaagaaaagttaaaagcaaagttttatctcactttttcgttttcatttgaggcatacaagaaagatagatccaggcttttgagcagagaaagctcttttacggtgattcaattcaataagaatgagacattgatcttgaaatcatccaaaagtcatggttcttacagttgtaagtaacagaaaactacaattcagaaacttactgatatgatatgtttgcaatcaggtaggaaaataacaccagtcacagcttcaccatgtcctgtggcctgagcaaccagctctccggtgacaaagtccacaaagcaaattgtcctgttagagtaggagcataccaagtagttgcagcttgggtccaaaatgacctgtggaagagatcatattgtcagcactagaacatcaaacaatgttgaagtctaaccaaacagtttgttcaatgcacctttacgggatctccatggtctcggtcttgcttgaatgatctgacaagctttccactttctatgtcaaatatgtttatcttcttatcctgggatcatgagataaagcatcagacttcttgtttaatctgatggtaggtgtacgattaattgactcaatgtgctcgagataaggtggtaatatattaatgttcaccgaaaggtaacaatacctgtcccactgtgacaacaagtcctgatgttggatgtaaagtaacatcatagatggttctatgaaagagagtttgagtatgagaaggtgaaagaagaaagagacttgattttgtgttggggtgaagagtttgtaaaatgtaaacatatcatcaattatgtca

SEQ ID NO: 28240 - DNA, 622 bp, Arabidopsis thaliana landsberg
cccagaaatgaaactaaaggaaaatgaaggtagtgagtagcgactttgcaacggggtaagatgtgagtttttccaattcaatcttctgaaaatgacaccgagtaaaatctttacaagtgcccagcccatatagggccaacatacgaactccgttccctttcgcattgaagctgtgttcttgaaacgttattttatgtaaattcaggaccctttgattcaacaaggttgaaacaataggattcgctgtttttttcattactatcgaattaatgctgaaaagggataggaaaacaaagaaatgtttgatgaatgcgttaaacaatagggacagaccatgatccaaaggtcatgatatgtgccccattaagggagaactaagtctcaattcaatattactggccaaaaacatatttctatgaaatttctctaatcactttcttttgaacagcctaatgcaacacaaactgcacaacaatgatgagacattctcaacaaaaaagcggggataggctttctttcaaccttccacatgccccatttggtttcaatacaagatggacagccgaggcatgtccttttgacatttcctctgtgcttataaaagtttaatttaccctccttc

SEQ ID NO: 28241 - DNA, 3294 bp, Arabidopsis thaliana landsberg
  unsure (1)..(3294): unsure at all n locations
aaggcgtgcaagattcaagctttcacatgcacaacaacgaaagctttttattgatgtgcgactagaaatatttaactttgttaaatctgctcgtgaagaccatgatgtaatgatgtaaagcattttttctaatatcttcactgtatatatgcttagggtattgtggttgggcttgacaatgtggacgaagtaatcgaactcatcacgaaggcctcaagtcattcctctgctactgctgctttacaaagtggtgagctatattttactttgacaatataatcaatgtaacaatcttgaactgcacattataggttgatgtataaacagaattcggaaaagtgagcgagaattaggagtcaaaaagtagactagagccaatttttcttaggtggactgatagatgtagtctaggatgtacactattaaaagaatacatcttgtggtgaactcttccatattacatttgaacattatatatttcttgtctttttatctggaactgctggagtctcattcgttgtaagatttgatcttaattgcaaagatttcttagggatttatgctttgtaagtctctattgtaagggacgataccatatattaaaattaacacttgtcaaacatttacttatgtagaatatggtctttctgagaaacaagctgaggctatactggagataactcttcgaaggctaactgctcttgaggtgctttcttattctcgctaagttcaatttatgaaacttgtaggcttgacaatgttctaactagattctcccttcataaatgcagcggaaaaagtttactgatgaaagtagttcactaacagagcaaattacaaagttggagcagctattatcaacccgaacaaacatcctaaaggtgacacactcactttttagttatctgttcttttggctattgatattagaaatttagaacacctagatgctagtagaatgatagatgcatcaatatatgtactccaaatttgtaagcttgactgtttgagtccactgaggttcaaaatctagtccatgcattatgatgtggtataaggattcaaatgcttcttccatttcttgtttggtacttatttttatatctgtaaagctgcttactatatgttgctgttctgggccaatgttaggaagataactgatacatgatgattttcttgtagaccaaaattgaactatttgcttcgtttacttcattgtatattacttactactttattctcttcgttgtttttcttgtatttttctttagttaatcgaacaagaagcaatagagctgaaggacagattctcaagtcccaggcgttcaatgttggaggattctgacagtggtgatctagaagatatagatgttattccaaatgaagagatgctgatggtatgttgcatacttaaacctagaaagtttctcaacgttgaaatttttgttgtttgttttgtaacttttgatatggatgactataggcagtcagcgaaaagggctatgtgaagagaatgaaggccgatacattcaatcttcagcatcgtggaacaattggcaaatctgttgggaaactaagagttgatgatgcaatgtctgactctcttgtttgtcatgcacatgaccatgtcctcttttttcaggtatgtataccctcaaaatttcctttgtgtntgctacgcacatggatttaattttctgccttgttgtaattcattgcttatacttgttgacattcagtgaccggggtatagtttactcaacccgtgcatataaaattccagaatgctctcgcaatgcagctggtacacctttggttcaggtaattacatatctgtgtatctatgttttccttctgctatgtcaaaaattattcaattttatgaaaggctaatgttttgctgtgttcatgtgacttgtggaagcagatattatccatgtcggaaggtgaaagagtaacctccattgttcctgttagcgagtttgctgaagatcgctacctcctgatgcttacagtgaatggctgcatcaagaaagtatctttgaaattattttcaggaatacgctcaactggaatcatagcaattcagttggtttgtcccctttttcttcttagtcatataggaagtcttcttaacaaggttactctaacaaaattatttgtcttcagaattctggtgatgaactgaaatgggttcgttgttgctcaagcgacgatcttgtagccatggcatcccaaaatggaatggtcgccttgagtacatgtgatggtgtaagttgtggctctcattttttctaaatgattcatctttcatgtaaaccttttaatacttgagcaaactctgatggcttttgtttgtttaggttcgcacactgagcagaaatacaaagggagtgactgccatgagactcaagaatgaggataagatagcgagcatggacatcatacctgcatctctgcggaaagatatggaagagaagtcggaagatgcttcacttgtgtatgtttttcttaacttatatctgctgatgtttgctctagaaacttacttatgtcttactgtcttcttttgttaacacaatcacaaaagcaggaaacaatccacgggtccatggctattattcgtgtgtgagaatggctatggaaagcgtgttcctctgagtagcttccggcgttcgcgtctgaacagagttggtttatctggatacaaggtaggatctggattttcaccatttttggttgtgtttgtgttgatttttcccttacatctaaatctcaatttgtcagtttgctgaggatgatcgtttggctgctgttttcgttgttggttactccttggctggtaagtatacactgccacaaatacggatttaaatgttctttgattgctgtttatatataatctcaccattgggttttcttgcagaggatggggagagtgatgagcaagtagttctggtgagccaaagcggaactgtgaaccggatcaaagtcagggatatctcaatccaatctcgcagagcacggtactcccttcatgtgacagtcttttcaaatgtatattttatatggtttctcatttgattgctaatttctcaggggagtgattcttatgcggctagatcatgccggcaaaatccaatctgcatctctgatctctgcagcagatgaagaagaaacagaaggaactctaagtaatgaagccgtagaagccgttagcctgtaaattttacaatcccaatttcatcagtttttgagacaattgtcaagttcagcacatagagcttatgtgct

SEQ ID NO: 28242 - DNA, 942 bp, Arabidopsis thaliana landsberg
tgtgattttgtttatgtagtcatgtgttttatatgagtggtgatgcttggaaagaaggaggaattgattctactggtactcttttttctctcgatttgatggtttattattggtttatgttcttagaagagtgtgaagttagtaggaactattggaggctgaatcttgattgtgattataggagctttgatggtattaacactgaaagtgatttcgtgttcgataaactacaacgatggaatgttgaaagaagaaggtctacgtgaggctcagaagaagaaccgtttgattcagatgccttctcttattgagtactttggttattgcctctgttgtggaagccatttcgctggcccggttttcgaaatgaaagattatctcgaatggactgaagagaaaggagtaagtgtttttctctctcgttcttcggtctatgtacttgtcgaaaaagtgaggttcttgattgtcttgtgtgtgggtttcagatttgggctgtttctgaaaaaggaaagagaccatcgccttatggagcaatgattcgagctgtgtttcaagctgcgatttgtatggctctctatctctatttagtacctcagtttccgttaactcggttcacttttccagtgtaccaagaatggggattcttgaagagatttggttaccaatacatggcgggtttcacggctcgttggaagtattactttatatggtctatctcagaggcttctattattatctctggtttgggtttcagtggttggactgatgaaactcagacaaaggctaaatgggaccgcgctaagaatgtcgatattttgggggttgagcttgccaagagtgcggttcagattccgcttttctggaacatacaagtcagcacatggtttcgtcactgtgagtattgatgcttatgaggagaacctagagaatgccatatcttat

SEQ ID NO: 28243 - DNA, 1546 bp, Arabidopsis thaliana landsberg
ggggtattgaatggggatgggatggtgtgatctgcctaaacagaattgtcacaaacttcccattggacgttttcaagtttgccattcgatacatcttgagcggaaaggcgtggctcaacttgtttgagaacaagacggctttcacgatgaagaaagattacggaaaagaagagagagaggctcaatgggcacttgctcaaaggacacttcacggtttacagccaaaagaagctgttaacatcttccctgagaaaggaagttacagagaattgtctgagatcgctgagcaagctaagagaagagctgagatcgctaggtaataaatccgatcacacacgattctttttaatctaagtgtatttttttgttggaattaaacactaattgaattgttatatgttaaacaggcttagggagctgcacacactcaagggacatgtggaatcagtcgtgaagctaaagggcttggacattgaaactcccagtcactacactgtgtagtaaaaccaaacatatgactgatcttcgatcctctcatgttttgtcttcttcatcttctttttttcttcaccacctcttatgattattaaacacataaggagagatctttgtttattgccataactcttcccaaaccttattgttagtgttcttgtttctcaaatatgtacttttgcataatttgctcttttgaagaaacaaggcatgcctttgtgtttggcatttggcacatgcacattctcttctttgctcttattccatgagcctatgtaatcttaatcttcttctttttcgtaatccaacttttcttccggcttctttacttttatatatagtacctaaatgttatttatacctagggacaacaaacaatttgcttatttaaatcaaattttgtttgttgtaaagaagggaaataaccataattttttcttttttttttcactgaaaccaaatcaattaaataacactatcctttaaaaatgccattaaaaacatgacatgagacaagttgtgtggaagtagtacggctagaatcttaagagaaatagagagatttggatgcgtgcgagtgactgtgagacacgtgcaaagatatggatgatgacttcaaatcaatgttatgactttcatagtttacacatatgtcatccaactttcctcctttttagatatttacaatttcggcgttttgtttttcatattcatcgaattttttggaaagtaattctagtccagtagtcctaatttttgtttacattttaatggtgcacctgtagttactgcagctggaacatattggtgatctctactaatgtgtagcttttatttaattgaagatttgttacatctgattttttgtagtcgaaagttcatatgttttcgctaaaggagaaaaaaaacttgcaggaatataaatatatacacaaacacaaagtttgtcaggttaaaatgattagaatattaaagtttggagatttgctcataacattaaaataataaattcaggaaaaaaagacaacataagagttttattttaggcaga

SEQ ID NO: 28244 - DNA, 1455 bp, Arabidopsis thaliana landsberg
acctaagaaagactcaatctgctgatggaccttagaaacaaattcctccagcttttttctctttcattcttaaccaataaccatatatagtcccgacgtctatctatctatctatatgcatatagataaatgtgaaatgcaaagtgatgggttctgtgagagaatgtggtctgtatccattgttgtgtagagaatgtaataatgtagctgctatgacccataattctgttgatgtgataatcactcaaagttaatgaatcaaagatatttctgcataattttgtgtccaaaatgctaaacagttgtcttaataactgacgttatgcgtaaatttaagctacttgccacataatttcctattgtgcataccccaacttgattcagcacatagctgcgtcgaggtaatgaagaagaacacaacattgcctccaacaacaagaaaaattcaaacaaatatcattccatgtcctagcttactgcgtttgtttttctttttgcatacataaaggttagtaaatctactttgttaataatatgcatcatcatcatcatcaccaccatttatactgtcatcggtttcttgatcaaacgctgctctgttttttgctcttactgttttgcctgaccctttcaatggttttgccttctctgcctgcagctccatggctttctctgatggtttcctctttctctttcctcgtgtctcacccatttcttctgcaatagagagccatgtattagtaacgagagcatctatatctgtgacataacacatcatacattcacaatactaatctacaaatcagacctttatctagcagacttcttactttttgcacttataatctaacgtctataggagattcataaactgtgtttttcatatgacgctgttactatctttcttacctgcttgtggacttgatgcatggtgtccattctgaccagcctcttcagaagcaggagatgcagatatctgaccttcaattaactttatgctttcaaccaaattgtcttgctggtcatttgtatctggaataggttcagctggaaggtagcggagtttctccactgacgtatctgaatcactaaaagcattcttttccaccctatctatgtcaacttctttatcttcatttacatctaaaacttttacctacacgcatacaaccatataaagtttcagaaaaacatgtgccagaaagaaatggatttaagtatcaatcaattcaatgtctcaccttttctgtttcgggtatcaaagaaaattcatgttcgcgttccacatactattcattctcctcaagctccttgaaatcaggagcaaatgcactccagttctctgtgtaatggttttgcccaaatatataatagaccccccaacccccacagatatcgtattatgggatgaaaaggaaaaaaagttagatcaatcaacgcttcttttggaccttc

SEQ ID NO: 28245 - DNA, 6290 bp, Arabidopsis thaliana landsberg
aaaaaccttcacaaacatatccacttgtagccactgaacggccaacataactaaggcacgacaaggataaacgggtgtagccaaaagaactatattgagcaggcgacgaacaaatttcttgatgacaagaataataaaaaaaaaccaccaatactcaaataccatattttgctttggtgtggaggtgcctcttcttttgcaaaactaataaccaaacacaaggttcaaatattatttttgtaaaatcaggtaacgacagagacttgatctacgagtccttacaaactaggactagcttctcttcggccttacgcatttttcaccgcattgctagagctttttgtgttgctagctcccggcggatttggtgcatctgattcaccacacgcccttagaacagcctcattctgcaagagactctcataactattaaaacaatacttgcgtcgaagaatatataggagggttaggtcttataatatttataaattcctaggtggtatgagctcaaaatcaccacatacatcttggtagatcgacaagctttaccaaaaaatgtataacacactgtgatgcacaagatagcccaaaatagctcgaaaataacacaagcatattgagagatggacaacctttgcatgataccaaacaccaaaccgggaaaaatgaattccaagtgttcctactctgttcctagttccacagaaacatacatagaagcctaaaggccatataccaagaacaaactacacagttggccttgtcctaactcattacatctactcagacctaaggagagcacatcacaatagactgaacaacattttgcaatcgaaactgatgatcttgaaatgaatccatcaatactttcaacacgaaaaatccatcaatacattcaatcctaatctatccttggcgggtaattctagggaagtgaacgcagataagaggatctagactacgaaaagagaaatgttctctcaaaaacccataaaccctaaaaatggaataggagagtacctgccaaacacgacggaggcgggttttggcattggctttacgagtaggggttagcttgatccgcttccaaagaagaccaccggaatcgtgcttcttcactaattccatcactcgagttccccaaaacgcacccattcctcctcccatggccgcctctctcgttctctctcaagagcaaagatcttagattagttcgagtttttccttcaatcagcccatttagtagactttaggcccatttcatctacgagctttttttgaataaataattttcttttttaataaggattctaatttgattcacaacaaaattaattaccacatgttttcataacttttcaggttattggacattgaaacttacatgattggagttagccaagacaaaaggagtgtacagtattatatgatcaatcgaagagaaaatgtacaacaaacttggtacatgtacctcgagtaaatgtactaatgttatctacaaaaaaaatccactcggaggacttggacttctaatgtttttgaagtgctatagaaaggcaacaacgtatgctctaggtgaaacccaagatatacaaaaagattcctctctttctgactttaccaaggtttcaggtcagcaaccggaccagcagtccagttcagtgccttctcacctgtcttcaagtatatgcttttgtcgtggggtaacttccgagctagcccgttaagtatctgatggaatgcatcccctggttgtgcaggttaaggggaaagcatttctcttttcatcgaaggatttgcgaggagtctgtgttttctgaggatcacttctgttggtattgaggttaggatcgtgtctagttcagggacgtctttttccgcaacatagactcctatttcttcccaggggatggcgtctgcgaaaggcagtactatgtcgtctgctatgataactggaatgcacccaaacacaactgcttcaactaacctagggctccatggagcccatcctagaggacatagacagaagatggctctctgcatgtcttcgtagtatgttgtcgggtgatctgttgagatgtcaaacaaagggttgttcttgaagttctcccacaccgctgctcttgcacctctatacaaagagagaagttccagtcagcagattctaaaacaatttgatcttagctaaccttatatataacctaacttcctaatgaggaatgcttaattgttatcttaataggtagatcttgatgtatatgtgcttcttttattgtatgatactatagagtttgcagttccattttggttgaaaaatctatgtaagactagagaaaactcatcacttgagagttttacaagtctacaaaatatgtaccttgcataatatccaccttcggggtcgttgttaacatcataaaataaaccgcggaagtagacaaagatagagcgtggaatatctggaggaataaaatgggcctgcatcttctgtgcaggtgcaaaaggaggaatagtgatcgagccttcgtccaaacagacatggttcctttgaccaaatgtctgaaccaaagtggcacgctggagtagtggaagtatccctctttcaatggctttttcctcctgtttaatgtcaatcaaatcttcaattcccacacaaatcattggaatattccacaatcttatacaataaactcataaacagattctcagtttccatgtaactaagtactaatgtgatgatacaacagctaattttaagctaatgatcatctatcattgtaagatcacagggtattcttgatgaacagcaaccaccaaagtattcaatgcatataaaaaatagagtttgttcctgaatgcagagataatctacctgataatgaaagcaagctccaaagtcatggggcacaacaaagaagtgatcagctccttcagtccgattccaataaggccaatttgatgagattagttgtatcgaacttctcatcatacgcggcgatttaaacggtaatggcaagccggtaggagtgaggtcgcaagtaggataaattggcgtgtaaaaccaatcagcttcatcaggattacgcgttcgaacaggactagataaaaggaacctgtgcataaaaatctcagcagcaaacatgtgtgtaagacatcgaggatccttttgcagtaatttcttgttgtacttgcttggaagctcatatacataaaccttaagctttcccactggatcatcctccaaaacatcaccagcacttcctgcatttcaaaaacacacctttttgagctctcttacacagctgttacatagttcctcaatcaatagcattgacttcttaagcaaatcaaattatatgtctataaaccaaatgctggagaaacgacggatttcaaacttatttgagcgaccctcaaggattaatcaattcaactctacattccaatctgctggagcaagaagaacaagtacctgaaattcgctctgtccgaacattttgtttagcggaagaagcagagaagaagaggaacagaagaatggcggagaggcaagagtggattttcatatctaccggagatgtgtttgaaggtttggatcgcagaaaggaagaaggaagaggaagaatataagggaagagtatcgttgggaggtcatgggcgcagtggttgacgagtttacttcggtattaggttttagggtttattttattcagaaggaagacgtgaatggtgaaaatgaaatagagtgtcgatggaaaacgaaattggagaaatagcttcaagtcacagataagtaagaaattgcttgtgatgtactttttttttccttgaattcaacgaccaaagacggaaactggtgcacatcacaaggcgcgtgctattatgggctgagttaatgtccattgggccttgctaacgtccaacgttgactagttataacttccgtagtaggtcatgatcgttttagagtggccactatcaacaactagttaacgacaacaattttttatatatatgttttatagttgttggtaatacgacaattataggtgacataattcattgattagcgattaaaatatttgagatcactgtaaaagaagtactatgattcagtttttgatcgttttatgtcattagcaacgatgaaatgaacattgttatatatctctaaatgtaaccataacattgtggataataatctgttggagtgtgaacactctgaaagaatctaaatcatccaattttatgtgaagaaatatgtagaaaaaacaaacaatggatgagttataggtttggtcaagacttgaaaagtcattgatcacggcttttgtccattattccgtgtttaaagtaatttacattctcttttaagatctctcagtccaaagacaatgcaaacaataataatttctccacttgtttctcatcgtctctgtcttgctcgtgcttgttccttgcaaccgtcttctcaacaaccaccacgtgctcctccttcgatccgcctctcaaaccaccgttcaaccacctcactccgcctcttctcttccgccggtagaccccaccaccttctatttcccttttaaactttttgtttccttttgaaaaagatattttgcttgcgtggggcaattccgtcaaagcgttaccattcgggataaattggtcattttttcatcactgtgtctctctattgagtctttagggtctctctgtgtttgcaaatctgacgccgagtattttgctaaagcagcagccagtcgggacagtgaaatggcgactgaagatgtgcaagatcccagaatcgctaagattgcctcttccattagagtcatccccgacttccctaaaccaggtctccattttttccatttataccgattaatatcgtctctagtcttgatctgcgttgggatcttaaggttttaatttggatacttggcaggaatcatgtttcaggacataacgacgcttcttctcgacactgaggcctttaaggatactattgctttgtttgttgatagatacaaagataaaggcatatctgttgttgcaggtaacaactcgtatggttctgtttggtacttcaatcgattaacagcttgtggatttagtttcttttggcctttttagatactgagtgctttagcttaaactgaaaagttgaaatgaattggtggatgatttttggttctgcctaaattgatgttgtggtaaatgcaggtgttgaagctagaggtttcatttttggccctcctattgcgttggctattggtgccaaatttgttcccatgaggaagcccaagaagctacctggtacatttttatttcttcctctagttgcttgtgattttgacattaagttacatgaaaggtctcaattaggaagttgttagtttaaatggcttcttgctccaagtctacactttatcattatctcgaacattagcaaggtgacttttatcttgcagtgtctttgatcaatatgatgctactcatttgctagatcatttttctttgtggtaacttgcagtaacttaagtggttgttattttttctgttacatatcaatggacttagttgtgtatcttgaccagttacaagaaatgtattaagccatttggaaacttatgagcagtgtcaaataattgtcgcattccttgtttatccatggacgttaatttctaaactgcctctgcatttggttcctttaacagggaaggttatttcggaggagtattcgttggagtatggaacagatacgattgagatgcacgtaggtgcagtagagcctggtgagcgtgctattattattgatgacctcattgccacgggtgggactctcgctgctgcaatccgactacttggtaagtccaagatttgataatgcagcatatgcagttcagttaaacttgactatttctcactcccacaattggttggttttgcagaacgagtaggagtgaagattgttgaatgtgcttgcgtaattgagttaccagagcttaaggtttagcttatttatctctgttttactatctgcttccaatctcttacactgatttgcttataaagagatatgtgggctgcaatggttttgtagggaaaggagaaactaggagagacgtcgctatttgttcttgtaaagtcggctgcttaacaagaaactggaagagaaggttattggatcgagtgttgatgctatttttcatgtatggtgagacattttgcgtgggatttgatccttgaatgtttcaacttatcataattggttcagactagaaaagggc

SEQ ID NO: 28246 - DNA, 3454 bp, Arabidopsis thaliana landsberg
tgatacttgctatggaaaagaaaagagttatttgaatgctgcccgcaataatgaagcagtgtgaaataattggagaagaatggagacattaaaggcttggttcctcggaaacataagttttcaaactggacacacagttgtaagtttgtaactgttcacatatttaagtctgctccatagtcaaacttcaaagttcaaagaactcatcttcttttttttttgggtcaagacataaaataactcatcttaaacggcaagatttgggctgttagtgggctggattgggttgacctgttaagtaatacgatgtacgtattgctcgtttctaaatgctttttgaaaacgataatgaaaatgttaaatcacacattagaaatttgtgaaaaggatgtccgtacctgcattggtttaatgtttgtatatgacattcatatagtaaaagaatgtgaaagtaccttcgactttgattgttatcaatatcgactatttttaactatcaacattagtcagttaaactagttaataatcgcttttgtccccgcctaatagtttagttagtacaacactttcttacttaccatcttccgacaaaggtcccactgtctcttgtcttcattctcatccttgtatctgatctgatctcttcttcttctttttcttcctctctctctcactcaaatctgtaattgggatttttcgacccaaaattaacaactccttataagttttcttgataggtcctctttgtgtttttttcctcacaaagtttccaactttgaaatgtatttgtgaatcttcacttgttactactttttgtgtccatcattattttggaagtaacacaattgtgtgggctatcttcactttttcaggtaatcttacaagattgccactagattctcttttttgtttttctttttggaattgtaatgataacttttcttagtgtcaatcattgatgagtgtttggctctctctctttgcttattcaattattgatgctcactctcaattagttatatttttttaagaagaatctgagtttgctcaccaagaggttgaaaaatgctgaagttgaaagtgtctattaattactaaaccaagattatatgtgtttttcctctctttactacaattattctgctttacagtgaagctactattggatgctaaaaaattggtatagttttagctcaaatccgagttgattctggctttgttcaagtttgaaagtgataagaattttctttggttttgtgtggattaggattctttctggtgagcattaatggtggatatggaagttggtattgccagtggtgaagataaggtaatacccatttgtctactccaacgtcattttgatgtgtttgtgcctaattattgacattactgtcaatgtcctatgatctgttttgcatttgtgtggtttcttgatttgtcatagttagttaggtgttatatgacttgtttgtggattgataaacagataacgaccgcggcttcatcgaatcaagaactgcaagtgtctgtttcgtttggtaagtttgagaatgattcactttcatgggagaagttttcatctttttctccaaacaagtacttggaagaagtggagaagtgtgcaactgctggatcagtagctcagaagaaggcttatttcgaatcacattacaagaagattgctgagaggagagctgatatcatcatggagcaggagaaacttttggagaggaatgcatctttcaggccgaatattcagaaccgggaaagaacagacgatagtgacaatgacgagtcaatgatgatcgagtttagtaccggttatggatctaacggtgaaagtacttcagaagaagataagcttgtgaccgtcattgttactgaagtgaatgagacatgtaaccataagcctcttgaagaaactatggatttcaaggaatgtcgaagctcggttgatactggggatgatctgagtaccctgaagttggaggagaaacttgaagagattgttcaagtggaggataaagagaaagtagaagaggttatttgtatgaaggaagaagtaaaagaagatgttccatcaaaggatactggactaatgagtgaaactctaatgaaggagacgaagaaagagaaagatcataatcctatcaagaagactgataaaaatgtgcgaactaaccatatgagagcctctcccaaggtaaaacaccataagcttcctcatatagttttatgtgtaatgtctttaaatgactgtgtcttcgtcttacagtctaaccaggtgacgaagaaaccggtaacgagcaaggttgtaagtggtaggaaaactcaaccaagcaaggaaaaaagcatgacaaaggcaacaaataaagcagcatcacctgttttaaaacctccagggttttcaactccaagagtgtctaagccagcttcaacaataagttcaatgtctacttctcgctcttcagtaaagaaggaaagtgtctcaactttactgagaaagaaacaaaccgctccaaagtcattgcccatttctctcaatgtggatcagtcggtctccgatcctactgctgttccaacaacaagaaaatcgttgatcatggaacgaatgggagataaagacatcgttatgacgtgcatttaagagttttcagaagagtttcgaccaaatgagatctactgatgatgggcaagatacagctccaaagcaggtatagtctaatagtgtttcaccaagtgataaagattctactggtttataactaaatatcgattcatacttccaatgtttgacaccaggttcttgcaaaggcaactgctgttcagaggttaggtacaactggtcagaaaaatgtcaggtataacagagacatgcatcaccatctagagttttctattactcatcgtgtcttgtttgaatcctaaatctgttttcttgtaacaggcttgcaaaatcagatggcacggagagaaaaggtcctaactctcaccgttcttcatctgttgtatcaaaaagcaacgggacagccgagaaacagaaggacgtaagatgttttatgagcaagccaaaccatgttcaccttatcctctgatataacaagtttaacaattcctcagatagctaatatttcttcttcaaattcagccttccaggcttggcacaagagctgtagagaggatacatttacaggcgaaaccgaaggtattaactgagaagaaaaccgtgttgcatatctttcattagtgtatgatctctgagcattgttgtctgatatcaggcagaagcaagcaatgtcaaaactcggaggcaaagtccaaatcccaaagaaaaccccattcaaggaccttcttccaaaaggctattcagacaaagtactatgatgtagcaatcttcatttcacgaactttgatatgtaacaagtgactattgtttttatctgatcttctg

SEQ ID NO: 28247 - DNA, 1829 bp, Arabidopsis thaliana landsberg
tgatgtataaacttctctcatttcctcgaatattttgagaccttcatctattagacctgaatagctgcaagctgataacactgcaacaaaggttatagcatcgggtttgattcccgactcttgcattgagagaaacagcgagatagctctctcgcccattccatgttggccataccccagtatcatcgtggtgtatgtcacagaatttctctctttcgtttgagaaaacatgtcttctgcatactttattgctcctgcctttgaatacatatctactaacgcagaagccacaaatacgttctgatccaagtattgcctgatagagaaaccatggagctgtttacccaagtcaacactacctatttggctacaagcagggagaattgatgccacagttaccgcattgggtcgtatattctgttctaacatcttcctgaacactagaaacgttttctctgtgtgtccattctgcgtgtacccggaaatcatagaattccaagtagcctgatctctttcagcataaccacttccttcaaaaagcttctgtgatatcctaattagacctgacttagaatacatgtcgataaggtaactgttcattccctcgaactgaatcccttgcctgataaggaaagcgtgagtctgcttcccgatctccttgtttctaagatttgatgcagccgaaagcaaagctgtcacagttatgtaatcaatcttaaacccttgcttctgcatctcgtaaaccagcatcaatccttcatcatctaagccattttggacaaatgcagagatcatagtgttccacgatacaacatctctctctcgcatggaaagaaagactccaaatgacttgtgcacagaaccacaccttgagtacatcaccatcaacgagttaacaatcacaatcggtagctctcgaaagttcttgctcacaaaaccatgaaactgcctgcctagttctacttgctgcaacgctgaaacagcactcgctgccaagaggtacgttacttcatcagacacaatctctttcgatcctatcgcttcaagaaaaagctcaatactttcaaccagacaatcattctgaacataaacacctatcattgtattccaaacctcgatgtttctctcaacacaagaatcaaacactctccttgatgactcaatatcaccaagctcagcatacatagaaatagccgaactaaccacaaacaagtccttcacatattcatctcccaatttaagcatcaaaccataaaaaacgttagctttcttaatgcttctcgaaatcgacaccgcaggaaaaacattaacaaagctaaccgggctcggttttacctccattctcatcattatcccaaattgcctacaagcttcagcatttctccctgttttcccataccaagaaatcaaagtattccaagcgacaacattcttcctacgcatattatcgaaaactttacgcacaacatcatactcaaagcaatcaggagcattcaaacaagaaacatacatattcatcaaagaattatgcacaactctgcttgaattctgtaaacaacggatcaaatgacaatgcacagctttaccagctttcaaattcttagtctcagcacacgccttgagtgtagaagagtaagtataagcatcacaattagtgaaaggtgccgtctttttcatccgggaatagaaaagaagagcttcgtgtggtagattattacaaataaacccgatgatgatagtgttccaaagaacagtagttcctttaggcattgcgtcgaacaattggcgaacaagttgaaggtttccatcttgcagattttgctagacgg

SEQ ID NO: 28248 - DNA, 904 bp, Arabidopsis thaliana landsberg
tgatcatataggatagatatcttggtgataaaattttcgggtagcttgtatgttttatgtttgtcttggtcattctgactatgaatcagctggattattttttttaaaaatcatttctgacatgtgcaaagagataagagcaataataaaaaaagaatgtgtgtgagtatgtccaaatttataaagtgagagaatgttagccaaaccttgcacatagccagacttaagagtgtaaactgttacaaacttacagcaaattcaactgactttttgtctgaaattttcctcggattcaacctcaaatcatccttagattgattagtttgttgttaaatgttgaaatggcataacaataattgtaaagttccaactgtttttaacttttaagagtctttgtcatgatttacggatttagcgtcccaatacaagaggtttgttgaaaatggacccaacacaaagagtcacatgcatgtagttattgatacagtgaagagcgaacacagcccatatactattcttctatgaacactatagctactcaagataattttttctgtgtaatcaaaaagcagaaaacaagaaaacgagtacagctgagcaggttttatcattgaatcctatgagtgaaagcgacttaaatagaaagagtactgcattctttgttcatacctaaaaatcactaaaattctaaccgcgttatagaattagcaattactctcgtatggtatggatgcatttaatactcttccttgcaagtttgaatttattattctcttgtaaacaatactttaaatttagtttcatttgtctatatgactaaaattttaaattcaaattgacatattctttaaatatgtatatttttgtacatgatgttaccatccgtcgacagtaatgacgttcg

SEQ ID NO: 28249 - DNA, 1731 bp, Arabidopsis thaliana landsberg
  unsure (1)..(1731): unsure at all n locations
gtattctagattttaactaaattacaatgtggtgtaaatataaattgaaactaaaaatatataaattactttttcttgtatttacaacctaaaaagtaaaacacatcactctcctctcagactcacaagttcacaacacacgcacaaataaagaaaagaaaaaaaaaacacatcacgtatcaaaatgttagttctaataaaacgaaaagctgcttaattaaaatctctaattctcatatgagcttcttttttttaactgcgcctacggcgcaatttagcaggaagaggattagccatctcgcaagaaagcctcagtttctcagataagtcaacgccgttaccatcggacggtccccattcaaactcatgtaacatcatcgccgtccaaaacataacggtagtaaaaccaagattcttcccggggcaaatccgacgacccgacccgaaaggtgcaagtctcaaatccgacccaagaaccgaaaactccacctcaccttcttttgccacgaacctctcaggtttaaactcaaaggatcctcccacacgtgtgggtcacgtgctatagcccacatgttgaccatcgcggtggtcccagccggcacgtgatatccatctacggaagtgtctgttatagacagtcgtgcccaagaaagcagtggacctggtggatgcagcctcaacacttctttgatcatagccgttagatacgtgagtgatggaaggtctgactcatccacggttcttgatctgccaacgactcggtcaagctcatcgtggaccgttaattgaactttgggatgcatcacaatcctcgctagcacccactcgaccaaaaccgcaacagtgtccgttcccctaaatatcatttcctaaacggaccaaaaaagttaatatcgtaagagaaatttttcttaatcatttccatgatttgatataaaaccaaacaattgttaatctattgtatacttaatacacttacttaattagtaaattttatggattcttcttagatgttatctagttgactaatgttgatattcatgatatacggattgaatagtgattaaaagacaaaacttacccaaagaacagcaaccatgtcggattctgataatttttctgaaccttgaagagaaagtaacatgtcaagaaagttacccgtggcagcacgttgttcatgtatgatacggctcaataacagatttactttcggtacgagctgcgagcacctaaaccggatttgttggaaatctaaaccggctaaccaaggaagatggtcggtccaatttaacgtacctagaagatcgtacccttcttcaaccaaaccctttaagcattcagattccaagttgttatttgactccaattcatactctctcccgaaaaccaaacccatcatgttacacaacgacgctgttttgagcaaatcacgcactgcacacgcggatttagggttacgtgcaaacgcattcaccatctgagtcgctatcacccgtctctgatcctccgattgtttgatttgcttcgggttaaaaagatggttcgagcctaaccaacgcagcgtacgccaataagtaccattggggagcaaatcccatggctcggttaaacatcaaaccgtaaccggtttcgtcaaccggtcggtcagcaaaatccgaactgtataagtatctcctttgccacggcagaatgacacgtcaccaccaccttagtatcaccgaggctantcgc

SEQ ID NO: 28250 - DNA, 1902 bp, Arabidopsis thaliana landsberg
actacattctcataccaaatagttttatcattcttaagagtatacggtgacgtggcacaagaggaaccactgaaacaggccacaaagctctttgaatcagcagataaagcggggtggccgacaagtcgacaatccaatttatgtggacatcaaactcttacgtttcttcatcctccacgtgccctcttatccttatcaaccgcccagattcttcccaatacaaccaaaatattggcccactattattagggtttaatatgttatatgcgtttacaaaatttctttgtgaaattgacgtattaattaaagattagactttcaggaattagctataagaaactcaacggagtataatctatttggggaagaaaacaagattaatatagttatgttttgaacgaaccccttttacaaaaaaatgttttgaacgaataactttgacgaaggactgttataccactatgacaattgttaaaatcactatttaacattgaaatatttatatatctaaaagtgatataactaatagaataatagttattcaaagatgactgtaattatgcggcaatgggcaactatatttcactgttcaaaccttaaacatacaacaaatgttagacgatataacttaggtgttgttttttccttgtagatgaagcaacggattttactaccttttgacattgcttccattatatttccaacacaaaaagtatctgaaaacaatgcaagtgatttcatcaaagctctacgcgtaacttcaaattccaaaagaagcttctcgcgaaaatacctatttatgttatgtttcactttcacacgcaaagtaaaattcgatatttaaattaagtacgaaaactttagtacatcagaaatgattctagcatgttcaagcaacgtagttcaatggttatatcctgtggagtgtggactatgtcttatcagtttcttagactcagtacgaggataatatctaaagattatatatgatatagacgtaatcactagtcaacccatttcaaaacatttcatatgatatgagattttaaaactggtaggttgtagacttctaattcatttctatatagttatagaatatgattcattgttttgcatactagacaaaaattgttattcttttaaatattctgctggaaaataaaggattcaaatcatattttcagttacattatctcattttatttgcaacaagagattaacctcttacacgaaataatttgttgtccacaataaaaatttgattgtttaagaaacaatttgatatgtatcatttttctttttttttatgtatcataagaaaccagaaaactacttaacatttttaagaaggaagttacagttcaaaaattattgcaattttgaaactatagggatttaaattcgacgtgatttttttttttggacataaaaattcgacgtgaaataaaagatgtatatacactcttttttttatcaatcattggacgtttgatgcgactcctttggcataaatatatatacaaccgaaatataacaaatcacttcaatgcccaaagatattaatagataataattccatggggccaatttttggactcgaagctaacttctgaatacagccacactatgggattgtaaaatgcaaaatatcacaggggtataatcgtagttccaagataaactgcctgttcagacatatgaaagatatgctttgtcagagtttcagaacaagtctttcccatgctcaccacttcacctctctctctctttcttctccactgtaacctcccaattcaaaaacaattataaaccaaacttgattaatatatatttctttatcatcatctcttcgaaatgcaagatattcatgatttctccatgaacggagttggtggtggggga

SEQ ID NO: 28251 - DNA, 1473 bp, Arabidopsis thaliana landsberg
gttagtgtttttgtgaagcctgtcactaagttctggtaatctagtttagggtttagtcttgaccgtcttttaggagatgttgtctctctatgttaagtaaagttcttgtagaagtcctatgttctttggtttaggttcgtgatagagccttttatcttcttccactgtagagcttttggcaatggcggtgtaacttcttaatccgccattacaactcttcggagttgtttttttgtgtgttatgtatctgccaaaagctctgttttttcccacttttttgtttaaggcactatcttgtacttatgaatcattgtaactttgtactctctattataaagctttcactgaacataattactaccctttgtaatagaacttgatccttacataattggatcattttgttgtgtgattacaaaatcttacgaataacaaaaattggaccaaagtcaatcgtctctccaagtatctctcaaagagtaataagctctgtcattaccaaacccaagaagctcttttaaaccgaaagcaaagcagcaaccatgtacagtggatagacaagacctgttgctttcatttgaagaagtttccatgtcatcatctttgtacatcactaaacctcttctctcaagatcatcccaagagtcatcaatctcttcaatcctattcaatacttcatctccatcctttggcaataccctctctctgcactcgtttaaaaatcgtttatttggaatgatacatcaatgtgtttccattaaaggaaagaatgagacttacaaattctttcgtttggatttcctagaatatcccttgctcaattccgcattgccggatacatggtttttgaacctaacctgaaacatgtatgtaacaaagtcttgtttatttacccaatattgtatatcattcatgaaatgagattaaaagtttggctataaaacctcatcaccgtccttcatcccataatttccgatgcaatccgtatcggtaattaacttctgacctccgaaacacaaacaaaaatgcccccatacgtgtgacctaacacaccattaaaaactcttgggtcaaattttcagtaaacataataagagataaaaatgtaataaaagttgaaaaatgtaccatgagatcttggagggtcccttcttggggacatggctgaaggcagtttctatagcaaccttgagatccccaacggtggccgaggtcaatacgtaaacatcttcacatagtagataaaattttaaattaaagttaaaaaaaggatgattaataagtagtgaccaaaacgaaaaaaaaaagatactatgatgaagcatttaccaaaggaagagccatctagtttgagaacggagagcctaatgggttcgttcggaagtttatcataagaaaaagtccggcgatgaaagctttccattatttaaaaaacaagatcaatggaaaatttagaaaccttggaatcagggt

SEQ ID NO: 28252 - DNA, 1444 bp, Arabidopsis thaliana landsberg
tgactcactttcaggatccaacaccttgtacttgtgaactggaagtgcatttatctcttcctcgctcatagaagttgtggaaacattatcagaatcaagtgctcttaaagtttcatagtctgttgcagcagaacaacttttgtctcagacttcaaccatagaaagcaaactactaaactatagactaataaaaaggaacaagcggatgatactgacctaagtcatcaaattcccgatcaagaagagccagctggagcctaagtccctgaagacgccctctcgtagcaagagcaatggaaggaggcacatgcaacctcagctcagtatggctaaagaggccacttgctgctgcagcctgagcctgagcatgagcttgaagttgttggcaagtagcatacatcctaagcgtcgttgccatcaaaaacaccccaagcacaagccacagctacaaaattaatggaaatgtcaaactcacacccgaaagacgactaactcaaaaggaaaaaactttaactcacgtatttaatcataccaggaaattaggaggcatctgatgcgaattgagaatcataaacagcaaaagaactgaaatacacaaaccaaacacaagtattaacaacatcacaactgaagataacatagaaggtgaaagtttgaattaccctgtaaccaaaaaagcgagggaattagaattaactggtcgagctccatgaacacgctgataccaaaagacccttgcaataagtatcattctaacaaaaaccattgtatatgttttcaagaaagcataccatagctcgtctttcgggtagaaaaccacccgagaatccgctttctaaatctcctctacttccccggaaaacaaagctcatgtcttccaaattcacaagagagcctgcaaaagaaaacaattgccactgaatctatatttggttctatcaaattaattcaaaactctataaactagaattcgagaaaccatgttgatcacagcaataaaggagaggcatttaaaccctatgctgatccaaacaaaacaataacacgaatcttttcacataagccaagagattgaaaatgagaaggtttcattcatggatcaaaaaaattgaacggagctagagatcggaggagaaattcacctgaaagtaggagaaatctctacggagaagagtcggatttactcacttaacataggcgtggtgacgacggagtcacgaaaatcgcttgtcggaccgagtcgactcggaccgagttatcgctaacctgaggatatagtttttgtcttcattaacacagaccattaacttcatatggtttaactgttgctgacgcactagcttaaaaacgtcgtcgttttgatgttgccacttattactttctctcctactctcatgactttatgttatgatgcaataatttcaccacaagaatctgacttaac

SEQ ID NO: 28253 - DNA, 1573 bp, Arabidopsis thaliana landsberg
tgtttcaccagatacaacaatttgctttccagcttcatcaacatagctgctcaattcatatattttaaagaaaggtgcggattaagatttggcatagaacgaggaatacaggcgagaacaagaataatcagagatagaagagagttgaaacctgctgctgtagtcataaaactcttctagctcagcatcttcttcatcatcaccatcaccataatgcagtttgcaatgactctttgcttccatatgttttcttacagcttctaagctgctgaatggacggcacagctcattgcagtacagacacatgaagtctctcttgacctaaatgatgagcaatgtataagtaaacaggagtaagaatttcaaagcttgacaacaacgaacactgaatggtaaattgatgagtccaaaccttaagaccaaggtaagtgagaagcccttcaggatccttgagatactcaatatcgggaataaagaaaccatgatgcttatgcatgtgaagcatacagctctctaaggtcttatgttttttgtcacacatcaaacagcaggttggatccagctcatacttatctgcatcaccatcatcatccatatcttcagcagatccagactcattcacattcaacttagacaaagaatcagaggcttcttcagcagccaattcctcgtcagaatcaacctccacccattcatcttcactatcatcatcaatggaacccctgtgttgaacacggcgaggaagttgcctgataatcgctatatcctcctctccgttgattgatgtcccttgtgaaacccgcaaaacatggctacgcgactgaagatgctgctcatgagccttggaactcctgtaacctttagcacagattgcacaagtataaagcataggtgcttcatttgatttattcttctcctgagcaagagcagattgtctagcctcaaacaaggcttctgtaactccaggaactccagccacctaacataaaaaattacagaaatacaaagattcaaatgcctagaagtaaccaaatctatggttattgaaatccttgttccttagtagaataagcttcaaaacaaattttcatataaactctacgattccataaccttaactaaacaatttcgatagcaaaatggaaaagctgtttctcagaaactttcatctcatcaccgacgcaagattttcccgagaaacagataggcttgagttcaaattcgatagagaaagcagaagaaatgaaaccttgcgcttgagattgtagcggtgccaatcggatttgtaatgaaggttacgttcttcttcgtccttgaactccatgttacacgcgttacatgttaaaccaggcatcttctctccttcaatatcgatcgattctagaaatggaaactggagaagaaaagaaaatcagagaaaagatagttgggaggataagatttgttgttgatatgtgtagagcaacgacggctcgtaaatggatcggcgattgtgtttgcctctaaaaaagcgtcgattgatgatgattgattgccatcaaaatgaaaaggaaggcgccccgcccattttaga

SEQ ID NO: 28254 - DNA, 1502 bp, Arabidopsis thaliana landsberg
tagctgatttcccagttaaataggaattggggccgggaataataaagtaatgtgacaatgaagcatccatgttttgatgggacctgaaataaccaaccaacaatgttttagttatatcactgaagaattgagaatcttctctctgcagaagtaagcaactactagaatagaaagtatccaaaatagaaacttctaaatttagacaggttaatcaaacagtcagattccagaatttcagcagcagctgcagagtacacaccaagaacatatcatcgagaaaagtttcacccttttattgggatttgatgaattattcataagcattaagaagaagctaccaaaagtgatgatttttattttctctttgatcaaactaaatttaggccagaaaatagcaaaaagagaaaagagtcaaatagcgatgagagagaaaacattctgagattttccggtaaaaccaacagagagaagaatctaaagtcgtaatctttcaatctcaatctttatcaagaaacaaacaccatcaaatcccagattccaaaaagtctcagacttttcttcccaggaacaaaaaaaaaaaaagagtttgacttgaaaaatttataaacctgatcggcgataggaggattaagatcagtagaaaagaggtaataattgaaatcatcaagagtaaggtttcgtctggtgaactttgcaatgtgatgtttccggcgaagaacctcgtcaacgattctctctgcttcctctagacttgtttctccttctcctccttcctccgtcatgagcttctgtagctgctccggcgacatatgagcatcgccttcggtgtatttctcgaaaagatctctgacgtcttcgacaggaccagactccgtcatcctgaacttccttgtgaagatcagacagaatttgtaactacccatctctttttttccttccatgtttgtgtatgtatcgtcgtcttgttcagatccaagaatgtgattctgattctacataaatactcggattgttcctgagttttaatattattttaaaacttcgaaaccatttcagagaaaacctcgtcaaacctcctctcttacacgctcacacctgaacacacaaaaatacaaaaacaaaaacttttttttactgaatctcgttctctgtcataatttacaaattagtctcctcgttaattttaaaaccagggaaaaaattgactaatttaaaagggatgagtaaaaatagtagttactgagattatatcgccaggtgttcattgtttttgtccctccccataaataacatactacaaaagatattttcattttcatttttgtgtgaagtgtgaacacaaaatcgagactattgaaaaaaaaaaattagatatgttgaaatggcaaagcaacaaaataaagaactggtctggctacattggtggggcagatgcagatctaaatcttttgcaatttgttgtgttttgtattgtctttgtttttcttctctcaacagaatac

SEQ ID NO: 28255 - DNA, 1733 bp, Arabidopsis thaliana landsberg
ctaattccattggtagttggagttaaacagttgttcatttcagatttaagcaaggattcgaagtcatgaaaggggatgtgggtgaatgaaaaggatctaccacaaatcttgaaactataccacaatgtttaagagaactttaggacattacaacacattgacgatgcaaggagaacttgctctcgttccactgtagttaaaagtcttagagtgagaaaagattcaaagtcatgatctaccacaaatcttgaaactaaaccttcgtcttttggagaaaacatataatagttgtctctccaaaactcacctagttaaaaagctcttctcaggaccaaaactggttctcttcgaaagcttctgagctaaacatctaaaccactatttcaccatcttcaacgaccatttcctacaaatcactgtcatttatcaaacaagcatcagccaccaattcatcatcaacacctgagttgtttgcatttcgaatctcactgtgttcgacattcatgttgtcatcagggtcctcaactttcataaagctttgtcttcctgtctgcattgttttgttaatctcatcttctacttcactttcagtcaaatccttctcatccatcaaatctattttcgttatatctttttcaaatgacttcttatctttctcttgtttagcctcaacctcctcttgatgcagttgcaagtctttctccaattggacgaccccaacatcatcacttttctcaaccattatattaccaacagaatggtcctgtagattcttttcagcttcactttctgacttctcctctccaattacttcaggcctagacccatcgtggactgaatgatcctcgctctggcttagattgacttgcgatgagcctccttcaatatcagaacttggacacttctctgtggaagccatatctctggatataggttgatgcactacggccacaccaccactactttcaactttgctttcttgagatgtaggaattctctaataaagctcaagtatttggcctcggatatctgaaaacgcaaatgataaataaaccacatcagcaaggtctacagtcatcaaagtcaataatttttaagaaaagaaaaaagctaacacataccttctaattgacaagctgtgatatcaaactcttgacacaagacctctctgtaagattgtaagtccactgttggcagctcagcagcaaggagaatagcacctgccgctatgtgatgaggctgatactgcaggcagagtgtcgttcgcagactgcaatagacttgtgattgtatgaagaaggaaaacacaaggcgtatggagaaccatcagaattcaaaaagctttcaagtaacataatcaagcataccaatcgttgacaaaattccatgcaaattgggcaagttgggtcttagcatcttcaaccatatatttcttaattgcttctacaagaggtttataagggtggctaatacagagatcaaagttcaatgtagaaagaacaagctcctctccgattaatacaagctttttctgttggtcatatacttcctgcaaaagtgaaataacattaatatgcaaaagaaagtaaacaatagatcttttcaagacctactaaactagacaacaaagaaatggacaaggagagttgtaggatcggtagtatgaaaagaagaaaaaacctttctctgagcaccagcaagatccttcttgtgtattcctcatatgaggcaat

SEQ ID NO: 28256 - DNA, 1970 bp, Arabidopsis thaliana landsberg
  unsure (1)..(1970): unsure at all n locations
aacaacaagtttgaaaaaacaaagaatacaacaagtccataggctccatgaaacaaatattctctacataccatcgcatgacaataactgactccagatagaagctgctgaaagaagaaccgagcctgtttacaagaagagatcaaaccataaggaaaccgggacctgtaaacccgataagataatcaaagacaaacctcatcttcactaaaccgtcctgcattgcaaatccgctcgtaaagttcaccgccagaagcatattccattatgatagccaaatgagtcggcgtcaaaatgacctatcctcaagtacaagaaacagagtttaaaagaatcactggcttaacaaattgcaaaaagacaagaactgaagaaaagtgttttacattacctctttaaatctgacaatattaggatgccttagtgacctgtggttaatgatctccctttgaacattttcatcaatctgcaactcccatagttacaagtcattcacaactgtcctaatctacaaaagcagaacactcaaaaccaactaaaaaatcatatcaatatccaaaatttcacataaatcaaaacttttaaatcattattcaagtgttgaacattaggaagctcaaatctttaaatcacattaaaagcactcaaaagcataatcatcaaaatctaaaaacgctaactttaactactaaaccactaaatcaagaaagtgaaaactaaaccaaacactaaaaataaacgatcactggactaaataaaatatcatcagcttccaaaaatagaaaaagaagagatttttaaaaatgaaaccttgtctcctctctcgatgtacttgacagcaacaagctctttagtgagtttatctctcataagacgagcaacaccgaaattaccagaaccaatatccttaacgaagtcatatcgatnnnnnnnnnnnnnnnnnngcatatccaacggtcctgtggtcaccggagctcgatccatttctgatcacaaaaagagaaattcgaatctaatacccagaagagaatatgttgttgttgttgttaagtcgctggaatctaggaagaagaagaagattcgagaaaataaatggaaaaatatcttcaagaagagaacgaataaggaaagagaggaagaaaaaaaggcaataattggttgccccctagagataaggattgtcccaaaacgacaacgttctgttgctttgatacgacaagagccgccgcgttttgatgattgatgttgcttcctaagaaactataacccaaaaatattaaaattaacatgaaataaagaaagaaaaagcacgatttcactcgtccttgtctcctaaaatacaaacccgacaaaaaaaacccaaaaaaaaaaaaaaaaaaaaattctctaaattctctgtatttatctttttcgatttctttctatttttcttcttttttcccattttgagaattcgtattaaaaaaaatgatacaagtaagaaaaagaagaagatattttggttttaaataccaaaatattctattataaaaaaatagtttggaggaaacagaaaaacttagttcataaggaaaacagaagcttgaaagtcacgtgctgcagaagcggccatgtgatgaaagaatattcggttgcattattccgttacttgacggcgttagaagtagacattgacactgacgtggcaacttctaagcatttttttaatttagttgatgggcctgcctctaatttttacatagaaaaggcctttagtgcagcccaatctcaccatggatggcttggacannnnnnnnnnnnnnnnnnnnnnnttttaaaatttaattgatgggcctgccttttattttgttaaagaaaacgcctaaagatataagcaaaaggccagcccagttacaacattgatgattaattggatgaatagcattttatcatatttgcatgaaatatatagtcaaatcttaggtcattga

SEQ ID NO: 28257 - DNA, 7891 bp, Arabidopsis thaliana landsberg
  unsure (1)..(7891): unsure at all n locations
ttcgaagataccagctgaaattcgttcttactggatttacttttgaacaccacgaaaaaaacctctcaaagaactgcaactgaagctttcctcaaacagctctaatgggacatcacctatgttgttggggttaggtttccatttcgcatactagaggtcattttttaattcttccaccgacattgatgctaatagaggtccactggcattggcatcaacattatagaggggtaccattacccattaaaatatttgcgaattttttgcttctatttaattttaagaacgaaagagcaagaaaagaaacttaaactactgacattttctcctagctataattattttttctataaaagttgttgatatccgttgctaaactcaagcaaccggtccacataccttgttgttatctggcatttacctcttgattgacacgatttctttttctatctttctccttcttagccagcgattatagggtttaagactagagcggttggtattctggtgtgccttgtaaaactattttttcttgttttaatagaaaaaccaagaaaatacatctatatcatttaattggagggatattttggctaggtaagcctttttagagctatttaagctattaagaagacaaaaaaaattctgcctcatgcccttcattttatgttgtgacaaaaagttaaaaaacaaaaactaattagggtaaatttgaaaaattctctcgactttcggtcgacccaagccgagattttacccggtccatgtaaaaacatgcatgcaatatacgaaatttgacctgaattgatcgtttctaacccaaaaacatatttgttttaaacctaataaaacttctctttgctatctctcaatctcctatcaggatagattctcttaaaagagcaattatcacaaatccaaatccagttctggttttttatgacccttcgatagcattcttgtttctgctgtaaaaaaaaagttgtttctgttgaccaacttgactttcacaaagcatttgacacacagtttgtgtcggttaagctatggctataactttaacaattttttttttttatatgaatttaaaatttatttaccaaaaaaagacggttttacaataaatgcatcggtaagtcaagaacggattagaatacataatcgaaagaagtggaaactagcgacaataagtgctgatccaatatcgcagcccgacctcgaagtcgggtgaaccggaagtaaccaaggtacacaaccaattccgcatattcttatcaataagcttggcgagtttaggagcatgtataggtgactctccatgccgtctcccattgcgttcatctttaacaattttactaatggtgcttcaattttatgttcacaagcttgtgtctgtttttccttgatttgctttggctgttcttttttttttcttttgttaatgcttcatggaatatgagattgaatctggtgagtttcttatttaatcgtgttaccatcttggcaaaaaaaaaaagctctccttcctagatatgtcattactcaagctttcctttgtgatggaaatgaggaatattgataagttgacactttagcctattgggatcatcgatatatcagttttttttcttctatttagactaaggggatttcaattttgataagatgacactttagccttcgtgcatttttaaactattggtcaaatttattaaagtgtttgttttattcgtattgcattaaactcttttgtttatattcgggtttgatatttatactttgtgatttagttttttcaagaaaataaaaaaagttgaaaagcacactacatacacatgttagacattttgattggccacaaattttgatttggttcgtttagatatgtcggggcttttacaggacaaggcacatttgaggcccaaaatttgcaaaaggcacatttgatatgggcttatgggaatgggcacatttaagagcatgaattgaccattttacccttttgcgagttgaagcttagtttgggcgggattaggcgtaattcgaaatttctgacacccaaatctactaccgccgatcattgtgcaccgttcagtggcctcaaaattggcagggttgttcacgcatgcgtgtgcatgatgggggtaggttatattgacagggaatttggttatataagagttgtttatgttgtcaaattggtaaggagagatttttccaaaaaacctcaaaatctggctacacaacttgatgctagagagggaattgcttaatcctgcaagaggaatcgctagacgactctcctggggagatatgcaccgagagataagtaaaatcgttgagtaaattgtaataaattgtaaggtattgaacctgtctctaacaaacaatagcttagtctctgtaagtaagtaattgtttagtaaattggcatgacgagttgtctgtaacaaacaatggcttggtctgtaaaaaagaattgcttagtatgaggagtagtttgtttagttgtgtgaagagtataaagtagttcaacttaatgtgtaagctattgaagctgtctgtaacacaatccaatggttttaattaagtaattagactcatatgttaatgtaagttgtctactgtttcggtttttgtgaatgtaattacactcacctgttaatgtaaattgcatttcaggctcatattctttgatttaaagttctatgtttccgtgacagggggatgacgtagctgtgtgcgttatagcttgttcctgggaatgttcagacaaaggtgtatgggaatttgtggttgcaaaggattgttatgccaggacgatatgtatgaacccgaagatgacttatgcagagctgcaaaaacatgttagttcagagtttgaacttgatggaaacaactggaaacccaaaattagctattggctacccgcatagctctctgtctttgtagtcaatacaaggccgcctgttactgttgcaaccaacatgggtgtagccaactttcttagggtaagggagagtaaccctcagctcaatttattgctatcgcttgaagctcgaccttacttggttgatggtgtaattgtggatttgttggctgtctgtggtaaggagaagagccaagaggacgagatgtttcagtccaagggtccgcaatcttctaagtgtagagctgagtttcaatctgcaggctcctatttagcagaaagttggatgaggaacatcattcatggaaatgggagcaacagtttggttagcacagaaaccccagtacatgcacctatgcagattgtagaaggtgacacaggtggttcagttgcagaggtgaatgagaacggtggtgaactggtcctatgtaccaatgttagtggtataataaatcttgctgatgcagccacaccatcattgtctaactgctcagatgagattgaaaactttacagatgatgccacanatgaagatgaggcagatgagccttcatctgaggatatgaggatgttactagaggtagaagaattggagagactggagctagctaagcagaagaagaaggggaagagtaaagtgtttgacagtgatgatgagggtcatgatacttcatacacaaatgggtttagtgaaggaactccagatgaagatgaggattgggagtatgagggatggaaccacctcatggcgcatgatattccacctgggagtagcactcctgctgctgtagttcaaccagaagtggctaaaattgaagacacagctactgcaacaagagacatcagcgaagctgttctgggataccatagggatcatgtagaaagaactgatgtcgagggcaacagttctgaagagaatgatagtgtattaggtttctctgatggtgagccagtctttgatgattgctacaatctgatggttctgttccagcgtctagtgaagaggatgctatctacataggacggatgttcaaagacaagaaccatctgcaaacgactttagcaatttattctataaagagacttttccatttcaagcagacaaggtctgacccggggaggcctatatttgaatgtgttgacaagaagtgcccgtggagggtatatgcagtttcagcaggaaaagagtcaaagaactttaaagtccgaacactgactttaacacacacctgcacaattgcatcaagagcacactatgggaagcaagcaacatctaaagttatagcgaaggtgttggagggtaagtatgctaacggtatgcccggtccacgagctgtagatatacgagatatcgtattgagtgagctaaaggtttcagtttccgacatgaagtcttggtatgccaaagaagccgcaataatgagcactagaggaagtgatgaaaacaactacaaactcttgtctggatatatgcatttgctgcaagctcaaaacccagggactaagtataagttacagtatactgaggggttagatggaaagaagcagttcaaatatttattcttcgctcttggcgcgtccattgcagggattcagtacatgaggaaagtggtgctggttgacggtacatctatcaagcataagtttaaaggagttctgttaacagctagcatgcaagatgctaacttcatggtgtttccaattgcgtttggcattgttgatagtgaaagtgaaccagcgtggacttggttttttaggcagctcagtgcgattatggtagatgctacagatttggtaatcgtttccgataggcatgcttcaatatatgctgggatagggcaagtctatcctaaagcttttcatggggcgtgtgcggttcacatagaaagaaacgttagagccaagtttccaaagaaaggagtctctaatcttgtcagtaaagcagctcgagcctttaatgaagctgatttcatgaccttcaatacagagataggaaggcgcatcagcgtctgtgcggattacttagctggaatatcaaaggaacactggacacaagcgtactgcgatgcaaagcagtacaatctcatgagcaacaacattgctgaggcattaaattctgctttggccaagattattgagctgcctattgtaacattggtggaaggaataagagctaaacttatgaaatggttttgtgtgcgtcgtgctaaagctgtgaaactcaaagatgggataacaccaaatgctcacaagctcatattgcgccatcatgcaggctcagctggtttggctgtgcatccagtctctccttgaaccttccaagtcaacagtgttgaggggactgtgttttatgttgatcttcagaataaagtctgcagttgcaagcagtttgagaaactgcagataccttgttgccatgctctagctgcagctgcacaaacaaagatccacataccaacccttgttggtaaatggtacagagttggggtttgagaaaaatcttacgttgagtttataaaacctgtgccaactcagggtgaagaagaagttgctgtggtgatagaggaatcagagtttattccaccagaccatagtgaagctcctgggcgtcgcaggaagaggagatttccttcagctggagaatacatggtaagaaaataactgtaactatataagtgttgtttattagctctgctatcaacttgagttagtaaaactattgttggtatgttcagggtgggaagaggcagaggaaaggcagaaacaaatgcacaagatgctttaagcatggaaacaacagggcaacatgtcctttagctgtcggataaggtactgtgtgacttaaaaagaagagagaattattttgctatagtgagtagtgtatgattaacaaaggcgatgctggtttggactgtctggtaatatggttaggctgtttgaacattgcaggtggtgataagaaggtgctgatatacataagcaagcagtagaacgatattaggtagtagtgtatcttctgatgtttgagaagcttgtggcgagagtttctgggcatcagttttttgttaaaaccttaatggttgagcagaacggttttaaaaatttgttggttacatccacaaattttgcagaagacctgcagaaattaagaagtgttggtcttgtggtgaaatcagttctagtcttctatgcaggattagtaagcggttagcttttggttcgagattagtgtgggacattaaggtgaatttcctctctcctgttgcagggtcataagtttttggttaaggcctgcattgtaatatgttttggtttggttaagaaccttaattatgtagcagggtcatcagtttagtatgggacgttaaccagtttggttaatggcagtcccatttagcagtgtgaaaaatcttttttttgtaactcactacaatgtaatcagcaaaatcagatgactgtaatcagcctttgtctactttatgaatgtaatggcttgcttgtgtgaaatgcgattgtgtttgtaatgtatgaatatatttgggaattagtaattatgaatttgatgtataaagtcatatgtagatgcataaaaagaagaagatagcttagataaaccattaagaagagagaaatcaaagtacaaacatttgagttataaatcagatacaagaattgagtaaataggattagttcttaggtggacaaaaagctgagaacaatgagtcataaacaaccgacacgaaagttggatggaggattgagattgaacttagcagaggtcatagatttcaaaataataatggacgtgtaagcacaatgggcaagagtcccaaccgttgttgtggtccaaaccacaagcaggaagaatcatgcccttgtagcccttgtaagcgtgtagacccggtgtacccataacacggatatatgtgcaaacctgttctgcaattagaattgcttctccaaaatcacgaaccctatccaggaatgtttttaaaacccgtatcccaactttagaagaaccgcaaaggcagaggaataagccaaaggcaaagcgagcatgtatgctatgtaacgcagctgctgccagcaggtcgagtgactgaacagaagggccttcttgggcagcaatgcgcagggattctagatacttggcggtgtggttctcagccaaaacacacctaagaaaaaaagaacggtacggagaatctgtattggccatagacctaagctgaaagaactcacttaaacagacttcagataagacggaattagagaagacaatgttgcagagagtagatcctgcagcaaggaatgggccaagtaaacgaaaaccagattgcccaaccttcatgacgatatcagtgagcaaaggtattggaatgtaagaagacattggagagataggagggtttaaagtttcagtgtttacaatgaaagagagcttgtttctggtaaattaggcaaacaatgatgaaaatgttggtggtggttaaaagtataagcgttggatgttacatagagttgttgaagtgaaggtagtaggtcagggttaaatggggaagtaattgaagttggtgtaaagacagtaggagttggtaactctgtggtaaatgtgttgcgtaataggggataaagcaaacagtgggatgagcaatagaaaagatgaatttttaagtaaagttgtcaagattgagaacaaactgatggactgagtggaacttgtagcaaaacatagtttaaatacataggttcatacaagcgaatacaacagaggaggaaaacacaggaaataggttggacttaagcgtaaaatgagatttttgtgaagatattaacataaaacaagaaacatgactgagtaccagtacagcaaacagtctgtgcaggggttatgcatttgacatccagttagaggacaagaagggtaaacttcaaagtgccaagtggtacagtgtgaatgaa

SEQ ID NO: 28258 - DNA, 1511 bp, Arabidopsis thaliana landsberg
gcgctgtttcttaagactactctgttcttgatcctgattatgatgttactgagcttcgggagctgcaacggtggaatcttgacgtgcgagatgcaccatacattctccgacgaagtcaatcaatggtccgattccaccgggagatttgctaagtttccccctaaaggaagcttataatacttcaacgctctcgtcctccgtgattggctaatccgtggccgtcgtctctccgagtcggaatcggaatcggagtcgtcgcttactttctccgacggcaattccacttctcgtatcagctctctcggattgttagtttccttttgctcacaatttttgataaaacttctctgttttaggataagtctgattttattttattttctgtttcaatttttctgatatcagtttgcattacacgacggtgaaattgggtactccgggaatgagattcatggtggcgcttgatacaggaagcgacctcttttgggtcccttgtgattgcggcaaatgcgcaccaaccgaaggagccacttatgcttctgtaagtttaacactttaagcaactacacagttgttgagtttactcatcttaccaattgaattatataagtttccatcttgattttgggtttcgatttgctgtgtttaggagtttgaactcagcatttacaatcctaaagtttcaactacaaataagaaggtcacctgcaacaacagtctatgtgcacagcgtaatcagtgccttggaacattcagcacttgcccttatatggtgtcttatgtctctgctcagacttcgacatctggtattcttatggaagatgttatgcacttaacaacagaagataagaatccagagcgtgttgaggcatatgtcacatttgggttagtagctgttagcatcttagcaatggcttcttgtgtttcagttcgatgcagcaagttcctgaaaatgtgaattatgtgcagatgtggacaggttcaaagtggttcttttcttgacattgcagcaccaaatggtttatttggtcttggcatggaaaagatatcggttccaagtgttttggcgagggaaggtctggttgctgattctttctccatgtgtttcggtcatgatggagttggaaggatcagttttggggacaagggtagttctgatcaggaagagacaccgtttaatctcaatccttcacagtaagtggtgattcacttatgcgctaaattggaaattctgttcctttgtggatggcacctttaagccgtggttaaattcattgttgcagtccaaactacaacatcacggtgactcgggtacgtgtgggactactttaatagatgatgagttcacagctctctttgacaccggtacatcatttacttatttggttgatccaatgtatacgacagtctctgagagtgtaagcatctaaacaccatcatattcgtgtttcttccgcatgatgctgagttttgataactctatgattcacattatcttcttcagttccatt

SEQ ID NO: 28259 - DNA, 1345 bp, Arabidopsis thaliana landsberg
tataaacaaaattacgtatcaaactacgtttatttcattgaaagagcaccaaagttttctcctccgagacgctataacttagcattgctcctaaacaggttatgtatctgccttgaatgtcaagagtaagcaaaagtaatcaacttgtatttggaaagtaatatattagtgcgtgagttagtcaaatgatagtgcacaaaactaaagccaataaaaaagggacctgaacccctcatactatatgtataggacccactttgggcaagaactcattggtactgtcgctgaaaaagaactcttgttcgaggagactcattcacatctgtgggtaaccaaatgccaatcactgtatgctcatcaacctcacatcatttcatatcttaaagtctctttttcaccttttttttttatacacacatacaaaaggcagtagagtcaatacggtggccgagccagctcactttagtctagcccgctttagccctgattttactacatcttttttttgtttaacatgatggacctagactccaagataagcaatgggttaacccacgggcttgacatacaatgacccttggaaagaatacaaagaaaagcgatacatacttgatgcttaagtgaaatgtaagtccataaacgatcaaggaaagatcctttggtacttggtctctcttttggaatcagactgatcatcacagtgaaccctcttcctgtttagattattcccacaactatcttgtgacaatggtgacccttcagcaataatcaccggtggaatttcaaaggactcaagttgtggtggcgggtgacgccattgtggaagctgtccagctagaagtagagtctgaagcaaaggccctgccttcaccaccgccttaaaaagcttccctttctccggtaaagtcatctccggaaaatctaactcgatttccaccggcggttcaaaagatgagacaatgctttcttcaccatccgatgagtgaaacccattgatgtttggatcttgctcttcgtccgtttggtgttgaaggaggaagttttggtcaagaagaatccttttgtatcgctcttgtgcttcatctttctctttgatagctttgttgagaagatctttgagctgcattatctggtcgtctttggcaatgagttcttcactggctaccattcttgtttgctctaacgccattgttgtatgaagcagagaatgtctaagctcttctattgtcatccaaccaaaataaacagtttgagttttggatgatttgagcatgctataatagataagaatgtagattggtgtttagttatttacctttataccaccgatggtctagttgaggat

SEQ ID NO: 28260 - DNA, 1257 bp, Arabidopsis thaliana landsberg
cgtaagaccaaaatttacccatataatagctaaaacaaataatcagatacaagaaattacgaaagtaaaccactaatataaggtacaccactctgaaccatccaaccatctcctaacaagaaattctcgactgtgaaattattcgcatccgtagaattaatcacatgataaccgggccaaaccactcgatctgtagtacttgaaccggaaccggtattgttatactcagcatagtacaacgtactcaatgcgaaatctccgttccattctctccaaccaaccggttcaacaacctcgtctatgtacgattgcataaaaaccgtacgtgaatactccttccatggtcgtcccaaatacgttttaaccgtatagttactcgaaaccaaatcatctgccggtttaatcgtacaattgtgaatcgaaattcccgtgttttgattcggatcagtacgaccttgagctgtaatagcgttgaactggttctgcatcggttgtcttggatagagattacagtcttggaacacaacagctgcattgccgaatatgaaatcgactgttccataaatgtcacattctctatagaactgtcttagtgaatgtgtgtataaagtgtcttgataagcttcgaaactgcaactatagaagattgaaagatctgcactgctcctcatagctacggcctggtgcttctctggtccagcggtatttcggaaagtcatgttcacggcaacgaagttcggcgatgtaacagctgagaaaaaataaagtcacaatatttctataagaaaaatggtagtagtaattcaataatgcgtcttgtcatctattcactacatgtaatataaagtttgtcctatagtgaaaaacgtgcaattatgatccgaactactacgcacgtaaaaaagtctataaagtctgaataatttgtgtggttagttttaagatttcatcaactcatcatagccatgtgtgtcgtcggcaacgtaacaaacgtgccggtgactattttttacttagattatttgaattgattgactaatattttattattatggagaacatatttcaataaggtttattcttatctaactatatcaaattatactcttgaataatttaaaaatactattctatctgcttttaaagatatttttttagaaaaatcactttaaaaaacgtttaaatgtgattataaatatttatttatttttacgtttcttaccttaacatgatttaccttttttgaaattaatctta

SEQ ID NO: 28261 - DNA, 3136 bp, Arabidopsis thaliana landsberg
  unsure (1)..(3136): unsure at all n locations
atctctctgttcgattactttttcaacgagtctcagactctcccaaacatgctctcctgcaatctcatcatcaaagcacactgcgaccaaggcagcgtcgaccacgctcttgagctctaccgccacattttgctcgacgggagtttagctccagggatcgagacgtacaggatactgacgaaagccttggtcggtgctaaaagattagatgaagcttgtgatttagtgagatccatgagccgctgtgatttcgccgtatacgacattctgattcgagggtttctggataaaggcaaattcgtaagggctagccaaatcttcgaggaattgaaaggaccgaatagtaaacttccatggcgaaactatcacaaggcgattgcaatcttcaacgtttcgtttatggactactggttcaagcaaggcaaagacgaggaggctatggagattttcgcaactctcgaacatgctgaattgctcaacaccatttccggaaacggagttttgaaatgccttgtggagcacggtaggaaaacagaggcctgggaattgttcttagatatgatagaaatctgtgattccgagacggttggcataataatgtccaaggagggttttttcggcgaaaagactatcccgtttgagcgagtgagaagaacgtgttataccaggatgatcgcgagtctctgccaacaaggaaacatgttggaggcagagaaactctttgccgacatgtttgccgacgttgacggtgatgacttgttggcaggacctgatgtttcaacattcagagcaatgatcaatggttatgttaaggtagggagagtcgatgatgctatcaagaccttgaacaagatgaagatttctaatctcagaaagctttctattcatcaagccacataactagactctttattntatttttatccatgttgattctgaaaatcacacaataaatttgtttaaagggggtaaacaaatttacttaactctctctcgctatttagtgaccaaagattcaatgaaaagaagaacaaggttgcttagagacaaagttagggttttgcccaagaacaatgaagaaaactagggtttttagtattaaatttcggatccttagaatagaggacaaacccctctatttatacactattaagatggttaaaagatttgttaaacttctatttcttcgaggattgaatcttctaatttcctttatctccaaagacttcctattttcaaaggagaaaacttctttttcttcgaattaggaagtcggctagacggtctccctacttcgggctaaagtcggcaaatgacctccttattttggcccattaacaggctaaaccgggataccccggtttgattgaaatctcagtctaattcgtagttcctctggtttaagccggtattgtcggaggtgctaattccggcaccaacacacatgtttgatttgtgtcaatcagaaataaatatataaacaaatataagttaaagacgaagtctgttacgcatggtaaaggcaaaatagagcgtttttgttgcttcaaagtacaaactttagatgtcaatatcaaagagtatgacataagtaacttatatcttctctcttctatatgtgaaaatgaacaactatgtatttcaatcatgcatgtttctgcaatttagtagatgaatcttttgttatatttcggttagtataaatggccactactactggtttattgatttgcagacttatgaaacaattaaggtcgacaatcaacataattaatagaaacgataaacttaatcaccacaccacttttgtcagaaaaaaatcacaattttttttgatacaattacttaatcgatcatttgacatatatataaagtctgaatacggatttgcatttgagtttaattaagtactactgtacgttgtaacatgacaagtgacgaatagcagatttgaaaatattattaaaagaaacaaatagatggaacatagctagctacgtacatataaatgtgaacttgcacaaaagaagatgattcaattccatttatggcaatgtggctcgaccgtgattaatgctacccttaagatgagatggtttctgtttaccaaacttaaacttttatgttggagttttggaggttggcatagaaaatgtattgatttaaagtaatgttaatgtagtacatacaactattcattgtacaaaaaactaactgttcacaacaagtggtttttctgtcagaattttcagttataggacgttactacattacaaatacagcatcagtcatcgattacactcaaaaccctacgtggccgaaaaattgtcagtctataatttgaggttgtgaattatccattaaataatacgccccagccagtgaaatcccaaacgaatcatttcatatgattacatgtatattaatcttttacaaaaatatatattaaagtatctgagtgagtagttattaacaagtgttgtttagaaaagttggaaccaaatactcgtcacaaatcacactaattcatttggtggtttatattactaagctagcgcaattgtgtaaataaaaataagtattgattaccaccttaattatgagtagttatacggttgtaattttcgaggtaccgtacaaaagagatttgaggatcagaaacaaagaatgatgggaaactaattagttttagaaacataatataatgcgtggcttataagttactaatcttgtaataatcaaattaagtggtttcccaaaaacaagcaaatcacttgtgttgtgtgtcatgcttatatacatacattacacaacctaacttaatttttaatatatattttctagaagaacaaaaactgtccattctttgatttaatgttagccattcagaaagaaaaaagagttctcaaagttacaaggtcgaatatcggtaattaacttgctttggttatgactagtgacgactacaagagattatggacctatcaccaaaaaccaacatcttggttatccaaaaaaatggaaaacacaagagactctggattgactcagagtccgaacaagttcttgaagtctcagatgttatgtgtgtatccacatgtggccaatatcaatggatgtaacccaatgaacaata

SEQ ID NO: 28262 - DNA, 1717 bp, Arabidopsis thaliana landsberg
aacataaaattcgggatctgaataaaaatggtaaaatgtttcaatattttggaaatattataagagaggaaacaggtcgttctcaacactcctctccacaaaagtttattcctgccgatcccaaccaaccccaccaaccagataagacacttaggaactgagacgttcgaattttacccaatttcttcagtttcttaagcattgagtctttctttgagctcagcagcgactgcatcaatgaactcctctgtgttcaggtacgtgtccctcgaaagcctgaaaaaatccgacagtaaattaagtgatcttgatgagaacaaggacgtaaatagaaagtgttgaattgattactttgagccgtgaatgatgagtgcaagatctttggtcattttccctgactccactgtcccaacacaagcggcttccagcttctcagtgaaatccaagagttttgcgttgtcatctaacttagccctgtttcaaagacattagcttagacaatcctcttccttctaatgaaacattattaagcatgttttctttttgttacctgtgtgcaagtccacgagtccaagcaaaaatagaggctatgctgtttgtgctggtctcaccacctttctgatgaaccctgaagtgacgggtgacagttccatgggccgcttcagcttcaatcgtctttccatctgggcagacctaatgaaaatacacaacaattgtaaaagcggaaacttagaatcatgtaacagcctaacaaagagattatgtgacaatatagctaagaacttgtgagaattataccagaacagatgtcatcaatccaagtgacccgaatcctaaaacacattataagaaacaattagttaacaagtaatatgtaagatagacataagcgctgaaggacatattcatttacgattacactaaccttgtgccaagaaatcactttggacatcaccatcatagtttttgcatgcccaaacatagcctccctcactgttaagagcgtaggccactcatatcatcaatgcgacggtgttcatacctaaccaatttaattatttaggttcttatcagtaaaaggtaatataagggaccatgctattccaaaaatgaaaaaacaaagagacagctcaccatattccagcagcatcatacttcgacttgcagctggcttcatagacttcttggaagatgtctttgaatctttataggaaaacaaaaatgtaaccaacagcaaaactatctcctccaccatatgagcgaaaagcctatatgatatgaaaaccaaaactaaatgtcgcatacctgccatcgtatttcttaagaatggtattctttgtgctaaggtaaagtggccactttttctcataagcagtgttcatcgatgcatcagcaaaagcacggatggactgtattataagagaacatcttagaggacaatctccaaaaagacgagttatttgtactgtagttggaagaaagggtaagcataactatacctcatcagtggtgtacattgccatagcaacaccaccttcaccagtaaatgtaaagacttcggtttcagttttcccatcttttccctctgaaaatcaaagacattaaagattataattaatacataatgacatacggaaaaagaaacgaaaaagagatttcaaaaattatgcaatgccaactctaaacgagatgaccgatgaaaggcagtaagtataca

SEQ ID NO: 28263 - DNA, 1638 bp, Arabidopsis thaliana landsberg
gacaacaccacgaactcttgcttccttctcttgtttttttttatttctctcttttttttctcgtaagttttatttctgggtctgatggtaggacccgcatgagcctcagataatctggggttcctttttttttgttcttgggagaatctgggtttataaaaaaataaatacttaatgatataacaaaagaaaataactaaattagtgtccgaatattaagcttgagacgaagaagttactcaaaagtttgttttgtttcctgcaaagttgattttgtcaaaatcattttctgattataaaaagctttgtaaagtttgattttcttttctcgttttttttgttctcttgacgttttgtgaaatctgttatgtcttttataaagtaatgtggcccttgttcaatgatgattcaaatttattatatattgttaagtttaggtttagtgattttacctaaaattgaaagatactcctacattaattttgcaaacttaaaagtaaaaactaaagcttataatgcttggaatattgaaaatgtaatgttgcaggtacaagtaacgttagagaacatgcaagagtaccgacacgtggaaaagccagggtggaagcttagctggcattggctcaaccaagaagtgatatgggacatgaaaggagctgagacgacggagcaaggtaattgctctgcctttgcctccagcggtaaccttcctcactgctgtctcgagcgaccaaccatcgtcgaccttcttcccggtgcttctctcaacgttcaagttgccaattgttgccgtggaggcgtcttgacttccatgtctcaggaccacgccaatcacgtctctgcttttcacatgacagttggaagctctcctgatggccctgaggagttctatatgccttctaatttcgatataggggtcccgggttatagctgcaacaatgctacatccgtggccccgactaagtttagtactgataagggccgtcgcaaaacacaagctctaggtaaccaaaattatataaattgcaatataattacaaaaagaagttgagaaatgtagaaacatgttatacataggttttttgagttatgtaacataagatatgtggtgttgagtgcagcaacatgggaggcagtgtgtgtatactcgcagtttcggtcatcaccatcgccaaaatgctgcgtttcactctctgccttctactaccaaaacattgttccttgtcctacctgtagctgcggctgctcgagttcccattgtgtcaagtaattcacttttctaaacctttcacttttttttggatatagatgtaacaacatgtataatatatactagagagcaacatttgattgatcagggatggagagttgccgccatatcttgaacagaaacatgatccagatgaggaagtatcgcctgtcgtgaagtgttcggatcatatgtgtcccatccgcatccactggcatgtgaaagtgaactatagagagtattggagggttaagatcacagcaacaaatttcaacccaatgaagaattacactaattggaacttagtggtgcttcatccaaacttgaaagcgttcaacagtcttagcttaactacaatcttgacacctatcaaacagcatagtaggaaa

SEQ ID NO: 28264 - DNA, 1998 bp, Arabidopsis thaliana landsberg
taaggtttttccagattgatggaaagaggtacacctagatccagagcatttttcttgaggactgtcccattcgtaaagcggctatcttgcccaatggctctcaggtcattgtctccggaagaagaaagttcttttacagctttgatttggacaaggcaaagtttgacaaaattggccctttggttggtagagaggagaaaagcttggaatatttcgaggtgtcacaagactctaacaccatagcttttgttggcaacgaaggttatatcttacttgtgtctacaaaaacaaaagagctgataggaaccctaaagatgaatggttcagttaggtctttagcatttagtgaagatgggaagcatttgctgagctcaggaggtgacgggcaagtctatgtctgggatctgagaacaatgaaatgcttatacaaaggcgtggatgaaggcagcacttgtggcacttctctttgcagttcgcttaacggagcattgtttgcttctggaaccgacagaggaatcgtaaacatttacaagaaatctgagtttgtgggaggcaaaagaaagccgataaagacagtggacaatctcacatccaagatagatttcatgaagttcaaccatgatgctcagattctagctatagtctctacaatgaacaaaaacagtgtaaagctagtccatgttccatccctaaccgtcttctcaaactggccgccaccaaacagcacaatgcattaccctcgctgcctagacttcagccccggaagtggcttcatggctatggggaacgctgccggaaaagttttgctgtataaactccatcattaccagaatgcttgaagtggtctttaacaagggcagttttgggattgttgtgtttcctctttttttgtcgcaagtactctttatgttatcaattttcctatccaattatcgatcaatgaaaaattttctttctgattcttgggattgagtgggccaagttttgttttctcacgattttgacagcatcaaccacttatttggtactatcatctaaaaataaatatgcaggagaaaaagaaagatgtcaacattatttcatggattaacacaaagtacaaattttagtagagtggcttactaatagctgaaagggtatctcgacccagagattgaatctgaaccgtccattctgggaagggcaaacaaaacagtgtttgtgtctcacgttctcttccttctctaatagagtcttaagccgctttttcactccttaaacccaaaaaaaaacattagtactatttccttcggagcctggccggcgaatccgacaggtcgtttcagctgtgtccgaaggaaagttccaatttttatctgtttttcttcacggaaatccagttaaggtaattgtctacatttctcgatttactttggtttctctgggttttgctgttttcttttctaatttctcgaatgattcatcatttcttgcatttggggtgatgaagaagcacaagtttacacattttctggtttatatgcttcacaagtgcttctcttataatgttgtttattagtattggttgtttgatttcactgaaaattagtcagtcaacttacagtgtattaattggttcaataaatttttcataattcatttcttaacatgattttacctcattcattatatttatagatttagatcccttgataatgatctgatattctttctgtgaatttgaaagttgcaggtttccacattgcacagctgtaccatttgtcgagatcacaacactcaagtctcttagatttagcaagcttatggcttcattgcagttgtacggagttaaaactccagggcttgctttaagttcaaagaggcttgagtttgcttcaaagggggcatgtttttcagttacgttgccctcaagtagtgctgtctttagagacgtagagcattcttgtaggaatataggtttgagagttagttgtgaagctctaagagtcgatttgcttc

SEQ ID NO: 28265 - DNA, 1343 bp, Arabidopsis thaliana landsberg
tattaaaaggattacccgaaattatgttattatccgggatatgatggatacagtttgcaagtatttttgtaatcaaccagtgaattcaaagtttcaaatgttacctatatacccaaaaaaaaagacaaattttgtctagacgaatagttttcggtttagtagtcttatcattagatgtactcatactagtgatagtcagacagtcctttatatataaaaatctcttacgggtaaacgaaatcagaaacacttctatatagcgaaagttttatcacatatataataaatatcttataatggaccaaaaatatgtggatcgatatttaccacttttgaaaaaaattgtcattgtaaagtctgatccggttgtgtataaatctagatcattgtgaactggattagtcaagctaaacgggtttaaactcaagtttgaattagattgaatcggactatatatcccttatatagaagaagaaaacaattcataaaacaaaattgtgatatatcataagcattaggaacatgacaaaagttagtgcggacatgtataaatggatgaatgcgtcaccaaactgtccaaaaacttttggacacatagcctctttcttatttttagctgcactgtcttgtctcactatttcctcattgcctctcacctttttatttttgtttttagtgaaatattataagtcaaagagttagaaactccaaagataccaaaatttattactttgatctgatgcacataattgagtacaattctaaagttaaattatcaaaaatccacacagccccacaaatgtaaaactcttttgttacatcaaaaggagagaaagatagtgggataaagtatttaataatcagtgaatggtgcataagttaagcaatagagtttagaaaaactgattttgtgagagcgcaaaaggcccaaggtatcatcaatggtacgcatcaaaggacccgaaccaattatatttcgatgaatctttgggcccttaaacaaagatgacgaaaaaaaaaggaaaagcaaagcaagtgtttggtcctgtaccaatagattccttttattcatattattaattggaaaaaaaaaatcaaataagtaattgatgtttcctaccaacttgaaagaaaaagcctagacaagtggctgcactttagtttttcactttctatcattttaacttttcaagagaaacccacttatattatgttgtacatacattttccagacattgtaaatttttgactcgtttaacatttttatcaaaagcagtaaaaaaaatgcatatggatttgacaggacaatatccacgtgttgtgatcgaatggcttaatcataa

SEQ ID NO: 28266 - DNA, 2038 bp, Arabidopsis thaliana landsberg
  unsure (1)..(2038): unsure at all n locations
cctgttttttacgtgaatatgagggagagatgcttgtaggctggtgaaactaatgatttcatatttatactagaaaatccatatttgggaaaacttacaaagagtcttaaattagtgtgtatgaaaattcctctcttgtttttgttttttttcttaatatacattctcagtttaattatcagagaaattagtaaaagagagagaatgaaaagagacacaatcaccgcctgattgcaatccacttgttgacgtagcagacagtaggaggatggtagtagtagcacgcattattgtgacgttgacatgcgtaattgctgtcttataatcacaatctcttttgactatgactcttagagccgtactagtattattgttgcattgtcatcacgggtcagattcatttcatacaatgtatcttgttaacagaaagtccaaaggaaattcttatttgtatcttttctcatgaatcttcatgtatggctttgtttgttgacgtaatattgaatggaggcttatatgaagtcgatctataggagcataaaatcgtgaaaagtgttttaaaatctccaaatagaaaactaacaacagtcaataggatttgtaatactaagacaactatataaattttcagctacaaatttgacatctaagaaaagaatagataaaaaaaaactggaaattgaataatacaacactaaccaaaaattataatgaaagtgaattttgtgtggtgtgtctgaaattttatgtgcttgcagttgtatattagtgtgtatcctatccattattctcacttttctattttgttctatactttctacttcttctttttggtatttttctaattattcttaaattaacgccaactaaaaacaagaaatgtttagctgtcgtcacttagaggaaatctaaaattttgttttgttcatagctgtaaacaacctatgctttgtataaattgatactcacatttaatttaactaaccaatctagaagaatgtgaatatctcttaaaaattctaatcacgtatcgaataaatcacaatcacacgaaagatcctaaaatgtctaaaacgttctgataagtgccgagagactccaaagcctctaaaatttcatgtgtgttccggttgattaggattgaaccaaccacagtcaattgttttggtactttccggtttaaaaaactgatttaaccgaagtgaactagtacagaagatgatgcaaatttaaagaaggatttccatagaaacaatgacacgacacacatataaaaagatggaagatggcaacatgcagtcatgcagagattgtaaagagataaaaacaaagaaataactcgagaccaaaaccacctgtccacagaatgagactccatttcgacacgtggctaatctctacatgctccagaacacttgtttgttttcggagaagacagagtagcattctcgttacacaaaggaccttcgatctttctatattatctttttgcaatctgaaaagcaaaacctctaaaagttctcttaaaaacactcaaaaacaatacttcgttgtgtgatctttggtttccttgaaatcatacagttcaaagagtttgctcaatgaaggttcacgagacaagatctcacgctcacatgtctggagacgaacaaaaggtaatttctacaccagtttgttccttaattttttttattagtaatgtctttttaacttaatctattgttttctttagaagggaaatttgcggaagcacaaagcagaagggaagcttccagaatctgaacagtctcagaagaaggcaaagcctgaaaacgataacggacgttctgtcaacggcgccggagatgctgcttcagagtacaatgagttctgcaaagcggttgaggagaatctgtccattgatcagattaaagaagttctcgaaatcaacggccaagaatgttctgctccagaagagaccttgctagctcaatggttagtctctcattatttgaacaagtntttaaaatagattttaaagatttttttttgttttttg

SEQ ID NO: 28267 - DNA, 1349 bp, Arabidopsis thaliana landsberg
ttcttccacttttgatggcttataaaagatgatgacccaaaacactcaaaatgcagcagcaactgctctctcaccacccatctcctcatttctcttttgcatttctttctttttttctgcattgcattcttttgaggggtttaattttctgcatagctttgtctaatctcttagagctcaataagagaaggtactataactgatctctccctctttcaagttttttttttgtttggtttatagaaaactataaccgccattatccgttagttttaaccgttttttgaaactagtgaatcctcataactttgatttctcactaaaaacagatggatgttccacggccagctttcaaatgttttgatgacgatggccggcttaaacgttcaggtaaaaaatttaaatccccttgttggttacttgacagtttacacctttgaaatgaatgatccaaagagaaaaactgcgattgtttcagggacggtttggaccgcgagtgcgcatatcataaccgccgtgattggatctggtgttctatcgcttgcgtgggctataggtcaactcggttggatcgcaggtcctacagtgatgttgttgttctcttttgtcacttactactcttccacgcttcttagcgactgctacagaaccggagatcctgtctctgggaagagaaactatacttacatggacgctgtccgatcaatcctaggtatcaactatcgtctctctgttttcctccgcatatgctttgattgctctgtttttgggttgtttctctctgttttgttctgttttactctgttttgtgttctgaaatgctctgtttctggcaggtggctttaggttcaagatttgtgggctgattcagtatttgaatctgtttggtatcacggtcgggtacacaatcgcagcatctataagtatgatgtgagtctttctttctcacaaactagtttattttggaacaccatataatgagataaaaggccttaaaaatttggttgtatcggatcgagtttcagggcgatcaagaggtccaactgtttccacgagagcggagggaaaaacccgtgtcacatgtcgagcaatccatacatgatcatgtttggtgtgaccgaaatcttgctctctcagatcaaagattttgaccagatttggtggctctccattgtcgctgctatcatggccttcacatactctgcaatcggatcagctctcggaatcattcaaggcgcggggaaaagaacattactttgtaagactctgcgcagtaatcaacaaagcagagggttgaactaactctaatgtggttcagcatatggagctgtctagggaagtctcaccgg

SEQ ID NO: 28268 - DNA, 3486 bp, Arabidopsis thaliana landsberg
aagactgtaagtactaaattgggcttgatgggctcttcattggactaacataaatgtttcggacttgtgtatgtgttcttccttgtacattttcacctgcaaccttatcagccatagctatagcattctgaaatagaatcagtcaatgtgaacttttatgggagaagaaaggatttactatttcaaaataaacatattttctcatgaattacatcattacaagaaatctcaacaaaagaggatgaaaatgttaaagcgaagatgagttttcacttccagagttcttccatggggattccacgctcttgtgcaacatcgcggaactgtctcatctgttgtactgctgcaagagtggctctcgcattgttgagagcattgttgcttccaagctgtttccccaatgcattctcgactcctgccatctctagcacaatcctaaccgctcctccagcaatcacaccagtacctggtgaagcaggtctaagcatcaccttggctgctccataatcaccctctgatctataatacaaaaaccaaacaaaaccctcttaaaacataacttaaacccatctccaattgttccaaaacatagctcagtggcctattaaccaaccgattcttctaattgattgtgcacaacacaaagatcaatctcataaaaccagcattctgagtaacaacttccataactcaatccttaaaccaagcaaatcatcacatccaacacaatgctaaaaagactaaaccccacaatcttagctcattgtctactgattaacaaaaaccgattcttctaatcattagggcattattcaatattttaacttttgtgcacaatgcaaacatcagtttcgtaaaacaagtaccataacaccaatctgtaaaccaaacaaacccatcacaaatccaacacatgactgcacaatactaatcccaaaatcttagttcatcaccaagtaagacttttaccatccaaaaccaattcttccaacaattaacacacattacaaacatcaagtccaaaactttgattacctgtgagggaaagtagaatacttagtcataggaacttgaacaatgtttctcctagcatcaatagcagatttctgaacagcagcaacaacttctttagccttagcacaaccaacaccaacattcccttgtttatcaccaacaacaacgatagctctaaacttcaattgcttccctcctttaacaaccttagtcactctcctaacttgcacaactctctcttcaaacccatctctaatcttatctttctttggcttcccaccaatacctgaactcttcttatgctttgagtccatcacataaatatctttcccaagcatactctcaccactatacgcaggtccatagagctcttcaaaagcggtagcgatctcttcctctgtctcgtcgcttccttcgtcgaaatacggaggagagacgaatccttcgggagcaattggtgggtcgaagacgacatttgcggttatttctggtgtttcgtcttcgaagaagatggtttcggtatcggtcgatgaggctttgacgagagtgagagatgagaagcggcggttgaggaaggaggagaaagagacgatgggttttgtggaggaagaggagatgagagaagaggttcgggtgtggagtgagagtgaagagagtgatgagagagctgatgctgtcgccattgaaatggaggagcttttttggatgaggaaggaagtgagaatgaagcaaaaggcttatccagcaccagatcgtaaaaactgtaaagataattgtgttggggcttttaaagtaattatcaacttcttgtttctttacaaattggccacaatatattttataataacatttgaaccctcatatccttttgtttgaatttgggctcttcgctcactcctccctctttgtggcccaatgaagtttcttcaaagcccataaaaaagtaaactagtagtaatccacatcaaaccatataggcttgcggatacatcttaggtttactcaatcttaaaatagaaaagatcagtgaccatatgttaattcaacattttatttttacatactttggtcatttttaatatggactttgttttaattaagatcgattatactaactacaatcgcatatgacaccaacgagcaacgttaattgcttttatgattttaaaagtatgtgatttgcaaattaattaaaaggtgaccatatataaaagagtgtactacaaaaagggcctactactattcaattaacgttgctcgttagtgtcacgtggggaagttaaggttcccacttccccccaccacttctcacagttctcttcttctttttattgtcccattccaaattttaaccaacacatcaagcaaacttcattaatttatgttcagtgttgtagttgcaaacgttatttattggtttacgtttacaagtttagaactagttcgaatcgtgataatcttgaataatcataactttgttcatctaatcataagaacatagaactttgacatggtgtctccggatcttgttgacttagttctatcttaaagttaagctacacatattatagggaccccatattatagtacccaaacaaacaattagagagtttgtatgcaaatccataatatttaccgtagaattgtatgggtttaatgaggaaagaaaaagaaaagaaaaagaaaagaagagaaggacactgaaggagaatgtgatgctgctgaataaaagatacaatcaaaaaattgacaggcagtacaataatgataagtagtgtcatgacagctgacgactctactgcccaatcttgacgttatttatttttgtccattttttcttaagatattatttcaacttaaaagaagtagaaaataaaccataagtgcataacaatattccttttataaattgggttcaagatattgattcgattctgtttatttcaagtgtcgtggaactcaattttatgttatgcctgcctcggcaacaaagattttcgttcaagtggctctatgaaaataagttagggcaaactagatcgattgatgtaaacaaaaatagagctaaatagtggagatagtaaactggtgattttgtttcgtaaatagtcaaaaggagggggtgacaaaaaatagatttgtcccttacctctaagagatatagagcaaaacgtttgcatagcgctgtaccatttccttctatattttgtatatgtggatgtgcatggatctagctgatgacataacacggcaaaatcatttaacatttgattagcattggcatcaatatttgacgacgctcctcattatttatatatgtggatgtgctgatgtgcatgaatctagctgatcacataacctagtatatgtgcatggttttatggtgtgaacaagtttttaaatactttcttttcttggttttaggtgtgaactttaagttagagatgatggtcaaatctcacgaaccacaaa

SEQ ID NO: 28269 - DNA, 1279 bp, Arabidopsis thaliana landsberg
taaaatttcctggtcgaaggaaaaaaattaaaattgtcttgtacaattaagaatgactcatttgtgtactaaataaattcgatgggagggaccatgtttatctctgtaatattggtcgttcttaaagacgaagtggttggtctttgtaattaagaaaataattaatctttgatttgcttttattaattgttttattcgtagaattctattagcccttcaaacttataaaaaaggttataagacgagtatgaaaccaaagaatattggtcacccaaacggccaaacatatatagtggacttagattctgatagggaacccaataagtcagctactaaatcaagtaggcatccaaacaattacaagtaggtgttcaaatgacttttcagtatttcttatacagaaaaaacgttaagagttaatgatacatgtaatagttgcactaaatctaataatttcctctaagcataatattgaaccactcgaattcgcatcaatcaaaacaattttttttcactaatcatctaaatcaaccgctttccttcattgcattcaaagaatcgtctttttatttggagagagcaacataaagcttaacacaattcttgtaactcctttgatgatcttacgtacatagataaaaccaagaagaatttttccccattaatagtgcacacatatagttgtaatgtgaaatttttatttgtgttcggaaaacaaagtgagtcaagcaaaaaaatttttttctatcttgttaaaattatttgtttttcttttctaaatatgtttttatgtatagtgcgaccgagttttttttttaaataatgaatttttgtttatagatgtttaacacatttgaaaactaatgtaaaatacttttaatttttttttctttttcggaccattatttaatttttattagacgatatatttttttttttattcgaaaaaaagagagtctagattggtttatgcctatagaagaaaaaagtgcagtgaaatctaaatattgatcaactccgccaggtgagagggctgacattggtgaactagaccgagcgggatattggagcgagaccttgttcaagatcttgacggcgaaatgacttgaatgggagattcaatcaacatagacaaagaagaatcgaaaccttgttaaatatattcgtctgtctggtccataatgatgtcatagaaaaagaaacggtattgccatgcataggttgccaaattttacttaacaaattttataaacaaaaaagaaagtttacggtaacaaaa

SEQ ID NO: 28270 - DNA, 1687 bp, Arabidopsis thaliana landsberg
acgataaaaagcatactttcatcccactcaagttcgatacaagacagaattccattgtcataaagaaaatgcacatatattgagaatgcacaaagtgacgtattcatgacaaacatagagctattcacattcgcaagtaatagaaaatgcacctggtagaagacaactgcttttaaaccattcttttttatatgagtaagcattttatcaaggaggtgaagtttcccgctcgctttaatttctacatccaggatttcatgcaactccagattcttggtgagcagttgtttcaaagatgcatccataacgtatggatggtcacaggtctgtcaacaagttgcaaacacataaagaagattttaatatattcacacattaacatgcagaaagaggccttgagaaaatgtgatgctgaccgacaatagtcgtatatctaagcaaccccaaaactgtcaagtttgccaggttctatgtgtttcaaaaaagcataaaacaaatagacccaaaacctttgctctaccaaacatcaaacagaaaggcataacacctatgtgacaacctcttgaaagcatggaacacagaattgtttttttggctgcaatgcggtgaacaccttatcaatttttctattgctttctttatcttatcaccagtaataactgggtacttaactcacaagtgcattgaagaataagtgtttttaaaatcaagtaacttacttttcttacagaattgagagtttcttctagagctccaagatcaatcttcgaaagtgaagaaagagataaggatttggagaagagagtctgacagtattgctccagctgtacatctgatagctgcacaggaacccaatactctgggtacaccgaagaatagaatttgggatcacttgatttaccatgttgtatttgcccgttctcctcatattctctgctcgtaactggtccagtttctttcatatcctaatcaaatgcaaaatagaattgcagattacaagtaaaaggataagtaaatctagtatctaactatttaagagtccactgattaacgggtctccgaaagtaattagaaaccaacctgtgtcacgtgatcagattcttcaactggctggacaatgcaggagcaaacactcctattttgacaatcaccgttgacccttcaaaattttgaacaactcattacaatacagaacatatatcctaagaatcaaacccatctgcccaacattcaacattggcagatcgtttcaatagacagacaacactaaaaaaactcttacttttgccgttttttacacgtgttgcacatttcaggtcgattatcatttttgcacccagatggagatggaatgaccccatcagaactcataacgtgatcatctccatttgcaactgtagcacatgcatccagctcaatttctgcagtgtctctttttcttttcaaaggcaaaactatgtcggtttctaagccagttttactgacaagaagcttttgggtttctaaatttgtagatggtgaacatataacgctgtcatccctagtttcaactatgggggatgcataaagaaccatctttccagtctccgtagttgatttcaaaggaaaatcagtgtccttttctaaactagtttcgccaactggcagcctttttgattctgcatttgcaggtggtagacaatctgtg

SEQ ID NO: 28271 - DNA, 409 bp, Arabidopsis thaliana landsberg
cgccttctctcccgactcgaatatgtctgcttccttccagaatcccacagctaatccagctgcataggctgctcctagtgctgttgtctctatgtccactggcctcaccaccggacttcccatcagatcagcctgcaacattttcaaggagataagaagagaatgagattaatgttcgaacaacacaatcatcagaatctgattcatacagagaagagaggagagatcgtcatacctgaatctgcatcagaaggttgttagctgtggcaccaccatcaactctgagcaagaactcccctttcccgttattaagggaacccttttcacctgcatctttgttcatggagtcaaggacgtctttcacctggaaacacatgctctccagcacagcgccgagcaatgggagact

SEQ ID NO: 28272 - DNA, 1835 bp, Arabidopsis thaliana landsberg
aaattgaactgccggattaattttttttgcaaatgttctcatttgaaggaagaatttgagagaaaaataaaacactagttaacaattgaaacttaagaccggtcttaaaataataattaaaaggaaacactagtttaatattgaaactttaggccggtctcaaaataataatttagcacgaaataattaaggcaacatgtgctttgcacttcaacgcggaatcatatgaattatacattgacttaggattattattgacgtcgattcggcctttaaattataatttagaaccaaccataattataatatcactacaattggttagtatcaaacaatttaacaactgttaaatatcactgcaattgacttttagaatagatcatgataaagatcggtctttaaataataatttagcaccaaataattagagaggctacgtacgcatgtgatttgtattttaaatcggttatttatggactttaatttcgagtgggaaaatagaagaaagcaaaagtgatcaatggaggggcctttgttgactaagaatgagcacatcctcgacgacgttacaataatccatggcgattcttcctcaaacgaagagcacatcgtcaacattacaaccaatgtcgattcttcatcagatgatgagcaaacacaggatgattgtggtgatcatttgagacgtataatagctctttttgtggatgaagggtgtgatggatttacatctagtcatgtttgggttatggtcgagtttgttttgactttgctccaggttgttgcagccattgctgtcctgactctgacaaaagatgaaacagatccacagaaagtgtttcgtacactgatcatctgttataccggtggctgtattggcgtgctccttattctaggtttggacttctgggattattgcggaaggtataaactataatttgtttattctttgtttttaaggcattagaaaccgaaatcgatagataacagtttcttattgatttgcagattctacgaggtgatggagaatttgaaaaagatgcttgactatttcttcgtgggttgggttgtggtgttttcatggcatcttataaacaactcatcatctccagataatgctacacaacagtactggtgcgcaacaatactaaattttataactatttagtatgtctcgaaaacagagtaaatctctctaatgatgataatccaccatgcattttcctgttgcaggttatgtatggctttccttgttgtcagttgcattctacatgtgcttcctaatctcccctgcgcggcggcttgttttctatatcctatgatacttcgtcttacccagtctatagacttctttgatgacattactgaaaagatagaggacattaactggttaatctttgtatacttttttggaatcttctcctgcattatctgttgcatttttacttgttgcagcagattatgtagataaaatgaagaatggatcatgtcgtttctcctctcttttgtttaacaatgttgtaatatatactcttatctatttatcaaatataaagtcaagtgtcatgatagaatcctctcttcgttaaatcgttggcttaaaagacgggatgcatacgtcccaatcacctaagcatggtcgagcttgtgaaccgcatgtacgagtatccattcctttgttggttctagagctgacccatttcagtattcgaattaagtgatccaatttaaagacatagatagtagtcagtcagttcgagtatatgaagcagcatctcgttagaagcacgttatcgataggttcagtcttcaaataaagtaaagtcctcggtgta

SEQ ID NO: 28273 - DNA, 1874 bp, Arabidopsis thaliana landsberg
gtcacatcctcggggttaagtttgttgtttgctgccaaatgttgtaaccgggacagctctttggttatctctagcagagataatgactgaacattctttatattaggaacgacaaggccatgttcagtggccattgcaactccaatattatgtgaacctgcaagtaaccaagaatatatctatatctaataatccaaggatgttaacctcaaaaccaaaacaacaatgagaagttcctagaaaaaaaatacctttgagaatgatctcgagagattccgcgttgaagcaactattcacgaagggatatttggttagagccattgacagagacttgattaaagtaggaagaaaagtgcgtttgatggtggaatctgtattgttctctttgaagaactgcttgagctccacaagtgagtcgcagtttatctcttcaacaaaatgaaaatgcggtacacttgtagccatagtcattgtcttgaccattgctcggctgaatcccctgagaataaggatatagcttcaggtggttaattcagatacaagatgggttcatgtacaatgcaaattgccaacaaaggcgtaccttagaggaactgttttatcttcaaagttactactagctttagtggaaaccgagtctcctcctataacagcatgctcagaagaaactgaatctgttacaaatcctttctggtcactaaaccggagaacatcctctttcaaaactctaccatctttaccagttccagttataacattgatatctatgccaaggtcttttgcaaggttacgaaccgcaggcgttgagagagctccaagaagattttctgttccctgctttgaacctcccagagttacaatttctgaactatcagtggttagaagcgaatcctgcgagtcttcaaccgccaacctaaccagagtctctccaaccttgcatcaatagattttgccacatataagtacttataaaagtgaaacatttgatacctgatctatcagaacctttaaacatatatatatagataacacaaaagcttaacatgtcaaaatctcttagtgttcatggtttacaatagagtaacatgctcaaacttagcctctaacaccataaagaaagaaaatgtatctaaccttaataatgtcacctggagaatgtgaaatcagagccactttccctttaaaacgacttgtgatctctatagttgctttatcgctctgaacttcacagagtggctgaaactcttccacagaatctccctgcaaaaggaaaaacaccaaaatgtctatctcataacgaaacgaaacagaacaattgaaaaaaagaaactttgagcggagaaaccaaagagacctctttgacaaaccacttgagaagctcacattcagcaataccttccccagtttgagctagtggcacatcaattaaccctgaatttgaataagtggccatggcttcgttcgaaaaccagcttctacttcctccaccccatttcatcaactgtgaaaaatatgacaaacttgtttgatcctttgtccaaaaattaccagaaaaatcacacattctaagcaaacagagttttccatgtttaagtctctctgataaatttatgttctttctaaatttatacagtttcgatgtttcttgttccgcctagaacagcttctcggaagctaatgtcatgcctcaaaattaattagaaaaaaaaaactgaagagggaaggaaatttggtgaaagaaacatacagcggtagggtgaacaaagaatgggcgcgacgccggagaggaagacgactgataaagatactccggtacccggagcggcggagagcaaacagatgactatctgaatgggcggagaaaccggtggctt

SEQ ID NO: 28274 - DNA, 1826 bp, Arabidopsis thaliana landsberg
atatttttttagaaacggccaaatttttttttggtttcattcaaaatttaattagcccaaaaaatccaaaagccttcttgattaccccttacattatgaaaaattttcaaagaaattaattcacttaaatatgaagaattattacattgggaatcgtaaaagaagccccaagactccgatgaaatcaaaagtgtttggtttgggcaagttattaccaaaaccaacgacttgtatgatgcgactatgggagaatgacatattaagttaatatctatattgttgtcttatagaaaatgtatgatgcttctaagttttaaatacggccatttgttgatgttgatagatttgatgatgtatataatccttctagatgaaattgcaacgacattataatttgtaagataccagaaactaattcctcttcttttttcttttgcaatttgaatatctataaaattttggttaacaataaaagtttattttctaatcaaagaatttgtggtctagtagcaaacctaggtccgtccaaaagattgtatgatttaagtttccgaccaaaacgtttaagacataaaatatcatatagcttttgtccttaggatacacaaataagacaactccagacatcaaaacaaactacccaaattgtttacaatcaaatcttctctttgtttttaggctttgaatgagagaattagattttctcaccataactatattcaatcaatgcactacgggtttcaacggatgggctctcagcttcgaaaaatccagactagcatcaagctcctcgtccagctctccgataacacctctgatcaaagatgacaccattttttttattaaacaaaaaaacagttgcaatgttagaaaatcactgatgatgatggatgataagaattacatgttgtcccctctgatgatgtacaaacccaacacatgttgttgtactccttcctgcaaagatgaagacatagtaagaggtctcaatcctaattccaatatccatcattttaacagaactctgccttcacaccaaaaatatccaagaacatttgtctaatgaagtatcaacatgacctgacatactcttagtgtaaacaagaaaacagacatgaatcaaacctttaaccctcttacgaaaaaaaggaggtgatcatgtataattaattacacactgccaatatctacgtatttgacttacctatcactagctaaatcttttcacatatgaactcacaagattttttcaatcagttataacattcgaagaatactaacactaaatctgtttcggtgtatccaacactatctgatttagatacttccattcagaggccagttagttcatgattcactattctcttaccaaacaaagaactgtaggacaaggcctatcttaaatatctgagtaagtttttcctcaatattctgttgaaaagatgacactacgcaactaaatcaagcaatgtacattattagcaagaacgtagtaccaattaaaagatcaataccagacgacgaaagatactttgagtgacaatgaacaaaagataaactagcatccttatagtacctctatttttctagttttatgcgatcactacaaacaaaatatggagacatcgagaactctgctacatcatagccactcatggatacaaaccaacaaggttttgcaggtcatacactggccaatttacttgcagaaaaatgtatttgcacccattcaatttagtaacatcgaaaagttcagatgaaaatactttaaaacaggaatcagaagctaacctttgtggaaaacacacgttcatgagattcatcaa

SEQ ID NO: 28275 - DNA, 1571 bp, Arabidopsis thaliana landsberg
ctagataatttctatattacaaaatggatctgtatgtccaacacgagatgttcaacaaattttaaaaatagaaaaagatagtgtctagctctgatggagcacaaggggacacacgaaagagaatgataaacttacggcaagcttccagacgggcgttgcaacaagatgcaggcactggagaggaaggcaactctctgagaaaatactgcgcatttatggatacagttagataggtttaagagtgaaaggctaactcagcattctagtgaacagtaccaggtaccttaaggcaatcagcaataatatgagcatcctcctcgggactgaactcattttttcctgaaccaagtgactacgtataaatactttgcacaaaccaggaaatcaagaaaagaataataaatacataaacataagaactcaaacctttctcatattcgcgaattcggtgttcaacatcatcaacatcagcagcttgtctcaagattccttctatcctgactcctgcaagattttgttgtctttatcagctcagagtgagtaaaacaaagcagcaaaagaagctgaaaaaacctgaaactaataccatgattttcaacaaatctaagggccttttccaagaaagatggagctccatcaacatcttctagagcaagtaatactggtcttccaaggacagttgattttgttggtgtctcatcttctgtaagaatataaaaaaaatgcatcattgtctaatgaattgaaagcgaatcaagtcttgagatgtcaccgactatataaggaatgcccatattcttatgagccattcaacactaactggtcagcttatactccagaggaagggaacatatgttaacatgataatattattctgtagcttattttctagagaagacgaaactttgacattctcacaccactcaagacatatattgttatacatgtaaagactaaaccattgaaaaggtgacaaacatactcttttcatcaacaccaacagcaggatctgcatgatcattcctgaaaataccattttgacccataacatgggaagcactaggtgcttgtgtcagagcgttttccagagcagctttccactcgtgtagatcctccatagtgtcagcctgcaaaaaaaataaagtcacaaaatcataagaaatgttcagagcgtagattaagatggaggatgaggtggatgcacctgataaaaaccagattaagtagagtaacaacagaaaactaaaattttgagaaaaaccttaagtgtaaaggcccgtccatcacgaccatcgggaaagagaacagtcaacagcttcttgtccgccttaacaaccacactaaaaaaaagttcgaagttatctgacgttagtaacaccgaaccagattataaaatataaaaagattttaatgattcaaacaataagccaacctgcctgaattgttgagatcaattcccccaagggtcagattgacctcactgcccttcttgtggactgcactctgaagaatagaaacagaaaaattgagatactcatactctgtaataacagggtcatgccttataaaaa

SEQ ID NO: 28276 - DNA, 2143 bp, Arabidopsis thaliana landsberg
  unsure (1)..(2143): unsure at all n locations
ttatccgacagatgatgaatcagcttctcacttactttttttggctctttttgaagaggatttaggtattatatattacagggagtagatggagaagaaaagcgtagattaatatatagtttaatcttcgatgcatacatgttattaacttatacaccaatccatacatgtaattatataaaagcacacacaaacttcacttcacttgttacccagtttgagtcttggtctcttggacgttgtctactgtagttggatatctaaacacattaatcgacgtcatcaaatcaaagttgtagtgttctcacaacacaactgattcacaatctggactcgaatgaattgaatcgttttgcgtctcttgggtcttggcctcgccctcgaatactggaaactaaactgaaccaaatgatattgagttatgcaattacacaaaaggtcccctcaattatccagtgtcattttctgctttcttgagctgtttggtttacaaaaatttaggtgggaatcggcataagattaaatcttatttgacagaaaattccattatcgccaaaaatttcaatcaataggcgcctaacatttcaatcaataggcgccaaacgtattaatcaatcagcgccccagttggagaagtctagggaaaaacacaaacgtagcaaggattcgagctctgtctagacgatgcaagccaaaagcaagtctttcttcaagcccacctatgcttcttctatcggtgcctcagtaacaacagacacagacgatgggtgagctgtctgggagaacaatcggaacgccatcgacaacacctaccagcgtggatnnnnnnnnnnnnnnnnnnaaatcaatgatctttggcggttttacttctctttaggttcttcgaatttcctactttatttgtgttcttcagatgaatagaaaatgagcgataggcaactcctgattttctgggtttcctttaagatatttttgggcgaaattggatttttttttttaattgggtgtctttttgtgtgtctcttaattttgggtattcagaagtgaagtgcttaaaggatgcatcgaaaagacgctgaagaaaggatcttcttctgtacctaaaaatcacaaaaagaagcgtaattatacacaattccacttagagttgggccaatctgattttcttctcagacattgcgcagaatgtggagctaagtatgctcctggagatgaattagatgagaagaaccatcaaagttttcacaaggactatatgtatggactcccttttaaggttaggatcacactgaccttattgctcaagatcatatgtttctttgattattgtagaggttattagataaattgttgggtgtttatatttggtctcagggttggcagaacgagaaagcgtttacatcacctttgttcatcaagaaccgcatcgttatggtatcagaaaatgattcccctgcacacagaaacaaggttcattgttttcacaattcaacttgcactgtttatggtaccgtacttcgtttctaaacgatggatcttttgcaattgcaggtgcaagaggttgtgaaaatgatggaggttgagttgggtgaggattggattcttcaccaacattgtaaggtatgagcctgtatccacgtcttaacaacagtcatttgcggataaattccatagctcatgagtgttgttttggtattttatgtctactatattgagttcatgggtatctgatacaccttgttgagaagcttggcgaatacttgctttactttggtccactataaatatgaaaaacttcgacttagtctgattccttccatgtctatgactagcattgaaatcaaacaaaaaagtctatgatatctttagatgacctcatttcaataaattcacaagaaagatgatataacccctaattactttcctcagttgttttagaaactatcttgttatgtgtaggtttatctattcatatcctctcagaggatctctggatgtctagttgctgaaccaattaaggaagcatttaagctcatagcttctcctgatcctcaaagacagttacaaacccccagctcatcctcgccttcaacctccataaagaatggaaacattgttctacaaagagaggtatcgaaaagat

SEQ ID NO: 28277 - DNA, 1672 bp, Arabidopsis thaliana landsberg
aacaaaaataggagcatatagtggccagattatagtatatctataaatctaaccaaaatataacggatctttgtattttcaaccaaaatatagtatttcttaatatttcactaaatcataaatatcattctgaatttttttttgtctttctatataggagcatattcatgcaccaatcccggagaactacaaccacggtgaccaacaacttcagctacgtccacttccggtgatatttcacgacggaagactagtgaagcggccaacgccggccaccgctctcatcatcctcctttggatcccatttggaatcattctcgccgtgatccggatctttcttggagccgtcctcccattgtgggccacaccttacgtctctcagatattcggtggccatatcatcgtcaaaggaaagcctcctcagccaccggcggctggaaaatccggcgtgctctttgtgtgtactcacagaaccctaatggaccctgtggtattatcttatgtcctcggacgtagcatcccagccgttacttactcaatctcgcgcttatcagagatcttatctcccattccaaccgtccgattgacaagaatccgagatgtggatgcggctaagatcaaacaacaactgtcaaaaggagatctagtggtttgtcctgagggaaccacttgtcgtgaaccgtttttgttaagattcagcgcgcttttcgctgagttaacggataggattgttccggttgcgatgaactacagagtcggattcttccacgcgactacagcgagaggctggaagggtttggacccaattttcttcttcatgaacccaagaccggtttacgagattacgttcttgaaccagcttcctatggaggcaacatgttcgtccgggaagagcccgcatgacgtggcgaactatgttcagagaatcttggcggctacgttagggtttgagtgcaccaacttcacaagaaaagataagtatagggttctcgctggaaacgatggaacagtgtcgtacttgtcgttgctagaccaattgaagaaggtggttagcactttcgagccttgtctccattgaaaatactagaagtatagatcatccgatgattttctctctgttttaatatattagatcagtagtttcaaattaaacctgtttgcagtttctttctttcgattttagttttgtttgtgataaaagtttgagatgatttttttatatggtcaagtgttgaattcttgtttaaatgttattctttttcaaatatgtatgtaactccccataaccaatgttgatgaataatatatatgaagggataaatattttgctggtcattatattatgaattgctgttaaaaaaattccagcaattcatttgcttcaaaaatatttttgtcgatcaaattatttattttgaatgtcgaaaccatatactgtacagtataattaactgttatcaacgttggttcacttaaaacgttcttttaattaggttcttaacttcttattatattcaaatatccaacccactaatggccacattttcgtttacatacatcaaacacctataataaattaaaaatataataattgcattgtatttacattttgtaacacgttgaaactattagaggaaggaaaaataagaaatcacattctacaaaatttatg
